United States Patent Application Publication US 2022/0211838 A1 - sequence listing, part 7

SEQ ID NO: 9989 - protein, 1177 aa, Artificial Sequence
  SARS-CoV-2/Wuhan/WIV05/2019__EPI_ISL_402128 spike protein (1-1147)(I712C_T1077C) Foldon construct
MFVFLVLLPLVSSQCVNLTTRTQLPPAYTNSFTRGVYYPDKVFRSSVLHSTQDLFLPFFSNVTWFHAIHVSGTNGTKRFDNPVLPFNDGVYFASTEKSNIIRGWIFGTTLDSKTQSLLIVNNATNVVIKVCEFQFCNDPFLGVYYHKNNKSWMESEFRVYSSANNCTFEYVSQPFLMDLEGKQGNFKNLREFVFKNIDGYFKIYSKHTPINLVRDLPQGFSALEPLVDLPIGINITRFQTLLALHRSYLTPGDSSSGWTAGAAAYYVGYLQPRTFLLKYNENGTITDAVDCALDPLSETKCTLKSFTVEKGIYQTSNFRVQPTESIVRFPNITNLCPFGEVFNATRFASVYAWNRKRISNCVADYSVLYNSASFSTFKCYGVSPTKLNDLCFTNVYADSFVIRGDEVRQIAPGQTGKIADYNYKLPDDFTGCVIAWNSNNLDSKVGGNYNYLYRLFRKSNLKPFERDISTEIYQAGSTPCNGVEGFNCYFPLQSYGFQPTNGVGYQPYRVVVLSFELLHAPATVCGPKKSTNLVKNKCVNFNFNGLTGTGVLTESNKKFLPFQQFGRDIADTTDAVRDPQTLEILDITPCSFGGVSVITPGTNTSNQVAVLYQDVNCTEVPVAIHADQLTPTWRVYSTGSNVFQTRAGCLIGAEHVNNSYECDIPIGAGICASYQTQTNSPRRARSVASQSIIAYTMSLGAENSVAYSNNSCAIPTNFTISVTTEILPVSMTKTSVDCTMYICGDSTECSNLLLQYGSFCTQLNRALTGIAVEQDKNTQEVFAQVKQIYKTPPIKDFGGFNFSQILPDPSKPSKRSFIEDLLFNKVTLADAGFIKQYGDCLGDIAARDLICAQKFNGLTVLPPLLTDEMIAQYTSALLAGTITSGWTFGAGAALQIPFAMQMAYRFNGIGVTQNVLYENQKLIANQFNSAIGKIQDSLSSTASALGKLQDVVNQNAQALNTLVKQLSSNFGAISSVLNDILSRLDKVEAEVQIDRLITGRLQSLQTYVTQQLIRAAEIRASANLAATKMSECVLGQSKRVDFCGKGYHLMSFPQSAPHGVVFLHVTYVPAQEKNFTCAPAICHDGKAHFPREGVFVSNGTHWFVTQRNFYEPQIITTDNTFVSGNCDVVIGIVNNTVYDPLQPELDSGGSGYIPEAPRDGQAYVRKDGEWVLLSTFL

SEQ ID NO: 9990 - protein, 1173 aa, Artificial Sequence
  SARS-CoV-2/bat/Yunnan/RaTG13/2013__EPI_ISL_402131 spike protein (1-1143)(I708C_T1073C) Foldon construct
MFVFLVLLPLVSSQCVNLTTRTQLPPAYTNSSTRGVYYPDKVFRSSVLHLTQDLFLPFFSNVTWFHAIHVSGTNGIKRFDNPVLPFNDGVYFASTEKSNIIRGWIFGTTLDSKTQSLLIVNNATNVVIKVCEFQFCNDPFLGVYYHKNNKSWMESEFRVYSSANNCTFEYVSQPFLMDLEGKQGNFKNLREFVFKNIDGYFKIYSKHTPINLVRDLPPGFSALEPLVDLPIGINITRFQTLLALHRSYLTPGDSSSGWTAGAAAYYVGYLQPRTFLLKYNENGTITDAVDCALDPLSETKCTLKSFTVEKGIYQTSNFRVQPTDSIVRFPNITNLCPFGEVFNATTFASVYAWNRKRISNCVADYSVLYNSTSFSTFKCYGVSPTKLNDLCFTNVYADSFVITGDEVRQIAPGQTGKIADYNYKLPDDFTGCVIAWNSKHIDAKEGGNFNYLYRLFRKANLKPFERDISTEIYQAGSKPCNGQTGLNCYYPLYRYGFYPTDGVGHQPYRVVVLSFELLNAPATVCGPKKSTNLVKNKCVNFNFNGLTGTGVLTESNKKFLPFQQFGRDIADTTDAVRDPQTLEILDITPCSFGGVSVITPGTNASNQVAVLYQDVNCTEVPVAIHADQLTPTWRVYSTGSNVFQTRAGCLIGAEHVNNSYECDIPIGAGICASYQTQTNSRSVASQSIIAYTMSLGAENSVAYSNNSCAIPTNFTISVTTEILPVSMTKTSVDCTMYICGDSTECSNLLLQYGSFCTQLNRALTGIAVEQDKNTQEVFAQVKQIYKTPPIKDFGGFNFSQILPDPSKPSKRSFIEDLLFNKVTLADAGFIKQYGDCLGDIAARDLICAQKFNGLTVLPPLLTDEMIAQYTSALLAGTITSGWTFGAGAALQIPFAMQMAYRFNGIGVTQNVLYENQKLIANQFNSAIGKIQDSLSSTASALGKLQDVVNQNAQALNTLVKQLSSNFGAISSVLNDILSRLDKVEAEVQIDRLITGRLQSLQTYVTQQLIRAAEIRASANLAATKMSECVLGQSKRVDFCGKGYHLMSFPQSAPHGVVFLHVTYVPAQEKNFTCAPAICHDGKAHFPREGVFVSNGTHWFVTQRNFYEPQIITTDNTFVSGSCDVVIGIVNNTVYDPLQPELDSGGSGYIPEAPRDGQAYVRKDGEWVLLSTFL

SEQ ID NO: 9991 - protein, 1177 aa, Artificial Sequence
  SARS-CoV-2/Wuhan/HBCDC-HB-01/2019__EPI_ISL_402132 spike protein (1-1147)(I712C_T1077C) Foldon construct
MFVFLVLLPLVSSQCVNLTTRTQLPPAYTNSITRGVYYPDKVFRSSVLHSTQDLFLPFFSNVTWFHAIHVSGTNGTKRFDNPVLPFNDGVYFASTEKSNIIRGWIFGTTLDSKTQSLLIVNNATNVVIKVCEFQFCNDPFLGVYYHKNNKSWMESEFRVYSSANNCTFEYVSQPFLMDLEGKQGNFKNLREFVFKNIDGYFKIYSKHTPINLVRDLPQGFSALEPLVDLPIGINITRFQTLLALHRSYLTPGDSSSGWTAGAAAYYVGYLQPRTFLLKYNENGTITDAVDCALDPLSETKCTLKSFTVEKGIYQTSNFRVQPTESIVRFPNITNLCPFGEVFNATRFASVYAWNRKRISNCVADYSVLYNSASFSTFKCYGVSPTKLNDLCFTNVYADSFVIRGDEVRQIAPGQTGKIADYNYKLPDDFTGCVIAWNSNNLDSKVGGNYNYLYRLFRKSNLKPFERDISTEIYQAGSTPCNGVEGFNCYFPLQSYGFQPTNGVGYQPYRVVVLSFELLHAPATVCGPKKSTNLVKNKCVNFNFNGLTGTGVLTESNKKFLPFQQFGRDIADTTDAVRDPQTLEILDITPCSFGGVSVITPGTNTSNQVAVLYQDVNCTEVPVAIHADQLTPTWRVYSTGSNVFQTRAGCLIGAEHVNNSYECDIPIGAGICASYQTQTNSPRRARSVASQSIIAYTMSLGAENSVAYSNNSCAIPTNFTISVTTEILPVSMTKTSVDCTMYICGDSTECSNLLLQYGSFCTQLNRALTGIAVEQDKNTQEVFAQVKQIYKTPPIKDFGGFNFSQILPDPSKPSKRSFIEDLLFNKVTLADAGFIKQYGDCLGDIAARDLICAQKFNGLTVLPPLLTDEMIAQYTSALLAGTITSGWTFGAGAALQIPFAMQMAYRFNGIGVTQNVLYENQKLIANQFNSAIGKIQDSLSSTASALGKLQDVVNQNAQALNTLVKQLSSNFGAISSVLNDILSRLDKVEAEVQIDRLITGRLQSLQTYVTQQLIRAAEIRASANLAATKMSECVLGQSKRVDFCGKGYHLMSFPQSAPHGVVFLHVTYVPAQEKNFTCAPAICHDGKAHFPREGVFVSNGTHWFVTQRNFYEPQIITTDNTFVSGNCDVVIGIVNNTVYDPLQPELDSGGSGYIPEAPRDGQAYVRKDGEWVLLSTFL

SEQ ID NO: 9992 - protein, 1177 aa, Artificial Sequence
  SARS-CoV-2/Guangdong/20SF028/2020__EPI_ISL_403936 spike protein (1-1147)(I712C_T1077C) Foldon construct
MFVFLVLLPLVSSQCVNLTTRTQLPPAYTNSFTRGVYYPDKVFRSSVLYSTQDLFLPFFSNVTWFHAIHVSGTNGTKRFDNPVLPFNDGVYFASTEKSNIIRGWIFGTTLDSKTQSLLIVNNATNVVIKVCEFQFCNDPFLGVYYHKNNKSWMESEFRVYSSANNCTFEYVSQPFLMDLEGKQGNFKNLREFVFKNIDGYFKIYSKHTPINLVRDLPQGFSALEPLVDLPIGINITRFQTLLALHRSYLTPGDSSSGWTAGAAAYYVGYLQPRTFLLKYNENGTITDAVDCALDPLSETKCTLKSFTVEKGIYQTSNFRVQPTESIVRFPNITNLCPFGEVFNATRFASVYAWNRKRISNCVADYSVLYNSASFSTFKCYGVSPTKLNDLCFTNVYADSFVIRGDEVRQIAPGQTGKIADYNYKLPDDFTGCVIAWNSNNLDSKVGGNYNYLYRLFRKSNLKPFERDISTEIYQAGSTPCNGVEGFNCYFPLQSYGFQPTNGVGYQPYRVVVLSFELLHAPATVCGPKKSTNLVKNKCVNFNFNGLTGTGVLTESNKKFLPFQQFGRDIADTTDAVRDPQTLEILDITPCSFGGVSVITPGTNTSNQVAVLYQDVNCTEVPVAIHADQLTPTWRVYSTGSNVFQTRAGCLIGAEHVNNSYECDIPIGAGICASYQTQTNSPRRARSVASQSIIAYTMSLGAENSVAYSNNSCAIPTNFTISVTTEILPVSMTKTSVDCTMYICGDSTECSNLLLQYGSFCTQLNRALTGIAVEQDKNTQEVFAQVKQIYKTPPIKDFGGFNFSQILPDPSKPSKRSFIEDLLFNKVTLADAGFIKQYGDCLGDIAARDLICAQKFNGLTVLPPLLTDEMIAQYTSALLAGTITSGWTFGAGAALQIPFAMQMAYRFNGIGVTQNVLYENQKLIANQFNSAIGKIQDSLSSTASALGKLQDVVNQNAQALNTLVKQLSSNFGAISSVLNDILSRLDKVEAEVQIDRLITGRLQSLQTYVTQQLIRAAEIRASANLAATKMSECVLGQSKRVDFCGKGYHLMSFPQSAPHGVVFLHVTYVPAQEKNFTCAPAICHDGKAHFPREGVFVSNGTHWFVTQRNFYEPQIITTDNTFVSGNCDVVIGIVNNTVYDPLQPELDSGGSGYIPEAPRDGQAYVRKDGEWVLLSTFL

SEQ ID NO: 9993 - protein, 1177 aa, Artificial Sequence
  SARS-CoV-2/Shenzhen/SZTH-001/2020__EPI_ISL_406592 spike protein (1-1147)(I712C_T1077C) Foldon construct
MFVFLVLLPLVSSQCVNLTTRTQLPPAYTNSFTRGVYYPDKVFRSSVLHSTQDLFLPFFSNVTWFHAIHVSGTNGTKRFDNPVLPFNDGVYFASTEKSNIIRGWIFGTTLDSKTQSLLIVNNATNVVIKVCEFQFCNDPFLGVYYHKNNKSWMESEFRVYSSANNCTFEYVSQPFLMDLEGKQGNFKNLREFVFKNIDGYFKIYSKHTPINLVRDLPQGFSALEPLVDLPIGINITRFQTLLALHRSYLTPGDSSSGWTAGAAAYYVGYLQPRTFLLKYNENGTITDAVDCALDPLSETKCTLKSFTVEKGIYQTSNFRVQPTESIVRFPNITNLCPFGEVFNATRFASVYAWNRKRISNCVADYSVLYNSASFSTFKCYGVSPTKLNDLCFTNVYADSFVIRGDEVRQIAPGQTGKIADYNYKLPDDFTGCVIAWNSNNLDSKVGGNYNYLYRLFRKSNLKPFERDISTEIYQAGSTPCNGVEGFNCYFPLQSYGFQPTNGVGYQPYRVVVLSFELLHAPATVCGPKKSTNLVKNKCVNFNFNGLTGTGVLTESNKKFLPFQQFGRDIADTTDAVRDPQTLEILDITPCSFGGVSVITPGTNTSNQVAVLYQDVNCTEVPVAIHADQLTPTWRVYSTGSNVFQTRAGCLIGAEHVNNSYECDIPIGAGICASYQTQTNSPRRARSVASQSIIAYTMSLGAENSVAYSNNSCAIPTNFTISVTTEILPVSMTKTSVDCTMYICGDSTECSNLLLQYGSFCTQLNRALTGIAVEQDKNTQEVFAQVKQIYKTPPIKDFGGFNFSQILPDPSKPSKRSFIEDLLFNKVTLADAGFIKQYGDCLGDIAARDLICAQKFNGLTVLPPLLTDEMIAQYTSALLAGTITSGWTFGAGAALQIPFAMQMAYRFNGIGVTQNVLYENQKLIANQFNSAIGKIQDSLSSTASALGKLQDVVNQNAQALNTLVKQLSSNFGAISSVLNDILSRLDKVEAEVQIDRLITGRLQSLQTYVTQQLIRAAEIRASANLAATKMSECVLGQSKRVDFCGKGYHLMSFPQSAPHGVVFLHVTYVPAQEKNFTCAPAICHDGKAHFPREGVFVSNGTHWFVTQRNFYEPQIITTDNTFVSGNCDVLIGIVNNTVYDPLQPELDSGGSGYIPEAPRDGQAYVRKDGEWVLLSTFL

SEQ ID NO: 9994 - protein, 1177 aa, Artificial Sequence
  SARS-CoV-2/Shenzhen/SZTH-004/2020__EPI_ISL_406595 spike protein (1-1147)(I712C_T1077C) Foldon construct
MFVFLVLLPLVSSQCVNLTTRTQLPPAYTNSFTRGVYYPDKVFRSSVLHSTQDLFLPFFSNVTWFHAIHVSGTNGTKRFDNPVLPFNDGVYFASTEKSNIIRGWIFGTTLDSKTQSLLIVNNATNVVIKVCEFQFCNDPFLGVYYHKNNKSWMESEFRVYSSANNCTFEYVSQPFLMDLEGKQGNFKNLREFVFKNIDGYFKIYSKHTPINLVRDLPQGFSALEPLVDLPIGINITRFQTLLALHRSYLTPGDSSSGWTAGAAAYYVGYLQPRTFLLKYNENGTITDAVDCALDPLSETKCTLKSFTVEKGIYQTSNFRVQPTESIVRFPNITNLCPFGEVFNATRFASVYAWDRKRISNCVAYYSVLYNSASFSTFKCYGVSPTKLNDLCFTNVYADSFVIRGDEVRQIAPGQTGKIADYNYKLPDDFTGCVIAWNSNNLDSKVGGNYNYLYRLFRKSNLKPFERDISTEIYQAGSTPCNGVEGFNCYFPLQSYGFQPTNGVGYQPYRVVVLSFELLHAPATVCGPKKSTNLVKNKCVNFNFNGLTGTGVLTESNKKFLPFQQFGRDIADTTDAVRDPQTLEILDITPCSFGGVSVITPGTNTSNQVAVLYQDVNCTEVPVAIHADQLTPTWRVYSTGSNVFQTRAGCLIGAEHVNNSYECDIPIGAGICASYQTQTNSPRRARSVASQSIIAYTMSLGAENSVAYSNNSCAIPTNFTISVTTEILPVSMTKTSVDCTMYICGDSTECSNLLLQYGSFCTQLNRALTGIAVEQDKNTQEVFAQVKQIYKTPPIKDFGGFNFSQILPDPSKPSKRSFIEDLLFNKVTLADAGFIKQYGDCLGDIAARDLICAQKFNGLTVLPPLLTDEMIAQYTSALLAGTITSGWTFGAGAALQIPFAMQMAYRFNGIGVTQNVLYENQKLIANQFNSAIGKIQDSLSSTASALGKLQDVVNQNAQALNTLVKQLSSNFGAISSVLNDILSRLDKVEAEVQIDRLITGRLQSLQTYVTQQLIRAAEIRASANLAATKMSECVLGQSKRVDFCGKGYHLMSFPQSAPHGVVFLHVTYVPAQEKNFTCAPAICHDGKAHFPREGVFVSNGTHWFVTQRNFYEPQIITTDNTFVSGNCDVVIGIVNNTVYDPLQPELDSGGSGYIPEAPRDGQAYVRKDGEWVLLSTFL

SEQ ID NO: 9995 - protein, 1177 aa, Artificial Sequence
  SARS-CoV-2/France/IDF0372/2020__EPI_ISL_406596 spike protein (1-1147)(I712C_T1077C) Foldon construct
MFVFLVLLPLVSSQCVNLTTRTQLPPAYTNSFTRGVYYPDKVFRSSVLHSTQDLFLPFFSNVTWFHAIHVSGTNGTKRFDNPVLPFNDGVYFASTEKSNIIRGWIFGTTLDSKTQSLLIVNNATNVVIKVCEFQFCNDPFLGVYYHKNNKSWMESEFRVYSSANNCTFEYVSQPFLMDLEGKQGNFKNLREFVFKNIDGYFKIYSKHTPINLVRDLPQGFSALEPLVDLPIGINITRFQTLLALHRSYLTPGDSSSGWTAGAAAYYVGYLQPRTFLLKYNENGTITDAVDCALDPLSETKCTLKSFTVEKGIYQTSNFRVQPTESIVRFPNITNLCPFGEVFNATRFASVYAWNRKRISNCVADYSFLYNSASFSTFKCYGVSPTKLNDLCFTNVYADSFVIRGDEVRQIAPGQTGKIADYNYKLPDDFTGCVIAWNSNNLDSKVGGNYNYLYRLFRKSNLKPFERDISTEIYQAGSTPCNGVEGFNCYFPLQSYGFQPTNGVGYQPYRVVVLSFELLHAPATVCGPKKSTNLVKNKCVNFNFNGLTGTGVLTESNKKFLPFQQFGRDIADTTDAVRDPQTLEILDITPCSFGGVSVITPGTNTSNQVAVLYQDVNCTEVPVAIHADQLTPTWRVYSTGSNVFQTRAGCLIGAEHVNNSYECDIPIGAGICASYQTQTNSPRRARSVASQSIIAYTMSLGAENSVAYSNNSCAIPTNFTISVTTEILPVSMTKTSVDCTMYICGDSTECSNLLLQYGSFCTQLNRALTGIAVEQDKNTQEVFAQVKQIYKTPPIKDFGGFNFSQILPDPSKPSKRSFIEDLLFNKVTLADAGFIKQYGDCLGDIAARDLICAQKFNGLTVLPPLLTDEMIAQYTSALLAGTITSGWTFGAGAALQIPFAMQMAYRFNGIGVTQNVLYENQKLIANQFNSAIGKIQDSLSSTASALGKLQDVVNQNAQALNTLVKQLSSNFGAISSVLNDILSRLDKVEAEVQIDRLITGRLQSLQTYVTQQLIRAAEIRASANLAATKMSECVLGQSKRVDFCGKGYHLMSFPQSAPHGVVFLHVTYVPAQEKNFTCAPAICHDGKAHFPREGVFVSNGTHWFVTQRNFYEPQIITTDNTFVSGNCDVVIGIVNNTVYDPLQPELDSGGSGYIPEAPRDGQAYVRKDGEWVLLSTFL

SEQ ID NO: 9996 - protein, 1177 aa, Artificial Sequence
  SARS-CoV-2/Australia/VIC01/2020__EPI_ISL_406844 spike protein (1-1147)(I712C_T1077C) Foldon construct
MFVFLVLLPLVSSQCVNLTTRTQLPPAYTNSFTRGVYYPDKVFRSSVLHSTQDLFLPFFSNVTWFHAIHVSGTNGTKRFDNPVLPFNDGVYFASTEKSNIIRGWIFGTTLDSKTQSLLIVNNATNVVIKVCEFQFCNDPFLGVYYHKNNKSWMESEFRVYSSANNCTFEYVSQPFLMDLEGKQGNFKNLREFVFKNIDGYFKIYSKHTPINLVRDLPQGFSALEPLVDLPIGINITRFQTLLALHRRYLTPGDSSSGWTAGAAAYYVGYLQPRTFLLKYNENGTITDAVDCALDPLSETKCTLKSFTVEKGIYQTSNFRVQPTESIVRFPNITNLCPFGEVFNATRFASVYAWNRKRISNCVADYSVLYNSASFSTFKCYGVSPTKLNDLCFTNVYADSFVIRGDEVRQIAPGQTGKIADYNYKLPDDFTGCVIAWNSNNLDSKVGGNYNYLYRLFRKSNLKPFERDISTEIYQAGSTPCNGVEGFNCYFPLQSYGFQPTNGVGYQPYRVVVLSFELLHAPATVCGPKKSTNLVKNKCVNFNFNGLTGTGVLTESNKKFLPFQQFGRDIADTTDAVRDPQTLEILDITPCSFGGVSVITPGTNTSNQVAVLYQDVNCTEVPVAIHADQLTPTWRVYSTGSNVFQTRAGCLIGAEHVNNSYECDIPIGAGICASYQTQTNSPRRARSVASQSIIAYTMSLGAENSVAYSNNSCAIPTNFTISVTTEILPVSMTKTSVDCTMYICGDSTECSNLLLQYGSFCTQLNRALTGIAVEQDKNTQEVFAQVKQIYKTPPIKDFGGFNFSQILPDPSKPSKRSFIEDLLFNKVTLADAGFIKQYGDCLGDIAARDLICAQKFNGLTVLPPLLTDEMIAQYTSALLAGTITSGWTFGAGAALQIPFAMQMAYRFNGIGVTQNVLYENQKLIANQFNSAIGKIQDSLSSTASALGKLQDVVNQNAQALNTLVKQLSSNFGAISSVLNDILSRLDKVEAEVQIDRLITGRLQSLQTYVTQQLIRAAEIRASANLAATKMSECVLGQSKRVDFCGKGYHLMSFPQSAPHGVVFLHVTYVPAQEKNFTCAPAICHDGKAHFPREGVFVSNGTHWFVTQRNFYEPQIITTDNTFVSGNCDVVIGIVNNTVYDPLQPELDSGGSGYIPEAPRDGQAYVRKDGEWVLLSTFL

SEQ ID NO: 9997 - protein, 1177 aa, Artificial Sequence
  SARS-CoV-2/Germany/BavPat1/2020__EPI_ISL_406862 spike protein (1-1147)(I712C_T1077C) Foldon construct
MFVFLVLLPLVSSQCVNLTTRTQLPPAYTNSFTRGVYYPDKVFRSSVLHSTQDLFLPFFSNVTWFHAIHVSGTNGTKRFDNPVLPFNDGVYFASTEKSNIIRGWIFGTTLDSKTQSLLIVNNATNVVIKVCEFQFCNDPFLGVYYHKNNKSWMESEFRVYSSANNCTFEYVSQPFLMDLEGKQGNFKNLREFVFKNIDGYFKIYSKHTPINLVRDLPQGFSALEPLVDLPIGINITRFQTLLALHRSYLTPGDSSSGWTAGAAAYYVGYLQPRTFLLKYNENGTITDAVDCALDPLSETKCTLKSFTVEKGIYQTSNFRVQPTESIVRFPNITNLCPFGEVFNATRFASVYAWNRKRISNCVADYSVLYNSASFSTFKCYGVSPTKLNDLCFTNVYADSFVIRGDEVRQIAPGQTGKIADYNYKLPDDFTGCVIAWNSNNLDSKVGGNYNYLYRLFRKSNLKPFERDISTEIYQAGSTPCNGVEGFNCYFPLQSYGFQPTNGVGYQPYRVVVLSFELLHAPATVCGPKKSTNLVKNKCVNFNFNGLTGTGVLTESNKKFLPFQQFGRDIADTTDAVRDPQTLEILDITPCSFGGVSVITPGTNTSNQVAVLYQGVNCTEVPVAIHADQLTPTWRVYSTGSNVFQTRAGCLIGAEHVNNSYECDIPIGAGICASYQTQTNSPRRARSVASQSIIAYTMSLGAENSVAYSNNSCAIPTNFTISVTTEILPVSMTKTSVDCTMYICGDSTECSNLLLQYGSFCTQLNRALTGIAVEQDKNTQEVFAQVKQIYKTPPIKDFGGFNFSQILPDPSKPSKRSFIEDLLFNKVTLADAGFIKQYGDCLGDIAARDLICAQKFNGLTVLPPLLTDEMIAQYTSALLAGTITSGWTFGAGAALQIPFAMQMAYRFNGIGVTQNVLYENQKLIANQFNSAIGKIQDSLSSTASALGKLQDVVNQNAQALNTLVKQLSSNFGAISSVLNDILSRLDKVEAEVQIDRLITGRLQSLQTYVTQQLIRAAEIRASANLAATKMSECVLGQSKRVDFCGKGYHLMSFPQSAPHGVVFLHVTYVPAQEKNFTCAPAICHDGKAHFPREGVFVSNGTHWFVTQRNFYEPQIITTDNTFVSGNCDVVIGIVNNTVYDPLQPELDSGGSGYIPEAPRDGQAYVRKDGEWVLLSTFL

SEQ ID NO: 9998 - protein, 1177 aa, Artificial Sequence
  SARS-CoV-2/Wuhan/HBCDC-HB-02/2020__EPI_ISL_412978 spike protein (1-1147)(I712C_T1077C) Foldon construct
MFVFLVLLPLVSSQCVNLTTRTQLPPAYTNSFTRGVYYPDKVFRSSVLHSTQDLFLPFFSNVTWFHAIHVSGTNGTKRFDNPVLPFNDGVYFASTEKSNIIRGWIFGTTLDSKTQSLLIVNNATNVVIKVCEFQFCNDPFLGVYYHKNNKSWMESEFRVYSSANNCTFEYVSQPFLMDLEGKQGNFKNLREFVFKNIDGYFKIYSKHTPINLVRDLPQGFSALEPLVDLPIGINITRFQTLLALHRSYLTPGDSSSGWTAGAAAYYVGYLQPRTFLLKYNENGTITDAVDCALDPLSETKCTLKSFTVEKGIYQTSNFRVQPTESIVRFPNITNLCPFGEVFNATRFASVYAWNRKRISNCVADYSVLYNSASFSTFKCYGVSPTKLNDLCFTNVYADSFVIRGDEVRQIAPGQTGKIADYNYKLPDDFTGCVIAWNSNNLDSKVGGNYNYLYRLFRKSNLKPFERDISTEIYQAGSTPCNGVEGFNCYFPLQSYGFQPTNGVGYQPYRVVVLSFELLHAPATVCGPKKSTNLVKNKCVNFNFNGLTGTGVLTESNKKFLPFQQFGRDIADTTDAVRDPQTLEILDITPCSFGGVSVITPGTNTSNQVAVLYQDVNCTEVPVAIHADQLTPTWRVYSTGSNVFQTRAGCLIGAEHVNNSYECDIPIGAGICASYQTQTNSPRRARSVASQSIIAYTMSLGAENSVAYSNNSCAIPTNFTISVTTEILPVSMTKTSVDCTMYICGDSTECSNFLLQYGSFCTQLNRALTGIAVEQDKNTQEVFAQVKQIYKTPPIKDFGGFNFSQILPDPSKPSKRSFIEDLLFNKVTLADAGFIKQYGDCLGDIAARDLICAQKFNGLTVLPPLLTDEMIAQYTSALLAGTITSGWTFGAGAALQIPFAMQMAYRFNGIGVTQNVLYENQKLIANQFNSAIGKIQDSLSSTASALGKLQDVVNQNAQALNTLVKQLSSNFGAISSVLNDILSRLDKVEAEVQIDRLITGRLQSLQTYVTQQLIRAAEIRASANLAATKMSECVLGQSKRVDFCGKGYHLMSFPQSAPHGVVFLHVTYVPAQEKNFTCAPAICHDGKAHFPREGVFVSNGTHWFVTQRNFYEPQIITTDNTFVSGNCDVVIGIVNNTVYDPLQPELDSGGSGYIPEAPRDGQAYVRKDGEWVLLSTFL

SEQ ID NO: 9999 - protein, 1177 aa, Artificial Sequence
  SARS-CoV-2/Australia/QLD02/2020__EPI_ISL_407896 spike protein (1-1147)(I712C_T1077C) Foldon construct
MFVFLVLLPLVSSQCVNLTTRTQLPPAYTNSFTRGVYYPDKVFRSSVLHSTQDLFLPFFSNVTWFHAIHVSGTNGTKRFDNPVLPFNDGVYFASTEKSNIIRGWIFGTTLDSKTQSLLIVNNATNVVIKVCEFQFCNDPFLGVYYHKNNKSWMESEFRVYSSANNCTFEYVSQPFLMDLEGKQGNFKNLREFVFKNIDGYFKIYSKHTPINLVRDLPQGFSALEPLVDLPIGINITRFQTLLALHRSYLTPGDSSSGWTAGAAAYYVGYLQPRTFLLKYNENGTITDAVDCALDPLSETKCTLKSFTVEKGIYQTSNFRVQPTESIVRFPNITNLCPFGEVFNATRFASVYAWNRKRISNCVADYSVLYNSASFSTFKCYGVSPTKLNDLCFTNVYADSFVIRGDEVRQIAPGQTGKIADYNYKLPDDFTGCVIAWNSNNLDSKVGGNYNYLYRLFRKSNLKPFERDISTEIYQAGSTPCNGVEGFNCYFPLQSYGFQPTNGVGYQPYRVVVLSFELLHAPATVCGPKKSTNLVKNKCVNFNFNGLTGTGVLTESNKKFLPFQQFGRDIADTTDAVRDPQTLEILDITPCSFGGVSVITPGTNTSNQVAVLYQDVNCTEVPVAIHADQLTPTWRVYSTGSNVFQTRAGCLIGAEHVNNSYECDIPIGAGICASYQTQTNSPRRARSVASQSIIAYTMSLGAENSVAYSNNSCAIPTNFTISVTTEILPVSMTKTSVDCTMYICGDSTECSNLLLQYGSFCTQLNRALTGIAVEQDKNTQEVFAQVKQIYKTPPIKDFGGFNFSQILPDPSKPSKRSFIEDLLFNKVTLADAGFIKQYGDCLGDIAARDLICAQKFNGLTVLPPLLTDEMIAQYTSALLAGTITSGWTFGAGAALQIPFAMQMAYRFNGIGVTQNVLYENQKLIANQFNSAIGKIQDSLSSTASALGKLQDVVNQNAQALNTLVKQLSSNFGAISSVLNDILSRLDKVEAEVQIDRLITGRLQSLQTYVTQQLIRAAEIRASANLAATKMSECVLGQSKRVDFCGKGYHLMSFPQSAPHGVVFLHVTYVPAQEKNFTCAPAICHDGKAHFPREGVFVSNGTHWFVTQRNFYEPQIITTDNTFVSGNCDVVIGIVNNTVYDPLQLELDSGGSGYIPEAPRDGQAYVRKDGEWVLLSTFL

SEQ ID NO: 10000 - protein, 1177 aa, Artificial Sequence
  SARS-CoV-2/India/1-31/2020__EPI_ISL_413523 spike protein (1-1147)(I712C_T1077C) Foldon construct
MFVFLVLLPLVSSQCVNLTTRTQLPPAYTNSFTRGVYYPDKVFRSSVLHSTQDLFLPFFSNVTWFHAIHVSGTNGTKRFDNPVLPFNDGVYFASTEKSNIIRGWIFGTTLDSKTQSLLIVNNATNVVIKVCEFQFCNDPFLGVYYHKNNKSWMESEFRVYSSANNCTFEYVSQPFLMDLEGKQGNFKNLREFVFKNIDGYFKIYSKHTPINLVRDLPQGFSALEPLVDLPIGINITRFQTLLALHRSYLTPGDSSSGWTAGAAAYYVGYLQPRTFLLKYNENGTITDAVDCALDPLSETKCTLKSFTVEKGIYQTSNFRVQPTESIVRFPNITNLCPFGEVFNATRFASVYAWNRKRISNCVADYSVLYNSASFSTFKCYGVSPTKLNDLCFTNVYADSFVIRGDEVRQIAPGQTGKIADYNYKLPDDFTGCVIAWNSNNLDSKVGGNYNYLYRLFRKSNLKPFERDISTEIYQAGSTPCNGVEGFNCYFPLQSYGFQPTNGVGYQPYRVVVLSFELLHAPATVCGPKKSTNLVKNKCVNFNFNGLTGTGVLTESNKKFLPFQQFGRDIADTTDAVRDPQTLEILDITPCSFGGVSVITPGTNTSNQVAVLYQDVNCTEVPVAIHADQLTPTWRVYSTGSNVFQTRAGCLIGAEHVNNSYECDIPIGAGICASYQTQTNSPRRARSVASQSIIAYTMSLGAENSVAYSNNSCAIPTNFTISVTTEILPVSMTKTSVDCTMYICGDSTECSNLLLQYGSFCTQLNRALTGIAVEQDKNTQEVFAQVKQIYKTPPIKDFGGFNFSQILPDPSKPSKRSFIEDLLFNKVTLADAGFIKQYGDCLGDIAARDLICAQKFNGLTVLPPLLTDEMIAQYTSALLAGTITSGWTFGAGAALQIPFAMQMAYRFNGIGVTQNVLYENQKLIANQFNSVIGKIQDSLSSTASALGKLQDVVNQNAQALNTLVKQLSSNFGAISSVLNDILSRLDKVEAEVQIDRLITGRLQSLQTYVTQQLIRAAEIRASANLAATKMSECVLGQSKRVDFCGKGYHLMSFPQSAPHGVVFLHVTYVPAQEKNFTCAPAICHDGKAHFPREGVFVSNGTHWFVTQRNFYEPQIITTDNTFVSGNCDVVIGIVNNTVYDPLQPELDSGGSGYIPEAPRDGQAYVRKDGEWVLLSTFL

SEQ ID NO: 10001 - protein, 1177 aa, Artificial Sequence
  SARS-CoV-2/Guangdong/GD2020087-P0008/2020__EPI_ISL_413863 spike protein (1-1147)(I712C_T1077C) Foldon construct
MFVFLVLLPLVSSQCVNLTTRTQLPPAYTNSFTRGVYYPDKVFRSSVLHSTQDLFLPFFSNVTWFHAIHVSGTNGTKRFDNPVLPFNDGVYFASTEKSNIIRGWIFGTTLDSKTQSLLIVNNATNVVIKVCEFQFCNDPFLGVYYHKNNKSWMESEFRVYSSANNCTFEYVSQPFLMDLEGKQGNFKNLREFVFKNIDGYFKIYSKHTPINLVRDLPQGFSALEPLVDLPIGINITRFQTLLALHRSYLTPGDSSSGWTAGAAAYYVGYLQPRTFLLKYNENGTITDAVDCALDPLSETKCTLKSFTVEKGIYQTSNFRVQPTESIVRFPNITNLCPFGEVFNATRFASVYAWNRKRISNCVADYSVLYNSASFSTFKCYGVSPTKLNDLCFTNVYADSFVIRGDEVREIAPGQTGKIADYNYKLPDDFTGCVIAWNSNNLDSKVGGNYNYLYRLFRKSNLKPFERDISTEIYQAGSTPCNGVEGFNCYFPLQSYGFQPTNGVGYQPYRVVVLSFELLHAPATVCGPKKSTNLVKNKCVNFNFNGLTGTGVLTESNKKFLPFQQFGRDIADTTDAVRDPQTLEILDITPCSFGGVSVITPGTNTSNQVAVLYQDVNCTEVPVAIHADQLTPTWRVYSTGSNVFQTRAGCLIGAEHVNNSYECDIPIGAGICASYQTQTNSPRRARSVASQSIIAYTMSLGAENSVAYSNNSCAIPTNFTISVTTEILPVSMTKTSVDCTMYICGDSTECSNLLLQYGSFCTQLNRALTGIAVEQDKNTQEVFAQVKQIYKTPPIKDFGGFNFSQILPDPSKPSKRSFIEDLLFNKVTLADAGFIKQYGDCLGDIAARDLICAQKFNGLTVLPPLLTDEMIAQYTSALLAGTITSGWTFGAGAALQIPFAMQMAYRFNGIGVTQNVLYENQKLIANQFNSAIGKIQDSLSSTASALGKLQDVVNQNAQALNTLVKQLSSNFGAISSVLNDILSRLDKVEAEVQIDRLITGRLQSLQTYVTQQLIRAAEIRASANLAATKMSECVLGQSKRVDFCGKGYHLMSFPQSAPHGVVFLHVTYVPAQEKNFTCAPAICHDGKAHFPREGVFVSNGTHWFVTQRNFYEPQIITTDNTFVSGNCDVVIGIVNNTVYDPLQPELDSGGSGYIPEAPRDGQAYVRKDGEWVLLSTFL

SEQ ID NO: 10002 - protein, 1177 aa, Artificial Sequence
  SARS-CoV-2/Sweden/01/2020__EPI_ISL_411951 spike protein (1-1147)(I712C_T1077C) Foldon construct
MFVFLVLLPLVSSQCVNLTTRTQLPPAYTNSFTRGVYYPDKVFRSSVLHSTQDLFLPFFSNVTWFHAIHVSGTNGTKRFDNPVLPFNDGVYFASTEKSNIIRGWIFGTTLDSKTQSLLIVNNATNVVIKVCEFQFCNDPFLGVYYHKNNKSWMESEFRVYSSANNCTFEYVSQPFLMDLEGKQGNFKNLREFVFKNIDGYFKIYSKHTPINLVRDLPQGFSALEPLVDLPIGINITRFQTLLALHRSYLTPGDSSSGWTAGAAAYYVGYLQPRTFLLKYNENGTITDAVDCALDPLSETKCTLKSFTVEKGIYQTSNFRVQPTESIVRFPNITNLCPFGEVFNATRFASVYAWNRKRISNCVADYSVLYNSASFSTFKCYGVSPTKLNDLCFTNVYADSFVIRGDEVRQIAPGQTGKIADYNYKLPDDFTGCVIAWNSNNLDSKVGGNYNYLYRLFRKSNLKPFERDISTEIYQAGSTPCNGVEGFNCYFPLQSYGFQPTNGVGYQPYRVVVLSFELLHAPATVCGPKKSTNLVKNKCVNFNFNGLTGTGVLTESNKKFLPFQQFGRDIADTTDAVRDPQTLEILDITPCSFGGVSVITPGTNTSNQVAVLYQDVNCTEVPVAIHADQLTPTWRVYSTGSNVFQTRAGCLIGAEHVNNSYECDIPIGAGICASYQTQTNSPRRARSVASQSIIAYTMSLGAENSVAYSNNSCAIPTNFTISVTTEILPVSMTKTSVDCTMYICGDSTECSNLLLQYGSFCTQLNRALTGIAVEQDKNTQEVFAQVKQIYKTPPIKDCGGFNFSQILPDPSKPSKRSFIEDLLFNKVTLADAGFIKQYGDCLGDIAARDLICAQKFNGLTVLPPLLTDEMIAQYTSALLAGTITSGWTFGAGAALQIPFAMQMAYRFNGIGVTQNVLYENQKLIANQFNSAIGKIQDSLSSTASALGKLQDVVNQNAQALNTLVKQLSSNFGAISSVLNDILSRLDKVEAEVQIDRLITGRLQSLQTYVTQQLIRAAEIRASANLAATKMSECVLGQSKRVDFCGKGYHLMSFPQSAPHGVVFLHVTYVPAQEKNFTCAPAICHDGKAHFPREGVFVSNGTHWFVTQRNFYEPQIITTDNTFVSGNCDVVIGIVNNTVYDPLQPELDSGGSGYIPEAPRDGQAYVRKDGEWVLLSTFL

SEQ ID NO: 10003 - protein, 1177 aa, Artificial Sequence
  SARS-CoV-2/Tianmen/HBCDC-HB-07/2020__EPI_ISL_412983 spike protein (1-1147)(I712C_T1077C) Foldon construct
MFVFLVLLPLVSSQCVNLTTRTQLPPAYTNSFTRGVYYPDKVFRSSVLHSTQDLFLPFFSNVTWFHAIHVSGTNGTKRFDNPVLPFNDGVYFASTEKSNIIRGWIFGTTLDSKTQSLLIVNNATNVVIKVCEFQFCNDPFLGVYYHKNNKSWMESEFRVYSSANNCTFEYVSQPFLMDLEGKQGNFKNLREFVFKNIDGYFKIYSKHTPINLVRDLPQGFSALEPLVDLPIGINITRFQTLLALHRSYLTPGDSSSGWTAGAAAYYVGYLQPRTFLLKYNENGTITDAVDCALDPLSETKCTLKSFTVEKGIYQTSNFRVQPTESIVRFPNITNLCPFGEVFNATRFASVYAWNRKRISNCVADYSVLYNSASFSTFKCYGVSPTKLNDLCFTNVYADSFVIRGDEVRQIAPGQTGKIADYNYKLPDDFTGCVIAWNSNNLDSKVGGNYNYLYRLFRKSNLKPFERDISTEIYQAGSTPCNGVEGFNCYFPLQSYGFQPTNGVGYQPYRVVVLSFELLHAPATVCGPKKSTNLVKNKCVNFNFNGLTGTGVLTESNKKFLPFQQFGRDIADTTDAVRDPQTLEILDITPCSFGGVSVITPGTNTSNQVAVLYQDLNCTEVPVAIHADQLTPTWRVYSTGSNVFQTRAGCLIGAEHVNNSYECDIPIGAGICASYQTQTNSPRRARSVASQSIIAYTMSLGAENSVAYSNNSCAIPTNFTISVTTEILPVSMTKTSVDCTMYICGDSTECSNLLLQYGSFCTQLNRALTGIAVEQDKNTQEVFAQVKQIYKTPPIKDFGGFNFSQILPDPSKPSKRSFIEDLLFNKVTLADAGFIKQYGDCLGDIAARDLICAQKFNGLTVLPPLLTDEMIAQYTSALLAGTITSGWTFGAGAALQIPFAMQMAYRFNGIGVTQNVLYENQKLIANQFNSAIGKIQDSLSSTASALGKLQDVVNQNAQALNTLVKQLSSNFGAISSVLNDILSRLDKVEAEVQIDRLITGRLQSLQTYVTQQLIRAAEIRASANLAATKMSECVLGQSKRVDFCGKGYHLMSFPQSAPHGVVFLHVTYVPAQEKNFTCAPAICHDGKAHFPREGVFVSNGTHWFVTQRNFYEPQIITTDNTFVSGNCDVVIGIVNNTVYDPLQPELDSGGSGYIPEAPRDGQAYVRKDGEWVLLSTFL

SEQ ID NO: 10004 - protein, 1177 aa, Artificial Sequence
  SARS-CoV-2/Hong Kong/case42_VM20002493/2020__EPI_ISL_414527 spike protein (1-1147)(I712C_T1077C) Foldon construct
MFVFLVLLPLVSSQCVNLTTRTQLPPAYTNSFTRGVYYPDKVFRSSVLHSTQDLFLPFFSNVTWFHAIHVSGTNGTKRFDNPVLPFNDGVYFASTEKSNIIRGWIFGTTLDSKTQSLLIVNNATNVVIKVCEFQFCNDPFLGVYYHKNNKSWMESEFRVYSSANNCTFEYVSQPFLMDLEGKQGNFKNLREFVFKNIDGYFKIYSKHTPINLVRDLPQGFSALEPLVDLPIGINITRFQTLLALHRSYLTPGDSSSGWTAGAAAYYVGYLQPRTFLLKYNENGTITDAVDCALDPLSETKCTLKSFTVEKGIYQTSNFRVQPTESIVRFPNITNLCPFGEVFNATRFASVYAWNRKRISNCVADYSVLYNSASFSTFKCYGVSPTKLNDLCFTNVYADSFVIRGDEVRQIAPGQTGKIADYNYKLPDDFTGCVIAWNSNNLDSKVGGNYNYLYRLFRKSNLKPFERDISTEIYQAGSTPCNGVEGFNCYFPLQSYGFQPTNGVGYQPYRVVVLSFELLHAPATVCGPKKSTNLVKNKCVNFNFNGLTGTGVLTESNKKFLPFQQFGRDIADTTDAVRDPQTLEILDITPCSFGGVSVITPGTNTSNQVAVLYQDVNCTEVPVAIHADQLTPTWRVYSTGSNVFQTRAGCLIGAEHVNNSYECDIPIGAGICASYQTQTNSPRRARSVASQSIIAYTMSLGAENSVAYSNNSCAIPTNFAISVTTEILPVSMTKTSVDCTMYICGDSTECSNLLLQYGSFCTQLNRALTGIAVEQDKNTQEVFAQVKQIYKTPPIKDFGGFNFSQILPDPSKPSKRSFIEDLLFNKVTLADAGFIKQYGDCLGDIAARDLICAQKFNGLTVLPPLLTDEMIAQYTSALLAGTITSGWTFGAGAALQIPFAMQMAYRFNGIGVTQNVLYENQKLIANQFNSAIGKIQDSLSSTASALGKLQDVVNQNAQALNTLVKQLSSNFGAISSVLNDILSRLDKVEAEVQIDRLITGRLQSLQTYVTQQLIRAAEIRASANLAATKMSECVLGQSKRVDFCGKGYHLMSFPQSAPHGVVFLHVTYVPAQEKNFTCAPAICHDGKAHFPREGVFVSNGTHWFVTQRNFYEPQIITTDNTFVSGNCDVVIGIVNNTVYDPLQPELDSGGSGYIPEAPRDGQAYVRKDGEWVLLSTFL

SEQ ID NO: 10005 - protein, 1177 aa, Artificial Sequence
  SARS-CoV-2/USA/CruiseA-23/2020__EPI_ISL_414482 spike protein (1-1147)(I712C_T1077C) Foldon construct
MFVFLVLLPLVSSQCVNLTTRTQLPPAYTNSFTRGVYYPDKVFRSSVLHSTQDLFLPFFSNVTWFHAIHVSGTNGTKRFDNPVLPFNDGVYFASTEKSNIIRGWIFGTTLDSKTQSLLIVNNATNVVIKVCEFQFCNDPFLGVYYHKNNKSWMESEFRVYSSANNCTFEYVSQPFLMDLEVKQGNFKNLREFVFKNIDGYFKIYSKHTPINLVRDLPQGFSALEPLVDLPIGINITRFQTLLALHRSYLTPGDSSSGWTAGAAAYYVGYLQPRTFLLKYNENGTITDAVDCALDPLSETKCTLKSFTVEKGIYQTSNFRVQPTESIVRFPNITNLCPFGEVFNATRFASVYAWNRKRISNCVADYSVLYNSASFSTFKCYGVSPTKLNDLCFTNVYADSFVIRGDEVRQIAPGQTGKIADYNYKLPDDFTGCVIAWNSNNLDSKVGGNYNYLYRLFRKSNLKPFERDISTEIYQAGSTPCNGVEGFNCYFPLQSYGFQPTNGVGYQPYRVVVLSFELLHAPATVCGPKKSTNLVKNKCVNFNFNGLTGTGVLTESNKKFLPFQQFGRDIADTTDAVRDPQTLEILDITPCSFGGVSVITPGTNTSNQVAVLYQDVNCTEVPVAIHADQLTPTWRVYSTGSNVFQTRAGCLIGAEHVNNSYECDIPIGAGICASYQTQTNSPRRARSVASQSIIAYTMSLGAENSVAYSNNSCAIPTNFTISVTTEILPVSMTKTSVDCTMYICGDSTECSNLLLQYGSFCTQLNRALTGIAVEQDKNTQEVFAQVKQIYKTPPIKDFGGFNFSQILPDPSKPSKRSFIEDLLFNKVTLADAGFIKQYGDCLGDIAARDLICAQKFNGLTVLPPLLTDEMIAQYTSALLAGTITSGWTFGAGAALQIPFAMQMAYRFNGIGVTQNVLYENQKLIANQFNSAIGKIQDSLSSTASALGKLQDVVNQNAQALNTLVKQLSSNFGAISSVLNDILSRLDKVEAEVQIDRLITGRLQSLQTYVTQQLIRAAEIRASANLAATKMSECVLGQSKRVDFCGKGYHLMSFPQSAPHGVVFLHVTYVPAQEKNFTCAPAICHDGKAHFPREGVFVSNGTHWFVTQRNFYEPQIITTDNTFVSGNCDVVIGIVNNTVYDPLQPELDSGGSGYIPEAPRDGQAYVRKDGEWVLLSTFL

SEQ ID NO: 10006 - protein, 1177 aa, Artificial Sequence
  SARS-CoV-2/Hong Kong/case85_VM20002868/2020__EPI_ISL_414519 spike protein (1-1147)(I712C_T1077C) Foldon construct
MFVFLVLVPLVSSQCVNLTTRTQLPPAYTNSFTRGVYYPDKVFRSSVLHSTQDLFLPFFSNVTWFHAIHVSGTNGTKRFDNPVLPFNDGVYFASTEKSNIIRGWIFGTTLDSKTQSLLIVNNATNVVIKVCEFQFCNDPFLGVYYHKNNKSWMESEFRVYSSANNCTFEYVSQPFLMDLEGKQGNFKNLREFVFKNIDGYFKIYSKHTPINLVRDLPQGFSALEPLVDLPIGINITRFQTLLALHRSYLTPGDSSSGWTAGAAAYYVGYLQPRTFLLKYNENGTITDAVDCALDPLSETKCTLKSFTVEKGIYQTSNFRVQPTESIVRFPNITNLCPFGEVFNATRFASVYAWNRKRISNCVADYSVLYNSASFSTFKCYGVSPTKLNDLCFTNVYADSFVIRGDEVRQIAPGQTGKIADYNYKLPDDFTGCVIAWNSNNLDSKVGGNYNYLYRLFRKSNLKPFERDISTEIYQAGSTPCNGVEGFNCYFPLQSYGFQPTNGVGYQPYRVVVLSFELLHAPATVCGPKKSTNLVKNKCVNFNFNGLTGTGVLTESNKKFLPFQQFGRDIADTTDAVRDPQTLEILDITPCSFGGVSVITPGTNTSNQVAVLYQDVNCTEVPVAIHADQLTPTWRVYSTGSNVFQTRAGCLIGAEHVNNSYECDIPIGAGICASYQTQTNSPRRARSVASQSIIAYTMSLGAENSVAYSNNSCAIPTNFTISVTTEILPVSMTKTSVDCTMYICGDSTECSNLLLQYGSFCTQLNRALTGIAVEQDKNTQEVFAQVKQIYKTPPIKDFGGFNFSQILPDPSKPSKRSFIEDLLFNKVTLADAGFIKQYGDCLGDIAARDLICAQKFNGLTVLPPLLTDEMIAQYTSALLAGTITSGWTFGAGAALQIPFAMQMAYRFNGIGVTQNVLYENQKLIANQFNSAIGKIQDSLSSTASALGKLQDVVNQNAQALNTLVKQLSSNFGAISSVLNDILSRLDKVEAEVQIDRLITGRLQSLQTYVTQQLIRAAEIRASANLAATKMSECVLGQSKRVDFCGKGYHLMSFPQSAPHGVVFLHVTYVPAQEKNFTCAPAICHDGKAHFPREGVFVSNGTHWFVTQRNFYEPQIITTDNTFVSGNCDVVIGIVNNTVYDPLQPELDSGGSGYIPEAPRDGQAYVRKDGEWVLLSTFL

SEQ ID NO: 10007 - protein, 1177 aa, Artificial Sequence; identical to SEQ ID NO: 9997
  SARS-CoV-2/England/200990660/2020__EPI_ISL_414523 spike protein (1-1147)(I712C_T1077C) Foldon construct

SEQ ID NO: 10008 - protein, 1177 aa, Artificial Sequence
  SARS-CoV-2/Australia/NSW09/2020__EPI_ISL_413595 spike protein (1-1147)(I712C_T1077C) Foldon construct
MFVFLVLLPLVSSQCVNLTTRTQLPPAYTNSFTRGVYYPDKVFRSSVLHSTQDLFLPFFSNVTWFHAIHVSGTNGTKRFDNPVLPFNDGVYFASTEKSNIIRGWIFGTTLDSKTQSLLIVNNATNVVIKVCEFQFCNDPFLGVYYHKNNKSWMESEFRVYSSANNCTFEYVSQPFLMDLEGKQGNFKNLREFVFKNIDGYFKIYSKHTPINLVRDLPQGFSALEPLVDLPIGINITRFQTLLALHRSYLTPGDSSSGWTAGAAAYYVGYLQPRTFLLKYNENGTITDAVDCALDPLSETKCTLKSFTVEKGIYQTSNFRVQPTESIVRFPNITNLCPFGEVFNATRFASVYAWNRKRISNCVADYSVLYNSASFSTFKCYGVSPTKLNDLCFTNVYADSFVIRGDEVRQIAPGQTGKIADYNYKLPDDFTGCVIAWNSNNLDSKVGGNYNYLYRLFRKSNLKPFERDISTEIYQAGSTPCNGVEGFNCYFPLQSYGFQPTNGVGYQPYRVVVLSFELLHAPATVCGPKKSTNLVKNKCVNFNFNGLTGTGVLTESNKKFLPFQQFGRDIADTTDAVRDPQTLEILDITPCSFGGVSVITPGTNTSNQVAVLYQDVNCTEVPVAIHADQLTPTWRVYSTGSNVFQTRAGCLIGAEHVNNSYECDIPIGAGICASYQTQTNSPRRARSVASQSIIAYTMSLGAENSVAYSNNSCAIPTNFTISVTTEILPVSMTKTSVDCTMYICGDSTECSNLLLQYGSFCTQLNRALTGIAVEQDKNTQEVFAQVKQIYKTPPIKDFGGFNFSQILPDPSKPSKRSFIEDLLFNKVTLADAGFIKQYGDCLGDIAARDLICAQKFNGLTVLPPLLTDEMIAQYTSALLAGTITSGWTFGAGAALQIPFAMQMAYRFNGIGVTQNVLYENQKLIANQFNSAIGKIQDSLSFTASALGKLQDVVNQNAQALNTLVKQLSSNFGAISSVLNDILSRLDKVEAEVQIDRLITGRLQSLQTYVTQQLIRAAEIRASANLAATKMSECVLGQSKRVDFCGKGYHLMSFPQSAPHGVVFLHVTYVPAQEKNFTCAPAICHDGKAHFPREGVFVSNGTHWFVTQRNFYEPQIITTDNTFVSGNCDVVIGIVNNTVYDPLQPELDSGGSGYIPEAPRDGQAYVRKDGEWVLLSTFL

SEQ ID NO: 10009 - protein, 1177 aa, Artificial Sequence; identical to SEQ ID NO: 9989
  SARS-CoV-2/Australia/NSW10/2020__EPI_ISL_413596 spike protein (1-1147)(I712C_T1077C) Foldon construct

SEQ ID NO: 10010 - protein, 1177 aa, Artificial Sequence
  SARS-CoV-2/Switzerland/1000477797/2020__EPI_ISL_413023 spike protein (1-1147)(I712C_T1077C) Foldon construct
MFVFLVLLPLVSSQCVNLTTRTQLPPAYTNSFTRGVYYPDKVFRSSVLHSTQDLFLPFFSNVTWFHAIHVSGTNGTKRFDNPVLPFNDGVYFASTEKSNIIRGWIFGTTLDSKTQSLLIVNNATNVVIKVCEFQFCNDPFLGVYYHKNNKSWMESEFRVYSSANNCTFEYVSQPFLMDLEGKQGNFKNLREFVFKNIDGYFNIYSKHTPINLVRDLPQGFSALEPLVDLPIGINITRFQTLLALHRSYLTPGDSSSGWTAGAAAYYVGYLQPRTFLLKYNENGTITDAVDCALDPLSETKCTLKSFTVEKGIYQTSNFRVQPTESIVRFPNITNLCPFGEVFNATRFASVYAWNRKRISNCVADYSVLYNSASFSTFKCYGVSPTKLNDLCFTNVYADSFVIRGDEVRQIAPGQTGKIADYNYKLPDDFTGCVIAWNSNNLDSKVGGNYNYLYRLFRKSNLKPFERDISTEIYQAGSTPCNGVEGFNCYFPLQSYGFQPTNGVGYQPYRVVVLSFELLHAPATVCGPKKSTNLVKNKCVNFNFNGLTGTGVLTESNKKFLPFQQFGRDIADTTDAVRDPQTLEILDITPCSFGGVSVITPGTNTSNQVAVLYQGVNCTEVPVAIHADQLTPTWRVYSTGSNVFQTRAGCLIGAEHVNNSYECDIPIGAGICASYQTQTNSPRRARSVASQSIIAYTMSLGAENSVAYSNNSCAIPTNFTISVTTEILPVSMTKTSVDCTMYICGDSTECSNLLLQYGSFCTQLNRALTGIAVEQDKNTQEVFAQVKQIYKTPPIKDFGGFNFSQILPDPSKPSKRSFIEDLLFNKVTLADAGFIKQYGDCLGDIAARDLICAQKFNGLTVLPPLLTDEMIAQYTSALLAGTITSGWTFGAGAALQIPFAMQMAYRFNGIGVTQNVLYENQKLIANQFNSAIGKIQDSLSSTASALGKLQDVVNQNAQALNTLVKQLSSNFGAISSVLNDILSRLDKVEAEVQIDRLITGRLQSLQTYVTQQLIRAAEIRASANLAATKMSECVLGQSKRVDFCGKGYHLMSFPQSAPHGVVFLHVTYVPAQEKNFTCAPAICHDGKAHFPREGVFVSNGTHWFVTQRNFYEPQIITTDNTFVSGNCDVVIGIVNNTVYDPLQPELDSGGSGYIPEAPRDGQAYVRKDGEWVLLSTFL

SEQ ID NO: 10011 - protein, 1177 aa, Artificial Sequence
  SARS-CoV-2/Belgium/BA-02291/2020__EPI_ISL_415159 spike protein (1-1147)(I712C_T1077C) Foldon construct
MFVFLVLLPLVSSQCVNLTTRTQLPPAYTNSFTRGVYYPDKVFRSSVLHSTQDLFLPFFSNVTWFHAIHVSGTNGTKRFDNPVLPFNDGVYFASTEKSNIIRGWIFGTTLDSKTQSLLIVNNATNVVIKVCEFQFCNDPFLGVYYHKNNKSWMESEFRVYSSANNCTFEYVSQPFLMDLEGKQGNFKNLREFVFKNIDGYFKIYSKHTPINLVRDLPQGFSALEPLVDLPIGINITRFQTLLALHRSYLTPGDSSSGWTAGAAAYYVGYLQPRTFLLKYNENGTITDAVDCALDPLSETKCTLKSFTVEKGIYQTSNFRVQPTESIVRFPNITNLCPFGEVFNATRFASVYAWNRKRISNCVADYSVLYNSASFSTFKCYGVSPTKLNDLCFTNVYADSFVIRGDEVRQIAPGQTGKIADYNYKLPDDFTGCVIAWNSNNLDSKVGGNYNYLYRLFRRSNLKPFERDISTEIYQAGSTPCNGVEGFNCYFPLQSYGFQPTNGVGYQPYRVVVLSFELLPAPATVCGPKKSTNLVKNKCVNFNFNGLTGTGVLTESNKKFLPFQQFGRDIADTTDAVRDPQTLEILDITPCSFGGVSVITPGTNTSNQVAVLYQGVNCTEVPVAIHADQLTPTWRVYSTGSNVFQTRAGCLIGAEHVNNSYECDIPIGAGICASYQTQTNSPRRARSVASQSIIAYTMSLGAENSVAYSNNSCAIPTNFTISVTTEILPVSMTKTSVDCTMYICGDSTECSNLLLQYGSFCTQLNRALTGIAVEQDKNTQEVFAQVKQIYKTPPIKDFGGFNFSQILPDPSKPSKRSFIEDLLFNKVTLADAGFIKQYGDCLGDIAARDLICAQKFNGLTVLPPLLTDEMIAQYTSALLAGTITSGWTFGAGAALQIPFAMQMAYRFNGIGVTQNVLYENQKLIANQFNSAIGKIQDSLSSAAPALGKLQDVVNQNAQALNTLVKQLSSNFGAISSVLNDILSRLDKVEAEVQIDRLITGRLQSLQTYVTQQLIRAAEIRASANLAATKMSECVLGQSKRVDFCGKGYHLMSFPQSAPHGVVFLHVTYVPAQEKNFTCAPAICHDGKAHFPREGVFVSNGTHWFVTQRNFYEPQIITTDNTFVSGNCDVVIGIVNNTVYDPLQPELDSGGSGYIPEAPRDGQAYVRKDGEWVLLSTFL

SEQ ID NO: 10012 - protein, 1177 aa, Artificial Sequence
  SARS-CoV-2/USA/WA8-UW5/2020__EPI_ISL_413486 spike protein (1-1147)(I712C_T1077C) Foldon construct
MFVFLVLLPLVSSQCVNLTTRTQLPPAYTNSFTRGVYYPDKVFRSSVLHSTQDLFLPFFSNVTWFHAIHVSGTNGTKRFDNPVLPFNDGVYFASTEKSNIIRGWIFGTTLDSKTQSLLIVNNATNVVIKVCEFQFCNDPFLGVYYHKNNKSWMESEFRVYSSANNCTFEYVSQPFLMDLEGKQGNFKNLREFVFKNIDGYFKIYSKHTPINLVRDLPQGFSALEPLVDLPIGINITRFQTLLALHRSYLTPGDSSSGWTAGAAAYYVGYLQPRTFLLKYNENGTITDAVDCALDPLSETKCTLKSFTVEKGIYQTSNFRVQPTESIVRFPNITNLCPFGEVFNATRFASVYAWNRKRISNCVADYSVLYNSASFSTFKCYGVSPTKLNDLCFTNVYADSFVIRGDEVRQIAPGQTGKIADYNYKLPDDFTGCVIAWNSNNLDSKVGGNYNYLYRLFRKSNLKPFERDISTEIYQAGSTPCNGVEGFNCYFPLQSYGFQPTNGVGYQPYRVVVLSFELLHAPATVCGPKKSTNLVKNKCVNFNFNGLTGTGVLTESNKKFLPFQQFGRDIADTTDAVRDPQTLEILDITPCSFGGVSVITPGTNTSNQVAVLYQDVNCTEVPVAIHADQLTPTWRVYSTGSNVFQTRAGCLIGAEYVNNSYECDIPIGAGICASYQTQTNSPRRARSVASQSIIAYTMSLGAENSVAYSNNSCAIPTNFTISVTTEILPVSMTKTSVDCTMYICGDSTECSNLLLQYGSFCTQLNRALTGIAVEQDKNTQEVFAQVKQIYKTPPIKDFGGFNFSQILPDPSKPSKRSFIEDLLFNKVTLADAGFIKQYGDCLGDIAARDLICAQKFNGLTVLPPLLTDEMIAQYTSALLAGTITSGWTFGAGAALQIPFAMQMAYRFNGIGVTQNVLYENQKLIANQFNSAIGKIQDSLSSTASALGKLQDVVNQNAQALNTLVKQLSSNFGAISSVLNDILSRLDKVEAEVQIDRLITGRLQSLQTYVTQQLIRAAEIRASANLAATKMSECVLGQSKRVDFCGKGYHLMSFPQSAPHGVVFLHVTYVPAQEKNFTCAPAICHDGKAHFPREGVFVSNGTHWFVTQRNFYEPQIITTDNTFVSGNCDVVIGIVNNTVYDPLQPELDSGGSGYIPEAPRDGQAYVRKDGEWVLLSTFL

SEQ ID NO: 10013 - protein, 1177 aa, Artificial Sequence
  SARS-CoV-2/England/20102000506/2020__EPI_ISL_415147 spike protein (1-1147)(I712C_T1077C) Foldon construct
MFVFLVLLPLVSSQCVNLTTRTQLPPAYTNSFTRGVYYPDKVFRSSVLHSTQDLFLPFFSNVTWFHAIHVSGTNGTKRFDNPVLPFNDGVYFASTEKSNIIRGWIFGTTLDSKTQSLLIVNNATNVVIKVCEFQFCNDPFLGVYYHKNNKSWMESEFRVYSSANNCTFEYVSQPFLMDLEGKQGNFKNLREFVFKNIDGYFKIYSKHTPINLVRDLPQGFSALEPLVDLPIGINITRFQTLLALHRSYLTPGDSSSGWTAGAAAYYVGYLQPRTFLLKYNENGTITDAVDCALDPLSETKCTLKSFTVEKGIYQTSNFRVQPTESIVRFPNITNLCPFGEVFNATRFASVYAWNRKRISNCVADYSVLYNSASFSTFKCYGVSPTKLNDLCFTNVYADSFVIRGDEVRQIAPGQTGKIADYNYKLPDDFTGCVIAWNSNNLDSKVGGNYNYLYRLFRKSNLKPFERDISTEIYQAGSTPCNGVEGFNCYFPLQSYGFQPTNGVGYQPYRVVVLSFELLHAPATVCGPKKSTNLVKNKCVNFNFNGLTGTGVLTESNKKFLPFQQFGRDIADTTDAVRDPQTLEILDITPCSFGGVSVITPGTNTSNQVAVLYQGVNCTEVPVAIHADQLTPTWRVYSTGSNVFQTRAGCLIGAEHVNNSYECDIPIGAGICASYQTQTNSPRRARSVASQSIIAYTMSLGAENSVAYSNNSCAIPTNFTISVTTEILPVSMTKTSVDCTMYICGDSTECSNLLLQYGSFCTQLNRALTGIAVEQDKNTQEVFAQVKQIYKTPPIKDFGGFNFSQILPDPSKPSKRSFIEDLLFNKVTLADAGFIKQYGYCLGDIAARDLICAQKFNGLTVLPPLLTDEMIAQYTSALLAGTITSGWTFGAGAALQIPFAMQMAYRFNGIGVTQNVLYENQKLIANQFNSAIGKIQDSLSSTASALGKLQDVVNQNAQALNTLVKQLSSNFGAISSVLNDILSRLDKVEAEVQIDRLITGRLQSLQTYVTQQLIRAAEIRASANLAATKMSECVLGQSKRVDFCGKGYHLMSFPQSAPHGVVFLHVTYVPAQEKNFTCAPAICHDGKAHFPREGVFVSNGTHWFVTQRNFYEPQIITTDNTFVSGNCDVVIGIVNNTVYDPLQPELDSGGSGYIPEAPRDGQAYVRKDGEWVLLSTFL

SEQ ID NO: 10014 - protein, 1177 aa, Artificial Sequence
  SARS-CoV-2/Belgium/VAG-03013/2020__EPI_ISL_415155 spike protein (1-1147)(I712C_T1077C) Foldon construct
MFVFLVLLPLVSSQCVNLTTRTQLPPAYTNSFTRGVYYPDKVFRSSVLHSTQDLFLPFFSNVTWFHAIHVSGTNGTKRFDNPVLPFNDGVYFASTEKSNIIRGWIFGTTLDSKTQSLLIVNNATNVVIKVCEFQFCNDPFLGVYYHKNNKSWMESEFRVYSSANNCTFEYVSQPFLMDLEGKQGNFKNLREFVFKNIDGYFKIYSKHTPINLVRDLPQGFSALEPLVDLPIGINITRFQTLLALHRSYLTPGDSSSGWTAGAAAYYVGYLQPRTFLLKYNENGTITDAVDCALDPLSETKCTLKSFTVEKGIYQTSNFRVQPTESIVRFPNITNLCPFGEVFNATRFASVYAWNRKRISNCVADYSVLYNSASFSTFKCYGVSPTKLNDLCFTNVYADSFVIRGDEVRQIAPGQTGKIADYNYKLPDDFTGCVIAWNSNNLDSKVGGNYNYLYRLFRKSNLKPFERDISTEIYQAGSTPCNGVEGFNCYFPLQSYGFQPTNGVGYQPYRVVVLSFELLHAPATVCGPKKSTNLVKNKCVNFNFNGLTGTGVLTESNKKFLPFQQFGRDIADTTDAVRDPQTLEILDITPCSFGGVSVITPGTNTSNQVAVLYQGVNCTEVPVAIHADQLTPTWRVYSTGSNVFQTRAGCLIGAEHVNNSYECDIPIGAGICASYQTQTNSPRRARSVASQSIIAYTMSLGAENSVAYSNNSCAIPTNFTISVTTEILPVSMTKTSVDCTMYICGDSTECSNLLLQYGSFCTQLNRALTGIAVEQDKNTQEVFAQVKQIYKTPPIKDFGGFNFSQILPDPSKPSKRSFIEDLLFNKVTLADAGFIKQYGDCLGDIAARDLICAQKFNGLTVLPPLLTDEMIAQYTSALLAGTITSGWTFGAGAALQIPFAMQMAYRFNGIGVTQNVLYENQKLIANQFNSAIGKIQDSLSSTATALGKLQDVVNQNAQALNTLVKQLSSNFGAISSVLNDILSRLDKVEAEVQIDRLITGRLQSLQTYVTQQLIRAAEIRASANLAATKMSECVLGQSKRVDFCGKGYHLMSFPQSAPHGVVFLHVTYVPAQEKNFTCAPAICHDGKAHFPREGVFVSNGTHWFVTQRNFYEPQIITTDNTFVSGNCDVVIGIVNNTVYDPLQPELDSGGSGYIPEAPRDGQAYVRKDGEWVLLSTFL

SEQ ID NO: 10015 - protein, 1177 aa, Artificial Sequence
  SARS-CoV-2/Belgium/BC-03016/2020__EPI_ISL_415157 spike protein (1-1147)(I712C_T1077C) Foldon construct
MFVFLVLLPLVSSQCVNLTTRTQLPPAYTNSFTRGVYYPDKVFRSSVLHSTQDLFLPFFSNVTWFHAIHVSGTNGTKRFDNPVLPFNDGVYFASTEKSNIIRGWIFGTTLDSKTQSLLIVNNATNVVIKVCEFQFCNDPFLGVYYHKNNKSWMESEFRVYSSANNCTFEYVSQPFLMDLEGKQGNFKNLREFVFKNIDGYFKIYSKHTPINLVRDLPQGFSALEPLVDLPIGINITRFQTLLALHRSYLTPGDSSSGWTAGAAAYYVGYLQPRTFLLKYNENGTITDAVDCALDPLSETKCTLKSFTVEKGIYQTSNFRVQPTESIVRFPNITNLCPFGEVFNATRFASVYAWNRKRISNCVADYSVLYNSASFSTFKCYGVSPTKLNDLCFTNVYADSFVIRGDEVRQIAPGQTGKIADYNYKLPDDFTGCVIAWNSNNLDSKVGGNYNYLYRLFRKSNLKPFERDISTEIYQAGSTPCNGVEGFNCYFPLQSYGFQPTNGVGYQPYRVVVLSFELLHAPATVCGPKKSTNLVKNKCVNFNFNGLTGTGVLTESNKKFLPFQQFGRDIADTTDAVRDPQTLEILDITPCSFGGVSVITPGTNTSNQVAVLYQGVNCTEVPVAIHADQLTPTWRVYSTGSNVFQTRAGCLIGAEHVNNSYECDIPIGAGICASYQTQTNSPRRARSVASQSIIAYTMSLGAENSVAYSNNSCAIPTNFTISVTTEILPVSMTKTSVDCTMYICGDSTECSNLLLQYGSFCTQLNRALTGIAVEQDKNTQEVFAQVKQIYKTPPIKDFGGFNFSQILPDPSKPSKRSFIEDLLFNKVTLADAGFIKQYGDCLGDIAARDLICAQKFNGLTVLPPLLTDEMIAQYTSALLAGTITSGWTFGAGAALQIPFAMQMAYRFNGIGVTQNVLYENQKLIANQFNSAIGKIQDSLSSTAPALGKLQDVVNQNAQALNTLVKQLSSNFGAISSVLNDILSRLDKVEAEVQIDRLITGRLQSLQTYVTQQLIRAAEIRASANLAATKMSECVLGQSKRVDFCGKGYHLMSFPQSAPHGVVFLHVTYVPAQEKNFTCAPAICHDGKAHFPREGVFVSNGTHWFVTQRNFYEPQIITTDNTFVSGNCDVVIGIVNNTVYDPLQPELDSGGSGYIPEAPRDGQAYVRKDGEWVLLSTFL

SEQ ID NO: 10016 - protein, 1177 aa, Artificial Sequence
  SARS-CoV-2/Germany/BavPat3/2020__EPI_ISL_414521 spike protein (1-1147)(I712C_T1077C) Foldon construct
MFVFLVLLPLVSSQCVNLTTRTQLPPAYTNSFTRGVYYPDKVFRSSVLHSTQDLFLPFFSNVTWFHAIHVSGTNGTKRFDNPVLPFNDGVYFASTEKSNIIRGWIFGTTLDSKTQSLLIVNNATNVVIKVCEFQFCNDPFLGVYYHKNNKSWMESEFRVYSSANNCTFEYVSQPFLMDLEGKQGNFKNLREFVFKNIDGYFKIYSKHTPINLVRDLPQGFSALEPLVDLPIGINITRFQTLLALHRSYLTPGDSSSGWTAGAAAYYVGYLQPRTFLLKYNENGTITDAVDCALDPLSETKCTLKSFTVEKGIYQTSNFRVQPTESIVRFPNITNLCPFGEVFNATRFASVYAWNRKRISNCVADYSVLYNSASFSTFKCYGVSPTKLNDLCFTNVYADSFVIRGDEVRQIAPGQTGKIADYNYKLPDDFTGCVIAWNSNNLDSKVGGNYNYLYRLFRKSNLKPFERDISTEIYQAGSTPCNGVEGFNCYFPLQSYGFQPTNGVGYQPYRVVVLSFELLHAPATVCGPKKSTNLVKNKCVNFNFNGLTGTGVLTESNKKFLPFQQFGRDIADTTDAVRDPQTLEILDITPCSFGGVSVITPGTNTSNQVAVLYQDVNCTEVPVAIHADQLTPTWRVYSTGSNVFQTRAGCLIGAEHVNNSYECDIPIGAGICASYQTQTNSPRRARSVASQSIIAYTMSLGAENSVAYSNNSCAIPTNFTISVTTEILPVSMTKTSVDCTMYICGDSTECSNLLLQYGSFCTQLNRALTGIAVEQDKNTQQVFAQVKQIYKTPPIKDFGGFNFSQILPDPSKPSKRSFIEDLLFNKVTLADAGFIKQYGDCLGDIAARDLICAQKFNGLTVLPPLLTDEMIAQYTSALLAGTITSGWTFGAGAALQIPFAMQMAYRFNGIGVTQNVLYENQKLIANQFNSAIGKIQDSLSSTASALGKLQDVVNQNAQALNTLVKQLSSNFGAISSVLNDILSRLDKVEAEVQIDRLITGRLQSLQTYVTQQLIRAAEIRASANLAATKMSECVLGQSKRVDFCGKGYHLMSFPQSAPHGVVFLHVTYVPAQEKNFTCAPAICHDGKAHFPREGVFVSNGTHWFVTQRNFYEPQIITTDNTFVSGNCDVVIGIVNNTVYDPLQPELDSGGSGYIPEAPRDGQAYVRKDGEWVLLSTFL

SEQ ID NO: 10017 - protein, 1177 aa, Artificial Sequence
  SARS-CoV-2/France/HF1805/2020__EPI_ISL_414628 spike protein (1-1147)(I712C_T1077C) Foldon construct
MFVFLVLLPLVSSQCVNLTTRTQLPPAYTNSFTRGVYYPDKVFRSSVLHSTQDLFLPFFSNVTWFHAIHVSGTNGTKRFDNPVLPFNDGVYFASTEKSNIIRGWIFGTTLDSKTQSLLIVNNATNVVIKVCEFQFCNDPFLGVYYHKNNKSWMESEFRVYSSANNCTFEYVSQPFLMDLEGKQGNFKNLREFVFKNIDGYFKIYSKHTPINLVRDLPQGFSALEPLVDLPIGINITRFQTLLALHRSYLTPGDSSSGWTAGAAAYYVGYLQPRTFLLKYNENGTITDAVDCALDPLSETKCTLKSFTVEKGIYQTSNFRVQPTESIVRFPNITNLCPFGEVFNATRFASVYAWNRKRISNCVADYSVLYNSASFSTFKCYGVSPTKLNDLCFTNVYADSFVIRGDEVRQIAPGQTGKIADYNYKLPDDFTGCVIAWNSNNLDSKVGGNYNYLYRLFRKSNLKPFERDISTEIYQAGSTPCNGVEGFNCYFPLQSYGFQPTNGVGYQPYRVVVLSFELLHAPATVCGPKKSTNLVKNKCVNFNFNGLTGTGVLTESNKKFLPFQQFGRDIADTTDAVRDPQTLEILDITPCSFGGVSVITPGTNTSNQVAVLYQGVNCTEVPVAIHADQLTPTWRVYSTGSNVFQTRAGCLIGAEHVNNSYECDIPIGAGICASYQTQTNSPRRARSVASQSIIAYTMSLGAENSVAYSNNSCAIPTNFTISVTTEILPVSMTKTSVDCTMYICGDSTECSNLLLQYGSFCTQLNRALTGIAVEQDKNTQEVFAQVKQIYKTPPIKDFGGFNFSQILPDPSKPSKRSFIEDLLFNKVTLADAGFIKQYGDCLGDIAARDLICAQKFNGLTVLPPLLTDEMIAQYTSALLAGTITSGWTFGAGAALQIPFAMQMAYRFNGIGVTQNVLYENQKLIANQFNSAIGKIQDSLSSTASALGKLQDVVNQNAQALNTLVKQLSSNFGAISSVLNDILSRLDKVEAEVQIDRLITGRLQSLQTYVTQQLIRAAEIRASANLAATKMSECVLGQSKRVDFCGKGYHLMSFPQSAPHGVVFLHVTYVPAQEKNFTCAPAICHDGKAHFPREGVFVSNGTHWFVTQRNFYEPQIITTDNTFVSGNCDVVIGVVNNTVYDPLQPELDSGGSGYIPEAPRDGQAYVRKDGEWVLLSTFL

SEQ ID NO: 10018 - protein, 1177 aa, Artificial Sequence
  SARS-CoV-2/Netherlands/ZuidHolland_9/2020__EPI_ISL_414445 spike protein (1-1147)(I712C_T1077C) Foldon construct
MFVFLVLLPLVSSQCVNLTTRTQLPPAYTNSFTRGVYYPDKVFRSSVLHSTQDLFLPFFSNVTWFHAIHVSGTNGTKRFDNPVLPFNDGVYFASTEKSNIIRGWIFGTTLDSKTQSLLIVNNATNVVIKVCEFQFCNDPFLGVYYHKNNKSWMESEFRVYSSANNCTFEYVSQPFLMDLEGKQGNFKNLREFVFKNIDGYFKIYSKHTPINLVRDLPQGFSALEPLVDLPIGINITRFQTLLALHRSYLTPGDSSSGWTAGAAAYYVGYLQPRTFLLKYNENGTITDAVDCALDPLSETKCTLKSFTVEKGIYQTSNFRVQPTESIVRFPNITNLCPFGEVFNATRFASVYAWNRKRISNCVADYSVLYNSASFSTFKCYGVSPTKLNDLCFTNVYADSFVIRGDEVRQIAPGQTGKIADYNYKLPDDFTGCVIAWNSNNLDSKVGGNYNYLYRLFRKSNLKPFERDISTEIYQAGSTPCNGVEGFNCYFPLQSYGFQPTNGVGYQPYRVVVLSFELLHAPATVCGPKKSTNLVKNKCVNFNFNGLTGTGVLTESNKKFLPFQQFGRDIADTTDAVRDPQTLEILDITPCSFGGVSVITPGTNTSNQVAVLYQGVNCTEVPVAIHADQLTPTWRVYSTGSNVFQTRAGCLIGAEHVNNSYECDIPIGAGICASYQTQTNSPRRARSVASQSIIAYTMSLGAENSVAYSNNSCAIPTNFTISVTTEILPVSMTKTSVDCTMYICGDSTECSNLLLQYGSFCTQLNRALTGIAVEQDKNTQEVFAQVKQIYKTPPIKDFGGFNFSQILPDPSKPSKRSFIEDLLFNKVTLADAGFIKQYGDCLGDIAARDLICVQKFNGLTVLPPLLTDEMIAQYTSALLAGTITSGWTFGAGAALQIPFAMQMAYRFNGIGVTQNVLYENQKLIANQFNSAIGKIQDSLSSTASALGKLQDVVNQNAQALNTLVKQLSSNFGAISSVLNDILSRLDKVEAEVQIDRLITGRLQSLQTYVTQQLIRAAEIRASANLAATKMSECVLGQSKRVDFCGKGYHLMSFPQSAPHGVVFLHVTYVPAQEKNFTCAPAICHDGKAHFPREGVFVSNGTHWFVTQRNFYEPQIITTDNTFVSGNCDVVIGIVNNTVYDPLQPELDSGGSGYIPEAPRDGQAYVRKDGEWVLLSTFL

SEQ ID NO: 10019 - protein, 1177 aa, Artificial Sequence
  SARS-CoV-2/Finland/FIN03032020A/2020__EPI_ISL_413602 spike protein (1-1147)(I712C_T1077C) Foldon construct
MFVFLVLLPLVSSQCVNLTTRTQLPPAYTNSFTRGVYYPDKVFRSSVLHSTQDLFLPFFSNVTWFHAIHVSGTNGTKRFDNPVLPFNDGVYFASTEKSNIIRGWIFGTTLDSKTQSLLIVNNATNVVIKVCEFQFCNDPFLGVYYHKNNKSWMESEFRVYSSANNCTFEYVSQPFLMDLEGKQGNFKNLREFVFKNIDGYFKIYSKHTPINLVRDLPQGFSALEPLVDLPIGINITRFQTLLALHRSYLTPGDSSSGWTAGAAAYYVGYLQPRTFLLKYNENGTITDAVDCALDPLSETKCTLKSFTVEKGIYQTSNFRVQPTESIVRFPNITNLCPFGEVFNATRFASVYAWNRKRISNCVADYSVLYNSASFSTFKCYGVSPTKLNDLCFTNVYADSFVIRGDEVRQIAPGQTGKIADYNYKLPDDFTGCVISWNSNNLDSKVGGNYNYLYRLFRKSNLKPFERDISTEIYQAGSTPCNGVEGFNCYFPLQSYGFQPTNGVGYQPYRVVVLSFELLHAPATVCGPKKSTNLVKNKCVNFNFNGLTGTGVLTESNKKFLPFQQFGRDIADTTDAVRDPQTLEILDITPCSFGGVSVITPGTNTSNQVAVLYQGVNCTEVPVAIHADQLTPTWRVYSTGSNVFQTRAGCLIGAEHVNNSYECDIPIGAGICASYQTQTNSPRRARSVASQSIIAYTMSLGAENSVAYSNNSCAIPTNFTISVTTEILPVSMTKTSVDCTMYICGDSTECSNLLLQYGSFCTQLNRALTGIAVEQDKNTQEVFAQVKQIYKTPPIKDFGGFNFSQILPDPSKPSKRSFIEDLLFNKVTLADAGFIKQYGDCLGDIAARDLICAQKFNGLTVLPPLLTDEMIAQYTSALLAGTITSGWTFGAGAALQIPFAMQMAYRFNGIGVTQNVLYENQKLIANQFNSAIGKIQDSLSSTASALGKLQDVVNQNAQALNTLVKQLSSNFGAISSVLNDILSRLDKVEAEVQIDRLITGRLQSLQTYVTQQLIRAAEIRASANLAATKMSECVLGQSKRVDFCGKGYHLMSFPQSAPHGVVFLHVTYVPAQEKNFTCAPAICHDGKAHFPREGVFVSNGTHWFVTQRNFYEPQIITTDNTFVSGNCDVVIGIVNNTVYDPLQPELDSGGSGYIPEAPRDGQAYVRKDGEWVLLSTFL

SEQ ID NO: 10020 - protein, 1177 aa, Artificial Sequence
  SARS-CoV-2/France/GE1977/2020__EPI_ISL_414632 spike protein (1-1147)(I712C_T1077C) Foldon construct
MFVFLVLLPLVSSQCVNLTTRTQLPPAYTNSFTRGVYYPDKVFRSSVLHSTQDLFLPFFSNVTWFHAIHVSGTNGTKRFDNPVLPFNDGVYFASTEKSNIIRGWIFGTTLDSKTQSLLIVNNATNVVIKVCEFQFCNDPFLGVYYHKNNKSWMESEFRVYSSANNCTFEYVSQPFLMDLEGKQGNFKNLREFVFKNIDGYFKIYSKHTPINLVRDLPQGFSALEPLVDLPIGINITRFQTLLALHRSYLTPGDSSSGWTAGAAAYYVGYLQPRTFLLKYNENGTITDAVDCALDPLSETKCTLKSFTVEKGIYQTSNFRVQPTESIVRFPNITNLCPFGEVFNATRFASVYAWNRKRISNCVADYSVLYNSASFSTFKCYGVSPTKLNDLCFTNVYADSFVIRGDEVRQIAPGQTGKIADYNYKLPDDFTGCVIAWNSNNLDSKVGGNYNYLYRLFRKSNLKPFERDISTEIYQAGSTPCNGVEGFNCYFPLQSYGFQPTNGVGYQPYRVVVLSFELLHAPATVCGPKKSTNLVKNKCVNFNFNGLTGTGVLTESNKKFLPFQQFGRDIADTTDAVRDPQTLEILDITPCSFGGVSVITPGTNTSNQVAVLYQGVNCTEVPVAIHADQLTPTWRVYSTGSNVFQTRAGCLIGAEHVNNSYECDIPIGAGICASYQTQTNSPRRARSVASQSIIAYTMSLGAENSVAYSNNSCAIPTNFTISVTTEILPVSMTKTSVDCTMYICGDSTECSNLLLQYGSFCTQLNRALTGIAVEQDKNTQEVFAQVKQIYKTPPIKDFGGFNFSQILPDPSKPSKRSFIEDLLFNKVTLADAGFIKQYGDCLGDIAARDLICAQKFNGLTVLPPLLTDEMIAQYTSALLAGTITSGWTFGAGAALQIPFAMQMAYRFNGIGVTQNVLYENQKLIANQFNSAIGKIQDSLFSTASALGKLQDVVNQNAQALNTLVKQLSSNFGAISSVLNDILSRLDKVEAEVQIDRLITGRLQSLQTYVTQQLIRAAEIRASANLAATKMSECVLGQSKRVDFCGKGYHLMSFPQSAPHGVVFLHVTYVPAQEKNFTCAPAICHDGKAHFPREGVFVSNGTHWFVTQRNFYEPQIITTDNTFVSGNCDVVIGIVNNTVYDPLQPELDSGGSGYIPEAPRDGQAYVRKDGEWVLLSTFL

SEQ ID NO: 10021 - protein, 1177 aa, Artificial Sequence
  SARS-CoV-2/Finland/FIN-313/2020__EPI_ISL_414641 spike protein (1-1147)(I712C_T1077C) Foldon construct
MFVFLVLLPLVSSQCVNLTTRTQLPPAYTNSFTRGVYYPDKVFRSSVLHSTQDLFLPFFSNVTWFHAIHVSGTNGTKRFDNPVLPFNDGVYFASTEKSNIIRGWIFGTTLDSKTQSLLIVNNATNVVIKVCEFQFCNDPFLGVYYHKNNKSWMESEFRVYSSANNCTFEYVSQPFLMDLEGKQGNFKNLREFVFKNIDGYFKIYSKHTPINLVRDLPQGFSALEPLVDLPIGINITRFKTLLALHRSYLTPGDSSSGWTAGAAAYYVGYLQPRTFLLKYNENGTITDAVDCALDPLSETKCTLKSFTVEKGIYQTSNFRVQPTESIVRFPNITNLCPFGEVFNATRFASVYAWNRKRISNCVADYSVLYNSASFSTFKCYGVSPTKLNDLCFTNVYADSFVIRGDEVRQIAPGQTGKIADYNYKLPDDFTGCVIAWNSNNLDSKVGGNYNYLYRLFRKSNLKPFERDISTEIYQAGSTPCNGVEGFNCYFPLQSYGFQPTNGVGYQPYRVVVLSFELLHAPATVCGPKKSTNLVKNKCVNFNFNGLTGTGVLTESNKKFLPFQQFGRDIADTTDAVRDPQTLEILDITPCSFGGVSVITPGTNTSNQVAVLYQGVNCTEVPVAIHADQLTPTWRVYSTGSNVFQTRAGCLIGAEHVNNSYECDIPIGAGICASYQTQTNSPRRARSVASQSIIAYTMSLGAENSVAYSNNSCAIPTNFTISVTTEILPVSMTKTSVDCTMYICGDSTECSNLLLQYGSFCTQLNRALTGIAVEQDKNTQEVFAQVKQIYKTPPIKDFGGFNFSQILPDPSKPSKRSFIEDLLFNKVTLADAGFIKQYGDCLGDIAARDLICAQKFNGLTVLPPLLTDEMIAQYTSALLAGTITSGWTFGAGAALQIPFAMQMAYRFNGIGVTQNVLYENQKLIANQFNSAIGKIQDSLSSTASALGKLQDVVNQNAQALNTLVKQLSSNFGAISSVLNDILSRLDKVEAEVQIDRLITGRLQSLQTYVTQQLIRAAEIRASANLAATKMSECVLGQSKRVDFCGKGYHLMSFPQSAPHGVVFLHVTYVPAQEKNFTCAPAICHDGKAHFPREGVFVSNGTHWFVTQRNFYEPQIITTDNTFVSGNCDVVIGIVNNTVYDPLQPELDSGGSGYIPEAPRDGQAYVRKDGEWVLLSTFL

SEQ ID NO: 10022 - protein, 1177 aa, Artificial Sequence
  SARS-CoV-2/Netherlands/ZuidHolland_2/2020__EPI_ISL_414556 spike protein (1-1147)(I712C_T1077C) Foldon construct
MFVFLVLLPLVSSQCVNLTTRTQLPPAYTNSFTRGVYYPDKVFRSSVLHSTQDLFLPFFSNVTWFHAIHVSGTNGTKRFDNPVLPFNDGVYFASTEKSNIIRGWIFGTTLDSKTQSLLIVNNATNVVIKVCEFQFCNDPFLGVYYHKNNKSWMESEFRVYSSANNCTFEYVSQPFLMDLEGKQGNFKNLREFVFKNIDGYFKIYSKHTPINLVRDLPQGFSALEPLVDLPIGINITRFQTLLALHRSYLTPGDSSSGWTAGAAAYYVGYLQPRTFLLKYNENGTITDAVDCALDPLSETKCTLKSFTVEKGIYQTSNFRVQPTESIVRFPNITNLCPFGEVFNATRFASVYAWNRKRISNCVADYSVLYNSASFSTFKCYGVSPTKLNDLCFTNVYADSFVIRGDEVRQIAPGQTGKIADYNYKLPDDFTGCVIAWNSNNLDSKVGGNYNYLYRLFRKSNLKPFERDISTEIYQAGSTPCNGVEGFNCYFPLQSYGFQPTNGVGYQPYRVVVLSFELLHAPATVCGPKKSTNLVKNKCVNFNFNGLTGTGVLTESNKKFLPFQQFGRDIADTTDAVRDPQTLEILDITPCSFGGVSVITPGTNTSNQVAVLYQGVNCTEVPVAIHADQLTPTWRVYSTGSNVFQTRAGCLIGAEHVNNSYECDIPIGAGICASYQTQTNSPRRARSVASQSIIAYTMSLGAENSVAYSNNSCAIPTNFTISVTTEILPVSMTKTSVDCTMYICGDSTECSNLLLQYGSFCTQLNRALTGIALEQDKNTQEVFAQVKQIYKTPPIKDFGGFNFSQILPDPSKPSKRSFIEDLLFNKVTLADAGFIKQYGDCLGDIAARDLICAQKFNGLTVLPPLLTDEMIAQYTSALLAGTITSGWTFGAGAALQIPFAMQMAYRFNGIGVTQNVLYENQKLIANQFNSAIGKIQDSLSSTASALGKLQDVVNQNAQALNTLVKQLSSNFGAISSVLNDILSRLDKVEAEVQIDRLITGRLQSLQTYVTQQLIRAAEIRASANLAATKMSECVLGQSKRVDFCGKGYHLMSFPQSAPHGVVFLHVTYVPAQEKNFTCAPAICHDGKAHFPREGVFVSNGTHWFVTQRNFYEPQIITTDNTFVSGNCDVVIGIVNNTVYDPLQPELDSGGSGYIPEAPRDGQAYVRKDGEWVLLSTFL

SEQ ID NO: 10023 - protein, 1177 aa, Artificial Sequence
  SARS-CoV-2/USA/WA-UW31/2020__EPI_ISL_414618 spike protein (1-1147)(I712C_T1077C) Foldon construct
MFVFLVLLPLVSSQCVNLTTRTQLPPAYTNSFTRGVYYPDKVFRSSVLHSTQDLFLPFFSNVTWFHAIHVSGTNGTKRFDNPVLPFNDGVYFASTEKSNIIRGWIFGTTLDSKTQSLLIVNNATNVVIKVCEFQFCNDPFLGVYYHKNNKSWMESEFRVYSSANNCTFEYVSQPFLMDLEGKQGNFKNLREFVFKNIDGYFKIYSKHTPINLVRDLPQGFSALEPLVDLPIGINITRFQTLLALHRSYLTPGDSSSGWTAGAAAYYVGYLQPRTFLLKYNENGTITDAVDCALDPLSETKCTLKSFTVEKGIYQTSNFRVQPTESIVRFPNITNLCPFGEVFNATRFASVYAWNRKRISNCVADYSVLYNSASFSTFKCYGVSPTKLNDLCFTNVYADSFVIRGDEVRQIAPGQTGKIADYNYKLPDDFTGCVIAWNSNNLDSKVGGNYNYLYRLFRKSNLKPFERDISTEIYQAGSTPCNGAEGFNCYFPLQSYGFQPTNGVGYQPYRVVVLSFELLHAPATVCGPKKSTNLVKNKCVNFNFNGLTGTGVLTESNKKFLPFQQFGRDIADTTDAVRDPQTLEILDITPCSFGGVSVITPGTNTSNQVAVLYQDVNCTEVPVAIHADQLTPTWRVYSTGSNVFQTRAGCLIGAEHVNNSYECDIPIGAGICASYQTQTNSPRRARSVASQSIIAYTMSLGAENSVAYSNNSCAIPTNFTISVTTEILPVSMTKTSVDCTMYICGDSTECSNLLLQYGSFCTQLNRALTGIAVEQDKNTQEVFAQVKQIYKTPPIKDFGGFNFSQILPDPSKPSKRSFIEDLLFNKVTLADAGFIKQYGDCLGDIAARDLICAQKFNGLTVLPPLLTDEMIAQYTSALLAGTITSGWTFGAGAALQIPFAMQMAYRFNGIGVTQNVLYENQKLIANQFNSAIGKIQDSLSSTASALGKLQDVVNQNAQALNTLVKQLSSNFGAISSVLNDILSRLDKVEAEVQIDRLITGRLQSLQTYVTQQLIRAAEIRASANLAATKMSECVLGQSKRVDFCGKGYHLMSFPQSAPHGVVFLHVTYVPAQEKNFTCAPAICHDGKAHFPREGVFVSNGTHWFVTQRNFYEPQIITTDNTFVSGNCDVVIGIVNNTVYDPLQPELDSGGSGYIPEAPRDGQAYVRKDGEWVLLSTFL

SEQ ID NO: 10024 - protein, 1177 aa, Artificial Sequence
  SARS-CoV-2/South Korea/SNU01/2020__EPI_ISL_411929 spike protein (1-1147)(I712C_T1077C) Foldon construct
MFVFLVLLPLVSSQCVNLTTRTQLPPAYTNSFTRGVYYPDKVFRSSVLHSTQDLFLPFFSNVTWFHAIHVSGTNGTKRFDNPVLPFNDGVYFASTEKSNIIRGWIFGTTLDSKTQSLLIVNNATNVVIKVCEFQFCNDPFLGVYYHKNNKSWMESEFRVYSSANNCTFEYVSQPFLMDLEGKQGNFKNLREFVFKNIDGYFKIYSKHTPINLVRDLPQGFWALEPLVDLPIGINITRFQTLLALHRSYLTPGDSSSGWTAGAAAYYVGYLQPRTFLLKYNENGTITDAVDCALDPLSETKCTLKSFTVEKGIYQTSNFRVQPTESIVRFPNITNLCPFGEVFNATRFASVYAWNRKRISNCVADYSVLYNSASFSTFKCYGVSPTKLNDLCFTNVYADSFVIRGDEVRQIAPGQTGKIADYNYKLPDDFTGCVIAWNSNNLDSKVGGNYNYLYRLFRKSNLKPFERDISTEIYQAGSTPCNGVEGFNCYFPLQSYGFQPTNGVGYQPYRVVVLSFELLHAPATVCGPKKSTNLVKNKCVNFNFNGLTGTGVLTESNKKFLPFQQFGRDIADTTDAVRDPQTLEILDITPCSFGGVSVITPGTNTSNQVAVLYQDVNCTEVPVAIHADQLTPTWRVYSTGSNVFQTRAGCLIGAEHVNNSYECDIPIGAGICASYQTQTNSPRRARSVASQSIIAYTMSLGAENSVAYSNNSCAIPTNFTISVTTEILPVSMTKTSVDCTMYICGDSTECSNLLLQYGSFCTQLNRALTGIAVEQDKNTQEVFAQVKQIYKTPPIKDFGGFNFSQILPDPSKPSKRSFIEDLLFNKVTLADAGFIKQYGDCLGDIAARDLICAQKFNGLTVLPPLLTDEMIAQYTSALLAGTITSGWTFGAGAALQIPFAMQMAYRFNGIGVTQNVLYENQKLIANQFNSAIGKIQDSLSSTASALGKLQDVVNQNAQALNTLVKQLSSNFGAISSVLNDILSRLDKVEAEVQIDRLITGRLQSLQTYVTQQLIRAAEIRASANLAATKMSECVLGQSKRVDFCGKGYHLMSFPQSAPHGVVFLHVTYVPAQEKNFTCAPAICHDGKAHFPREGVFVSNGTHWFVTQRNFYEPQIITTDNTFVSGNCDVVIGIVNNTVYDPLQPELDSGGSGYIPEAPRDGQAYVRKDGEWVLLSTFL

SEQ ID NO: 10025 - protein, 1177 aa, Artificial Sequence
  SARS-CoV-2/China/WF0004/2020__EPI_ISL_413694 spike protein (1-1147)(I712C_T1077C) Foldon construct
MFVFLVLLPLVSSQCVNLTTRTQLPPAYTNSFTRGVYYPDKVFRSSVLHSTQDLFLPFFSNVTWFHAIHVSGTNGTKRFDNPVLPFNDGVYFASTEKSNIIRGWIFGTTLDSKTQSLLIVNNATNVVIKVCEFQFCNDPFLGVYYHKNNKSWTESEFRVYSSANNCTFEYVSQPFLMDLEGKQGNFKNLREFVFKNIDGYFKIYSKHTPINLVRDLPQGFSALEPLVDLPIGINITRFQTLLALHRSYLTPGDSSSGWTAGAAAYYVGYLQPRTFLLKYNENGTITDAVDCALDPLSETKCTLKSFTVEKGIYQTSNFRVQPTESIVRFPNITNLCPFGEVFNATRFASVYAWNRKRISNCVADYSVLYNSASFSTFKCYGVSPTKLNDLCFTNVYADSFVIRGDEVRQIAPGQTGKIADYNYKLPDDFTGCVIAWNSNNLDSKVGGNYNYLYRLFRKSNLKPFERDISTEIYQAGSTPCNGVEGFNCYFPLQSYGFQPTNGVGYQPYRVVVLSFELLHAPATVCGPKKSTNLVKNKCVNFNFNGLTGTGVLTESNKKFLPFQQFGRDIADTTDAVRDPQTLEILDITPCSFGGVSVITPGTNTSNQVAVLYQDVNCTEVPVAIHADQLTPTWRVYSTGSNVFQTRAGCLIGAEHVNNSYECDIPIGAGICASYQTQTNSPRRARSVASQSIIAYTMSLGAENSVAYSNNSCAIPTNFTISVTTEILPVSMTKTSVDCTMYICGDSTECSNLLLQYGSFCTQLNRALTGIAVEQDKNTQEVFAQVKQIYKTPPIKDFGGFNFSQILPDPSKPSKRSFIEDLLFNKVTLADAGFIKQYGDCLGDIAARDLICAQKFNGLTVLPPLLTDEMIAQYTSALLAGTITSGWTFGAGAALQIPFAMQMAYRFNGIGVTQNVLYENQKLIANQFNSAIGKIQDSLSSTASALGKLQDVVNQNAQALNTLVKQLSSNFGAISSVLNDILSRLDKVEAEVQIDRLITGRLQSLQTYVTQQLIRAAEIRASANLAATKMSECVLGQSKRFDFCGKGYHLMSFPQSAPHGVVFLHVTYVPAQEKNFTCAPAICHDGKAHFPREGVFVSNGTHWFVTQRNFYEPQIITTDNTFVSGNCDVVIGIVNNTVYDPLQPELDSGGSGYIPEAPRDGQAYVRKDGEWVLLSTFL

SEQ ID NO: 10026 - protein, 1177 aa, Artificial Sequence
  SARS-CoV-2/China/WF0028/2020__EPI_ISL_413791 spike protein (1-1147)(I712C_T1077C) Foldon construct
MFVFLVLLPLVSSQCVNLTTRTQLPPAYTNSFTRGVYYPDKVFRSSVLHSTQDLFLPFFSNVTWFHAIHVSGTNGTKRFDNPVLPFNDGVYFASTEKSNIIRGWIFGTTLDSKTQSLLIVNNATNVVIKVCEFQFCNDPFLGVYYHKNNKSWMESEFRVYSSANNCTFEYVSQPFLMDLEGKQGNFKNLREFVFKNIDGYFKIYSKHTPINLVRDLPQGFSALEPLVDLPIGINITRFQTLLALHRSYLTPGDSSSGWTAGAAAYYVGYLQPRTFLLKYNENGTITDAVDCALDPLSETKCTLKSFTVEKGIYQTSNFRVQPTESIVRFPNITNLCPFGEVFNATRFASVYAWNRKRISNCVADYSVLYNSASFSTFKCYGVSPTKLNDLCFTNVYADSFVIRGDEVRQIAPGQTGKIADYNYKLPDDFTGCVIAWNSNNLDSKVGGNYNYLYRLFRKSNLKPFERDISTEIYQAGSTPCNGVEGFNCYFPLQSYGFQPTNGVGYQPYRVVVLSFELLHAPATVCGPKKSTNLVKNKCVNFNFNGLTGTGVLTESNKKFLPFQQFGRDIADTTDAVRDPQTLEILDITPCSFGGVSVITPGTNTSNQVAVLYQDVNCTEVPVAIHADQLTPTWRVYSTGSNVFQTRAGCLIGAEHVNNSYECDIPIGAGICASYQTQTNSPRRARSVASQSIIAYTMSLGAENSVAYSNNSCAIPTNFTISVTTEILPVSMTKTSVDCTMYICGDSTECSNLLLQYGSFCTQLNRALTGIAVEQDKNTQEVFAQVKQIYKTPPIKDFGGFNFSQILPDPSKPSKRSFIEDLLFNKVTLADAGFIKQYGDCLGDIAARDLICAQKFNGLTVLPPLLTDEMIAQYTSALLAGTITSGWTFGAGAALQIPFAMQMAYRFNGIGVTQNVLYENQKLIANQFNSAIGKIQDSLSSTASALGKLQDVVNQNAQALNTLVKQLSSNFGAISSVLNDILSRLDKVEAEVQIDRLITGRLQSLQTYVTQQLIRAAEIRASANLAATKMSECVLGQSKRVDFCGKGYHLMSFPQSAPHGVVFLHVTYVPAQEKNFTCAPAICHDGKAHFPREGVFVSNGTHWFVTQRNFYEPQIITTDNTFVSGNCDVVIGIVNNTVYDPLQPELESGGSGYIPEAPRDGQAYVRKDGEWVLLSTFL

SEQ ID NO: 10027 - protein, 1177 aa, Artificial Sequence
  SARS-CoV-2/2019-nCoV/USA-CruiseA-18/2020__MT159716.1 spike protein (1-1147)(I712C_T1077C) Foldon construct
MFVFLVLLPLVSSQCVNLTTRTQLPPAYTNSFTRGVYYPDKVFRSSVLHSTQDLFLPFFSNVTWFHAIHVSGTNGTKRFDNPVLPFNDGVYFASTEKSNIIRGWIFGTTLDSKTQSLLIVNNATNVVIKVCEFQFCNDPFLGVYYHKNNKSWMESELRVYSSANNCTFEYVSQPFLMDLEGKQGNFKNLREFVFKNIDGYFKIYSKHTPINLVRDLPQGFSALEPLVDLPIGINITRFQTLLALHRSYLTPGDSSSGWTAGAAAYYVGYLQPRTFLLKYNENGTITDAVDCALDPLSETKCTLKSFTVEKGIYQTSNFRVQPTESIVRFPNITNLCPFGEVFNATRFASVYAWNRKRISNCVADYSVLYNSASFSTFKCYGVSPTKLNDLCFTNVYADSFVIRGDEVRQIAPGQTGKIADYNYKLPDDFTGCVIAWNSNNLDSKVGGNYNYLYRLFRKSNLKPFERDISTEIYQAGSTPCNGVEGFNCYFPLQSYGFQPTNGVGYQPYRVVVLSFELLHAPATVCGPKKSTNLVKNKCVNFNFNGLTGTGVLTESNKKFLPFQQFGRDIADTTDAVRDPQTLEILDITPCSFGGVSVITPGTNTSNQVAVLYQDVNCTEVPVAIHADQLTPTWRVYSTGSNVFQTRAGCLIGAEHVNNSYECDIPIGAGICASYQTQTNSPRRARSVASQSIIAYTMSLGAENSVAYSNNSCAIPTNFTISVTTEILPVSMTKTSVDCTMYICGDSTECSNLLLQYGSFCTQLNRALTGIAVEQDKNTQEVFAQVKQIYKTPPIKDFGGFNFSQILPDPSKPSKRSFIEDLLFNKVTLADAGFIKQYGDCLGDIAARDLICAQKFNGLTVLPPLLTDEMIAQYTSALLAGTITSGWTFGAGAALQIPFAMQMAYRFNGIGVTQNVLYENQKLIANQFNSAIGKIQDSLSSTASALGKLQDVVNQNAQALNTLVKQLSSNFGAISSVLNDILSRLDKVEAEVQIDRLITGRLQSLQTYVTQQLIRAAEIRASANLAATKMSECVLGQSKRVDFCGKGYHLMSFPQSAPHGVVFLHVTYVPAQEKNFTCAPAICHDGKAHFPREGVFVSNGTHWFVTQRNFYEPQIITTDNTFVSGNCDVVIGIVNNTVYDPLQPELDSGGSGYIPEAPRDGQAYVRKDGEWVLLSTFL

SEQ ID NO: 10028 - protein, 1177 aa, Artificial Sequence
  SARS-CoV-2/SARS-CoV-2/Yunnan-01/human/2020/CHN__MT049951.1 spike protein (1-1147)(I712C_T1077C) Foldon construct
MFVFLVLLPLVSSQCVNLTTRTQLPPANTNSFTRGVYYPDKVFRSSVLHSTQDLFLPFFSNVTWFHAIHVSGTNGTKRFDNPVLPFNDGVYFASTEKSNIIRGWIFGTTLDSKTQSLLIVNNATNVVIKVCEFQFCNDPFLGVYYHKNNKSWMESEFRVYSSANNCTFEYVSQPFLMDLEGKQGNFKNLREFVFKNIDGYFKIYSKHTPINLVRDLPQGFSALEPLVDLPIGINITRFQTLLALHRSYLTPGDSSSGWTAGAAAYYVGYLQPRTFLLKYNENGTITDAVDCALDPLSETKCTLKSFTVEKGIYQTSNFRVQPTESIVRFPNITNLCPFGEVFNATRFASVYAWNRKRISNCVADYSVLYNSASFSTFKCYGVSPTKLNDLCFTNVYADSFVIRGDEVRQIAPGQTGKIADYNYKLPDDFTGCVIAWNSNNLDSKVGGNYNYLYRLFRKSNLKPFERDISTEIYQAGSTPCNGVEGFNCYFPLQSYGFQPTNGVGYQPYRVVVLSFELLHAPATVCGPKKSTNLVKNKCVNFNFNGLTGTGVLTESNKKFLPFQQFGRDIADTTDAVRDPQTLEILDITPCSFGGVSVITPGTNTSNQVAVLYQDVNCTEVPVAIHADQLTPTWRVYSTGSNVFQTRAGCLIGAEHVNNSYECDIPIGAGICASYQTQTNSPRRARSVASQSIIAYTMSLGAENSVAYSNNSCAIPTNFTISVTTEILPVSMTKTSVDCTMYICGDSTECSNLLLQYGSFCTQLNRALTGIAVEQDKNTQEVFAQVKQIYKTPPIKDFGGFNFSQILPDPSKPSKRSFIEDLLFNKVTLADAGFIKQYGDCLGDIAARDLICAQKFNGLTVLPPLLTDEMIAQYTSALLAGTITSGWTFGAGAALQIPFAMQMAYRFNGIGVTQNVLYENQKLIANQFNSAIGKIQDSLSSTASALGKLQDVVNQNAQALNTLVKQLSSNFGAISSVLNDILSRLDKVEAEVQIDRLITGRLQSLQTYVTQQLIRAAEIRASANLAATKMSECVLGQSKRVDFCGKGYHLMSFPQSAPHGVVFLHVTYVPAQEKNFTCAPAICHDGKAHFPREGVFVSNGTHWFVTQRNFYEPQIITTDNTFVSGNCDVVIGIVNNTVYDPLQPELDSGGSGYIPEAPRDGQAYVRKDGEWVLLSTFL

SEQ ID NO: 10029 - protein, 1177 aa, Artificial Sequence
  SARS-CoV-2/USA/WA-UW292/2020__EPI_ISL_418077 spike protein (1-1147)(I712C_T1077C) Foldon construct
MFVFLVLLPLVSSQCVNLTTRTQLPPAYTNSFTRGVYYPDKVFRSSVLHSTQDLFLPFFSNVTWFHAIHVSGTNGTKRFDNPVLPFNDGVYFASTEKSNIIRGWIFGTTLDSKTQSLLIVNNATNVVIKVCEFQFCNDPFLGVYYHKNNKSWMESEFRVYSSANNCTFEYVSQPFLMDLEGKQGNFKNLREFVFKNIDGYFKIYSKHTPINLVRDLPQGFSALEPLVDLPIGINITRFQTLLALHRSYLTPGDSSSGWTAGAAAYYVGYLQPRTFLLKYNENGTITDAVDCALDPLSETKCTLKSFTVEKGIYQTSNFRVQPTESIVRFPNITNLCPFGEVFNATRFASVYAWNRKRISNCVADYSVLYNSASFSTFKCYGVSPTKLNDLCFTNVYADSFVIRGDEVRQIAPGQTGKIADYNYKLPDDFTGCVIAWNSNNLDSKVGGNYNYLYRLFRKSNLKPFERDISTEIYQASSTPCNGVEGFNCYFPLQSYGFQPTNGVGYQPYRVVVLSFELLHAPATVCGPKKSTNLVKNKCVNFNFNGLTGTGVLTESNKKFLPFQQFGRDIADTTDAVRDPQTLEILDITPCSFGGVSVITPGTNTSNQVAVLYQDVNCTEVPVAIHADQLTPTWRVYSTGSNVFQTRAGCLIGAEHVNNSYECDIPIGAGICASYQTQTNSPRRARSVASQSIIAYTMSLGAENSVAYSNNSCAIPTNFTISVTTEILPVSMTKTSVDCTMYICGDSTECSNLLLQYGSFCTQLNRALTGIAVEQDKNTQEVFAQVKQIYKTPPIKDFGGFNFSQILPDPSKPSKRSFIEDLLFNKVTLADAGFIKQYGDCLGDIAARDLICAQKFNGLTVLPPLLTDEMIAQYTSALLAGTITSGWTFGAGAALQIPFAMQMAYRFNGIGVTQNVLYENQKLIANQFNSAIGKIQDSLSSTASALGKLQDVVNQNAQALNTLVKQLSSNFGAISSVLNDILSRLDKVEAEVQIDRLITGRLQSLQTYVTQQLIRAAEIRASANLAATKMSECVLGQSKRVDFCGKGYHLMSFPQSAPHGVVFLHVTYVPAQEKNFTCAPAICHDGKAHFPREGVFVSNGTHWFVTQRNFYEPQIITTDNTFVSGNCDVVIGIVNNTVYDPLQPELDSGGSGYIPEAPRDGQAYVRKDGEWVLLSTFL

SEQ ID NO: 10030 - protein, 1177 aa, Artificial Sequence
  SARS-CoV-2/Iceland/192/2020__EPI_ISL_417819 spike protein (1-1147)(I712C_T1077C) Foldon construct
MFVFFVLLPLVSSQCVNLTTRTQLPPAYTNSFTRGVYYPDKVFRSSVLHSTQDLFLPFFSNVTWFHAIHVSGTNGTKRFDNPVLPFNDGVYFASTEKSNIIRGWIFGTTLDSKTQSLLIVNNATNVVIKVCEFQFCNDPFLGVYYHKNNKSWMESEFRVYSSANNCTFEYVSQPFLMDLEGKQGNFKNLREFVFKNIDGYFKIYSKHTPINLVRDLPQGFSALEPLVDLPIGINITRFQTLLALHRSYLTPGDSSSGWTAGAAAYYVGYLQPRTFLLKYNENGTITDAVDCALDPLSETKCTLKSFTVEKGIYQTSNFRVQPTESIVRFPNITNLCPFGEVFNATRFASVYAWNRKRISNCVADYSVLYNSASFSTFKCYGVSPTKLNDLCFTNVYADSFVIRGDEVRQIAPGQTGKIADYNYKLPDDFTGCVIAWNSNNLDSKVGGNYNYLYRLFRKSNLKPFERDISTEIYQAGSTPCNGVEGFNCYFPLQSYGFQPTNGVGYQPYRVVVLSFELLHAPATVCGPKKSTNLVKNKCVNFNFNGLTGTGVLTESNKKFLPFQQFGRDIADTTDAVRDPQTLEILDITPCSFGGVSVITPGTNTSNQVAVLYQGVNCTEVPVAIHADQLTPTWRVYSTGSNVFQTRAGCLIGAEHVNNSYECDIPIGAGICASYQTQTNSPRRARSVASQSIIAYTMSLGAENSVAYSNNSCAIPTNFTISVTTEILPVSMTKTSVDCTMYICGDSTECSNLLLQYGSFCTQLNRALTGIAVEQDKNTQEVFAQVKQIYKTPPIKDFGGFNFSQILPDPSKPSKRSFIEDLLFNKVTLADAGFIKQYGDCLGDIAARDLICAQKFNGLTVLPPLLTDEMIAQYTSALLAGTITSGWTFGAGAALQIPFAMQMAYRFNGIGVTQNVLYENQKLIANQFNSAIGKIQDSLSSTASALGKLQDVVNQNAQALNTLVKQLSSNFGAISSVLNDILSRLDKVEAEVQIDRLITGRLQSLQTYVTQQLIRAAEIRASANLAATKMSECVLGQSKRVDFCGKGYHLMSFPQSAPHGVVFLHVTYVPAQEKNFTCAPAICHDGKAHFPREGVFVSNGTHWFVTQRNFYEPQIITTDNTFVSGNCDVVIGIVNNTVYDPLQPELDSGGSGYIPEAPRDGQAYVRKDGEWVLLSTFL

SEQ ID NO: 10031 - protein, 1177 aa, Artificial Sequence
  SARS-CoV-2/Belgium/ULG-6939/2020__EPI_ISL_417020 spike protein (1-1147)(I712C_T1077C) Foldon construct
MFVFLVLLPLVSSQCVNLTTRTQLPPAYTNSFTRGVYYPDKVFRSSVLHSTQDLFLPFFSNVTWFHAIHVSGTNGTKRFDNPVLPFNDGVYFASTEKSNIIRGWIFGTTLDSKTQSLLIVNNATNVVIKVCEFQFCNDPFLGVYYHKNNKSWMESEFRVYSSANNCTFEYVSQPFLMDLEGKQGNFKNLREFVFKNIDGYFKIYSKHTPINLVRDLPQGFSALEPLVDLPIGINITRFQTLLALHRSYLTPGDSSSGWTAGAAAYYVGYLQPRTFLLKYNENGTITDAVDCALDPLSETKCTLKSFTVEKGIYQTSNFRVQPTESIVRFPNITNLCPFGEVFNATRFASVYAWNRKRISNCVADYSVLYNSASFSTFKCYGVSPTKLNDLCFTNVYADSFVIRGDEVRQIAPGQTGKIADYNYKLPDDFTGCVIAWNSNNLDSKVGGNYNYLYRLFRKSNLKPFERDISTEIYQAGSTPCNGVEGFNCYFPLQSYGFQPTNGVGYQPYRVVVLSFELLHAPATVCGPKKSTNLVKNKCVNFNFNGLTGTGVLTESNKKFLPFQQFGRDIADTTDAVRDPQTLEILDITPCSFGGVSVITPGTNTSNQVAVLYQGVNCTEVPVAIHADQLTPTWRVYSTGSNVFQTRAGCLIGAEHVNNSYECDIPIGAGICASYQTQTNSPRRARSVASQSIIAYTMSLGAENSVVYSNNSCAIPTNFTISVTTEILPVSMTKTSVDCTMYICGDSTECSNLLLQYGSFCTQLNRALTGIAVEQDKNTQEVFAQVKQIYKTPPIKDFGGFNFSQILPDPSKPSKRSFIEDLLFNKVTLADAGFIKQYGDCLGDIAARDLICAQKFNGLTVLPPLLTDEMIAQYTSALLAGTITSGWTFGAGAALQIPFAMQMAYRFNGIGVTQNVLYENQKLIANQFNSAIGKIQDSLSSTASALGKLQDVVNQNAQALNTLVKQLSSNFGAISSVLNDILSRLDKVEAEVQIDRLITGRLQSLQTYVTQQLIRAAEIRASANLAATKMSECVLGQSKRVDFCGKGYHLMSFPQSAPHGVVFLHVTYVPAQEKNFTCAPAICHDGKAHFPREGVFVSNGTHWFVTQRNFYEPQIITTDNTFVSGNCDVVIGIVNNTVYDPLQPELDSGGSGYIPEAPRDGQAYVRKDGEWVLLSTFL

SEQ ID NO: 10032 - protein, 1177 aa, Artificial Sequence
  SARS-CoV-2/France/HF2496/2020__EPI_ISL_418231 spike protein (1-1147)(I712C_T1077C) Foldon construct
MFVFLVLLPLVSSQCVNLTTRTQLPPAYTNSFTRGVYYPDKVFRSSVLHSTQDLFLPFFSNVTWFHAIHVSGTNGTKRFDNPVLPFNDGVYFASTEKSNIIRGWIFGTTLDSKTQSLLIVNNATNVVIKVCEFQFCNDPFLGVYYHKNNKSWMESEFRVYSSANNCTFEYVSQPFLMDLEGKQGNFKNLREFVFKNIDGYFKIYSKHTPINLVRDLPQGFSALEPLVDLPIGINITRFQTLLALHRSYLTPGDSSSGWTAGAAAYYVGYLQPRTFLLKYNENGTITDAVDCALDPLSETKCTLKSFTVEKGIYQTSNFRVQPTESIVRFPNITNLCPFGEVFNATRFASVYAWNRKRISNCVADYSVLYNSASFSTFKCYGVSPTKLNDLCFTNVYADSFVIRGDEVRQIAPGQTGKIADYNYKLPDDFTGCVIAWNSNNLDSKVGGNYNYLYRLFRKSNLKPFERDISTEIYQAGSTPCNGVEGFNCYFPLQSYGFQPTNGVGYQPYRVVVLSFELLHAPATVCGPKKSTNLVKNKCVNFNFNGLTGTGVLTESNKKFLPFQQFGRDIADTTDAVRDPQTLEILDITPCSFGGVSVITPGTNTSNQVAVLYQGVNCTEVPVAIHADQLTPTWRVYSTGSNVFQTRAGCLIGAEHVNNSYECDIPIGAGICASYQTQTNSPRRARSVASQSIIAYTMSLGAENSVAYSNNSCAIPTNFTISVTTEILPVSMTKTSVDCTMYICGDSTECSNLLLQYGSFCTQLNRALTGIAVEQDKNTQEVFAQVKQIYKTPPIKDFGGFNFSQILPDPSKPSKRSFIEDLLFNKVTLADAGFIKQYGDCLGDIVARDLICAQKFNGLTVLPPLLTDEMIAQYTSALLAGTITSGWTFGAGAALQIPFAMQMAYRFNGIGVTQNVLYENQKLIANQFNSAIGKIQDSLSSTASALGKLQDVVNQNAQALNTLVKQLSSNFGAISSVLNDILSRLDKVEAEVQIDRLITGRLQSLQTYVTQQLIRAAEIRASANLAATKMSECVLGQSKRVDFCGKGYHLMSFPQSAPHGVVFLHVTYVPAQEKNFTCAPAICHDGKAHFPREGVFVSNGTHWFVTQRNFYEPQIITTDNTFVSGNCDVVIGIVNNTVYDPLQPELDSGGSGYIPEAPRDGQAYVRKDGEWVLLSTFL

SEQ ID NO: 10033 - protein, 1177 aa, Artificial Sequence
  SARS-CoV-2/USA/WA-UW291/2020__EPI_ISL_418076 spike protein (1-1147)(I712C_T1077C) Foldon construct
MFVFLVLLPLVSSQCVNLTTRTQLPPAYTNSFTRGVYYPDKVFRSSVLHSTQDLFLPFFSNVTWFHAIHVSGTNGTKRFDNPVLPFNDGVYFASTEKSNIIRGWIFGTTLDSKTQSLLIVNNATNVVIKVCEFQFCNDPFLGVYYHKNNKSWMESEFRVYSSANNCTFEYVSQPFLMDLEGKQGNFKNLREFVFKNIDGYFKIYSKHTPINLVRDLPQGFSALEPLVDLPIGINITRFQTLLALHRSYLTPGDSSSGWTAGAAAYYVGYLQPRTFLLKYNENGTITDAVDCALDPLSETKCTLKSFTVEKGIYQTSNFRVQPTESIVRFPNITNLCPFGEVFNATRFASVYAWNRKRISNCVADYSVLYNSASFSTFKCYGVSPTKLNDLCFTNVYADSFVIRGDEVRQIAPGQTGKIADYNYKLPDDFTGCVIAWNSNNLDSKVGGNYNYLYRLFRKSNLKPFERDISTEIYQAGSTPCNGVEGFNCYFPLQSYGFQPTNGVGYQPYRVVVLSFELLHAPATVCGPKKSTNLVKNKCVNFNFNGLTGTGVLTESNKKFLPFQQFGRDIADTTDAVRDPQTLEILDITPCSFGGVSVITPGTNTSNQVAVLYQGVNCTEVPVAIHADQLTPTWRVYSTGSNVFQTRAGCLIGAEHVNNSYECDIPIGAGICASYQTQTNSPRRARSVASQSIIAYTMSLGAENSVAYSNNSCAIPTNFTISVTTEILPVSMTKTSVDCTMYICGDSTECSNLLLQYGSFCTQLNRALTGIAVEQDKNTQEVFAQVKQIYKTPPIKDFGGFNFSQILPDPSKPSKRSFIEDLLFNKVTLADAGFIKQYGDCLGDIAARDLICAQKFNGLTVLPPLLTDEMIAQYTSALLAGTITSGWTFGAGAALQIPFAMQMAYRFNGIGVTQNVLYENQKLIANQFNSAIGKIQYSLSSTASALGKLQDVVNQNAQALNTLVKQLSSNFGAISSVLNDILSRLDKVEAEVQIDRLITGRLQSLQTYVTQQLIRAAEIRASANLAATKMSECVLGQSKRVDFCGKGYHLMSFPQSAPHGVVFLHVTYVPAQEKNFTCAPAICHDGKAHFPREGVFVSNGTHWFVTQRNFYEPQIITTDNTFVSGNCDVVIGIVNNTVYDPLQPELDSGGSGYIPEAPRDGQAYVRKDGEWVLLSTFL

SEQ ID NO: 10034 - protein, 1177 aa, Artificial Sequence; identical to SEQ ID NO: 9997
  SARS-CoV-2/Portugal/PT0034/2020__EPI_ISL_418019 spike protein (1-1147)(I712C_T1077C) Foldon construct

SEQ ID NO: 10035 - protein, 1177 aa, Artificial Sequence; identical to SEQ ID NO: 9989
  SARS-CoV-2/Iceland/202/2020__EPI_ISL_417750 spike protein (1-1147)(I712C_T1077C) Foldon construct

SEQ ID NO: 10036 - protein, 1177 aa, Artificial Sequence
  SARS-CoV-2/USA/WA-UW261/2020__EPI_ISL_418046 spike protein (1-1147)(I712C_T1077C) Foldon construct
MFVFLVLLPLVSSQCVNLTTRTQLPPAYTNSFTRGVYYPDKVFRSSVLHSTQDLFLPFFSNVTWFHAIHVSGTNGTKRFDNPVLPFNDGVYFASTEKSNIIRGWIFGTTLDSKTQSLLIVNNATNVVIKVCEFQFCNDPFLGVYYHKNNKSWMESEFRVYSSANNCTFEYVSQPFLMDLEGKQGNFKNLREFVFKNIDGYFKIYSKHTPINLVRDLPQGFSALEPLVDLPIGINITRFQTLLALHRSYLTPGDSSSGWTAGAAAYYVGYLQPRTFLLKYNENGTITDAVDCALDPLSETKCTLKSFTVEKGIYQTSNFRVQPTESIVRFPNITNLCPFGEVFNATRFTSVYAWNRKRISNCVADYSVLYNSASFSTFKCYGVSPTKLNDLCFTNVYADSFVIRGDEVRQIAPGQTGKIADYNYKLPDDFTGCVIAWNSNNLDSKVGGNYNYLYRLFRKSNLKPFERDISTEIYQAGSTPCNGVEGFNCYFPLQSYGFQPTNGVGYQPYRVVVLSFELLHAPATVCGPKKSTNLVKNKCVNFNFNGLTGTGVLTESNKKFLPFQQFGRDIADTTDAVRDPQTLEILDITPCSFGGVSVITPGTNTSNQVAVLYQDVNCTEVPVAIHADQLTPTWRVYSTGSNVFQTRAGCLIGAEHVNNSYECDIPIGAGICASYQTQTNSPRRARSVASQSIIAYTMSLGAENSVAYSNNSCAIPTNFTISVTTEILPVSMTKTSVDCTMYICGDSTECSNLLLQYGSFCTQLNRALTGIAVEQDKNTQEVFAQVKQIYKTPPIKDFGGFNFSQILPDPSKPSKRSFIEDLLFNKVTLADAGFIKQYGDCLGDIAARDLICAQKFNGLTVLPPLLTDEMIAQYTSALLAGTITSGWTFGAGAALQIPFAMQMAYRFNGIGVTQNVLYENQKLIANQFNSAIGKIQDSLSSTASALGKLQDVVNQNAQALNTLVKQLSSNFGAISSVLNDILSRLDKVEAEVQIDRLITGRLQSLQTYVTQQLIRAAEIRASANLAATKMSECVLGQSKRVDFCGKGYHLMSFPQSAPHGVVFLHVTYVPAQEKNFTCAPAICHDGKAHFPREGVFVSNGTHWFVTQRNFYEPQIITTDNTFVSGNCDVVIGIVNNTVYDPLQPELDSGGSGYIPEAPRDGQAYVRKDGEWVLLSTFL

SEQ ID NO: 10037 - protein, 1177 aa, Artificial Sequence
  SARS-CoV-2/Portugal/PT0035/2020__EPI_ISL_418020 spike protein (1-1147)(I712C_T1077C) Foldon construct
MFVFLVLLPLVSSQCVNLTTRTQLPPAYTNSFTRGVYYPDKVFRSSVLHSTQDLFLPFFSNVTWFHAIHVSGTNGTKRFDNPVLPFNDGVYFASTEKSNIIRGWIFGTTLDSKTQSLLIVNNATNVVIKVCEFQFCNDPFLGVYYHKNNKSWMESEFRVYSSANNCTFEYVSQPFLMDLEGKQGNFKNLREFVFKNIDGYFKIYSKHTPINLVRDLPQGFSALEPLVDLPIGINITRFQTLLALHRSYLTPGDSSSGWTAGAAAYYVGYLQPRTFLLKYNENGTITDAVDCALDPLSETKCTLKSFTVEKGIYQTSNFRVQPTESIVRFPNITNLCPFGEVFNATRFASVYAWNRKRISNCVADYSVLYNSASFSTFKCYGVSPTKLNDLCFTNVYADSFVIRGDEVRQIAPGQTGKIADYNYKLPDDFTGCVIAWNSNNLDSKVGGNYNYLYRLFRKSNLKPFERDISTEIYQAGSTPCNGVEGFNCYFPLQSYGFQPTNGVGYQPYRVVVLSFELLHAPATVCGPKKSTNLVKNKCVNFNFNGLTGTGVLTESNKKFLPFQQFGRDIADTTDAVRDPQTLEILDITPCSFGGVSVITPGTNTSNQVAVLYQDVNCTEVPVAIHADQLTPTWRVYSTGSNVFQTRAGCLIGAEHVNNSYECDIPIGAGICASYQTQTNSPRRARSVASQSIIAYTMSLGAENSVAYSNNSCAIPTNFTISVTTEILPVSMTKTSVDCTMYICGDSTECSNLLLQYGSFCTQLNRALTGIAVEQDKNTQEVFAQVKQIYKTPPIKDFGGFNFSQILPDPSKPSKRSFIEDLLFNKVTLADAGFIKQYGDCLGDISARDLICAQKFNGLTVLPPLLTDEMIAQYTSALLAGTITSGWTFGAGAALQIPFAMQMAYRFNGIGVTQNVLYENQKLIANQFNSAIGKIQDSLSSTASALGKLQDVVNQNAQALNTLVKQLSSNFGAISSVLNDILSRLDKVEAEVQIDRLITGRLQSLQTYVTQQLIRAAEIRASANLAATKMSECVLGQSKRVDFCGKGYHLMSFPQSAPHGVVFLHVTYVPAQEKNFTCAPAICHDGKAHFPREGVFVSNGTHWFVTQRNFYEPQIITTDNTFVSGNCDVVIGIVNNTVYDPLQPELDSGGSGYIPEAPRDGQAYVRKDGEWVLLSTFL

SEQ ID NO: 10038 - protein, 1177 aa, Artificial Sequence
  SARS-CoV-2/USA/NY-NYUMC7/2020__EPI_ISL_418192 spike protein (1-1147)(I712C_T1077C) Foldon construct
MFVFLVLLPLVSSQCVNLTTRTQLPPAYTNSFTRGVYYPDKVFRSSVLHSTQDLFLPFFSNVTWFHAIHVSGTNGTKRFDNPVLPFNDGVYFASTEKSNIIRGWIFGTTLDSKTQSLLIVNNATNVVIKVCEFQFCNDPFLGVYHHKNNKSWMESEFRVYSSANNCTFEYVSQPFLMDLEGKQGNFKNLREFVFKNIDGYFKIYSKHTPINLVRDLPQGFSALEPLVDLPIGINITRFQTLLALHRSYLTPGDSSSGWTAGAAAYYVGYLQPRTFLLKYNENGTITDAVDCALDPLSETKCTLKSFTVEKGIYQTSNFRVQPTESIVRFPNITNLCPFGEVFNATRFASVYAWNRKRISNCVADYSVLYNSASFSTFKCYGVSPTKLNDLCFTNVYADSFVIRGDEVRQIAPGQTGKIADYNYKLPDDFTGCVIAWNSNNLDSKVGGNYNYLYRLFRKSNLKPFERDISTEIYQAGSTPCNGVEGFNCYFPLQSYGFQPTNGVGYQPYRVVVLSFELLHAPATVCGPKKSTNLVKNKCVNFNFNGLTGTGVLTESNKKFLPFQQFGRDIADTTDAVRDPQTLEILDITPCSFGGVSVITPGTNTSNQVAVLYQGVNCTEVPVAIHADQLTPTWRVYSTGSNVFQTRAGCLIGAEHVNNSYECDIPIGAGICASYQTQTNSPRRARSVASQSIIAYTMSLGAENSVAYSNNSCAIPTNFTISVTTEILPVSMTKTSVDCTMYICGDSTECSNLLLQYGSFCTQLNRALTGIAVEQDKNTQEVFAQVKQIYKTPPIKDFGGFNFSQILPDPSKPSKRSFIEDLLFNKVTLADAGFIKQYGDCLGDIAARDLICAQKFNGLTVLPPLLTDEMIAQYTSALLAGTITSGWTFGAGAALQIPFAMQMAYRFNGIGVTQNVLYENQKLIANQFNSAIGKIQDSLSSTASALGKLQDVVNQNAQALNTLVKQLSSNFGAISSVLNDILSRLDKVEAEVQIDRLITGRLQSLQTYVTQQLIRAAEIRASANLAATKMSECVLGQSKRVDFCGKGYHLMSFPQSAPHGVVFLHVTYVPAQEKNFTCAPAICHDGKAHFPREGVFVSNGTHWFVTQRNFYEPQIITTDNTFVSGNCDVVIGIVNNTVYDPLQPELDSGGSGYIPEAPRDGQAYVRKDGEWVLLSTFL

SEQ ID NO: 10039 - protein, 1177 aa, Artificial Sequence
  SARS-CoV-2/Iceland/189/2020__EPI_ISL_417709 spike protein (1-1147)(I712C_T1077C) Foldon construct
MFVFLVLLPLVSSQCVNLTTRTQLPPAYTNSFTRGVYYPDKVFRSSVLHSTQDLFLPFFSNVTWFHAIHVSGTNGTKRFDNPVLPFNDGVYFASTEKSNIIRGWIFGTTLDSKTQSLLIVNNATNVVIKVCEFQFCNDPFLGVYYHKNNKSWMESEFRVYSSANNCTFEYVSQPFLMDLEGKQGNFKNLREFVFKNIDGYFKIYSKHTPINLVRDLPQGFSALEPLVDLPIGINITRFQTLLALHRSYLTPGDSSSGWTAGAAAYYVGYLQPRTFLLKYNENGTITDAVDCALDPLSETKCTLKSFTVEKGIYQTSNFRVQPTESIVRFPNITNLCPFGEVFNATRFASVYAWNRKRISNCVADYSVLYNSASFSTFKCYGVSPTKLNDLCFTNVYADSFVIRGDEVRQIAPGQTGKIADYNYKLPDDFTGCVIAWNSNNLDSKVGGNYNYLYRLFRKSNLKPFERDISTEIYQAGSTPCNGVEGFNCYFPLQSYGFQPTNGVGYQPYRVVVLSFELLHAPATVCGPKKSTNLVKNKCVNFNFNGLTGTGVLTESNKKFLPFQQFGRDIADTTDAVRDPQTLEILDITPCSFGGVSVITPGTNTSNQVAVLYQGVNCTEVPVAIHADQLTPTWRVYSTGSNVFQTRAGCLIGAEHVNNSYECDIPIGAGICASYQTQTNSPRRARSVASQSIIAYTMSLGAENSVAYSNNSCAIPTNFTISVTTEILPVSMTKTSVDCTMYICGDSTECSNLLLQYGSFCTQLNRALTGIAVEQDKNTQEVFAQVKQIYKTPPIKDFGGFNFSQILPDPSKPSKRSFIEDLLFNKVTLADAGFTKQYGDCLGDIAARDLICAQKFNGLTVLPPLLTDEMIAQYTSALLAGTITSGWTFGAGAALQIPFAMQMAYRFNGIGVTQNVLYENQKLIANQFNSAIGKIQDSLSSTASALGKLQDVVNQNAQALNTLVKQLSSNFGAISSVLNDILSRLDKVEAEVQIDRLITGRLQSLQTYVTQQLIRAAEIRASANLAATKMSECVLGQSKRVDFCGKGYHLMSFPQSAPHGVVFLHVTYVPAQEKNFTCAPAICHDGKAHFPREGVFVSNGTHWFVTQRNFYEPQIITTDNTFVSGNCDVVIGIVNNTVYDPLQPELDSGGSGYIPEAPRDGQAYVRKDGEWVLLSTFL

SEQ ID NO: 10040 - protein, 1177 aa, Artificial Sequence
  SARS-CoV-2/Australia/NSW56/2020__EPI_ISL_417408 spike protein (1-1147)(I712C_T1077C) Foldon construct
MFVFLVLLPLVSSQCVNLTTRTQLPPAYTNSFTRGVYYPDKVFRSSVLHSTQDLFLPFFSNVTWFHAIHVSGTNGTKRFDNPVLPFNDGVYFASTEKSNIIRGWIFGTTLDSKTQSLLIVNNATNVVIKVCEFQFCNDPFLGVYYHKNNKSWMESEFRVYSSANNCTFEYVSQPFLMDLEGKQGNFKNLREFVFKNIDGYFKIYSKHTPINLVRDLPQGFSALEPLVDLPIGINITRFQTLLALHRSYLTPGDSSSGWTAGAAAYYVGYLQPRTFLLKYNENGTITDAVDCALDPLSETKCTLKSFTVEKGIYQTSNFRVQPTESIVRFPNITNLCPFGEVFNATRFASVYAWNRKRISNCVADYSVLYNSASFSTFKCYGVSPTKLNDLCFTNVYADSFVIRGDEVRQIAPGQTGKIADYNYKLPDDFTGCVIAWNSNNLDSKVGGNYNYLYRLFRKSNLKPFERDISTEIYQAGSTPCNGVEGFNCYFPLQSYGFQPTNGVGYQPYRVVVLSFELLHAPATVCGPKKSTNLVKNKCVNFNFNGLTGTGVLTESNKKFLPFQQFGRDIADTTDAVRDPQTLEILDITPCSFGGVSVITPGTNTSNQVAVLYQDVNCTEVPVAIHADQLTPTWRVYSTGSNVFQTRAGCLIGAEHVNNSYECDIPIGAGICASYQTQTNSPRRARSVASQSIIAYTMSLGAENSVAYSNNSCAIPTNFTISVTTEILPVSMTKTSVDCTMYICGDSTECSNLLLQYGSFCTQLNRALTGIAVEQDKNTQEVFAQVKQIYKTPPIKDFGGFNFSQILPDSSKPSKRSFIEDLLFNKVTLADAGFIKQYGDCLGDIAARDLICAQKFNGLTVLPPLLTDEMIAQYTSALLAGTITSGWTFGAGAALQIPFAMQMAYRFNGIGVTQNVLYENQKLIANQFNSAIGKIQDSLSSTASALGKLQDVVNQNAQALNTLVKQLSSNFGAISSVLNDILSRLDKVEAEVQIDRLITGRLQSLQTYVTQQLIRAAEIRASANLAATKMSECVLGQSKRVDFCGKGYHLMSFPQSAPHGVVFLHVTYVPAQEKNFTCAPAICHDGKAHFPREGVFVSNGTHWFVTQRNFYEPQIITTDNTFVSGNCDVVIGIVNNTVYDPLQPELDSGGSGYIPEAPRDGQAYVRKDGEWVLLSTFL

SEQ ID NO: 10041 - protein, 1177 aa, Artificial Sequence
  SARS-CoV-2/Iceland/280/2020__EPI_ISL_417608 spike protein (1-1147)(I712C_T1077C) Foldon construct
MFVFLVLLPLVSSQCVNLTTRTQLPPAYTNSFTRGVYYPDKVFRSSVLHSTQDLFLPFFSNVTWFHAIHVSGTNGTKRFDNPVLPFNDGVYFASTEKSNIIRGWIFGTTLDSKTQSLLIVNNATNVVIKVCEFQFCNDPFLGVYYHKNNKSWMESEFRVYSSANNCTFEYVSQPFLMDLEGKQGNFKNLREFVFKNIDGYFKIYSKHTPINLVRDLPQGFSALEPLVDLPIGINITRFQTLLALHRSYLTPGDSSSGWTAGAAAYYVGYLQPRTFLLKYNENGTITDAVDCALDPLSETKCTLKSFTVEKGIYQTSNFRVQPTESIVRFPNITNLCPFGEVFNATRFASVYAWNRKRISNCVADYSVLYNSASFSTFKCYGVSPTKLNDLCFTNVYADSFVIRGDEVRQIAPGQTGKIADYNYKLPDDFTGCVIAWNSNNLDSKVGGNYNYLYRLFRKSNLKPFERDISTEIYQAGSTPCNGVEGFNCYFPLQSYGFQPTNGVGYQPYRVVVLSFELLHAPATVCGPKKSTNLVKNKCVNFNFNGLTGTGVLTESNKKFLPFQQFGRDIADTTDAVRDPQTLEILDITPCSFGGVSVITPGTNTSNQVAVLYQGVNCTEVPVAIHADQLTPTWRVYSTGSNVFQTRAGCLIGAEHVNNSYECDIPIGAGICASYHTQTNSPRRARSVASQSIIAYTMSLGAENSVAYSNNSCAIPTNFTISVTTEILPVSMTKTSVDCTMYICGDSTECSNLLLQYGSFCTQLNRALTGIAVEQDKNTQEVFAQVKQIYKTPPIKDFGGFNFSQILPDPSKPSKRSFIEDLLFNKVTLADAGFIKQYGDCLGDIAARDLICAQKFNGLTVLPPLLTDEMIAQYTSALLAGTITSGWTFGAGAALQIPFAMQMAYRFNGIGVTQNVLYENQKLIANQFNSAIGKIQDSLSSTASALGKLQDVVNQNAQALNTLVKQLSSNFGAISSVLNDILSRLDKVEAEVQIDRLITGRLQSLQTYVTQQLIRAAEIRASANLAATKMSECVLGQSKRVDFCGKGYHLMSFPQSAPHGVVFLHVTYVPAQEKNFTCAPAICHDGKAHFPREGVFVSNGTHWFVTQRNFYEPQIITTDNTFVSGNCDVVIGIVNNTVYDPLQPELDSGGSGYIPEAPRDGQAYVRKDGEWVLLSTFL

SEQ ID NO: 10042 - protein, 1177 aa, Artificial Sequence; identical to SEQ ID NO: 9997
  SARS-CoV-2/Iceland/247/2020__EPI_ISL_417575 spike protein (1-1147)(I712C_T1077C) Foldon construct

SEQ ID NO: 10043 - protein, 1177 aa, Artificial Sequence
  SARS-CoV-2/Iceland/238/2020__EPI_ISL_417566 spike protein (1-1147)(I712C_T1077C) Foldon construct
MFVFLVLLPLVSSQCVNLTTRTQLPPAYTNSFTRGVYYPDKVFRSSVLHSTQDLFLPFFSNVTWFHAIHVSGTNGTKRFDNPVLPFNDGVYFASTEKSNIIRGWIFGTTLDSKTQSLLIVNNATNVVIKVCEFQFCNDPFLGVYYHKNNKSWMESEFRVYSSANNCTFEYVSQPFLMDLEGKQGNFKNLREFVFKNIDGYFKIYSKHTPINLVRDLPQGFSALEPLVDLPIGINITRFQTLLALHRSYLTPGDSSSGWTAGAAAYYVGYLQPRTFLLKYNENGTITDAVDCALDPLSETKCTLKSFTVEKGIYQTSNFRVQPTESIVRFPNITNLCPFGEVFNATRFASVYAWNRKRISNCVADYSVLYNSASFSTFKCYGVSPTKLNDLCFTNVYADSFVIRGDEVRQIAPGQTGKIADYNYKLPDDFTGCVIAWNSNNLDSKVGGNYNYLYRLFRKSNLKPFERDISTEIYQAGSTPCNGVEGFNCYFPLQSYGFQPTNGVGYQPYRVVVLSFELLHAPATVCGPKKSTNLVKNKCVNFNFNGLTGTGVLTESNKKFLPFQQFGRDIADTTDAVRDPQTLEILDITPCSFGGVSVITPGTNTSNQVAVLYQGVNCTEVPVAIHADQLTPTWRVYSTGSNVFQTRAGCLIGAEHVNNSYECDIPIGAGICASYQTQTNSPRRARSVASQSIIAYTMSLGAENSVAYSNNSCAIPTNFTISVTTEILPVSMTKTSVDCTMYICGDSTECSNLLLQYGSFCTQLNRALTGIAVEQDKNTQEVFAQVKQIYKTPPIKDFGGFNFSQILPDPSKPSKRSFIEDLLFNKVTLADVGFIKQYGDCLGDIAARDLICAQKFNGLTVLPPLLTDEMIAQYTSALLAGTITSGWTFGAGAALQIPFAMQMAYRFNGIGVTQNVLYENQKLIANQFNSAIGKIQDSLSSTASALGKLQDVVNQNAQALNTLVKQLSSNFGAISSVLNDILSRLDKVEAEVQIDRLITGRLQSLQTYVTQQLIRAAEIRASANLAATKMSECVLGQSKRVDFCGKGYHLMSFPQSAPHGVVFLHVTYVPAQEKNFTCAPAICHDGKAHFPREGVFVSNGTHWFVTQRNFYEPQIITTDNTFVSGNCDVVIGIVNNTVYDPLQPELDSGGSGYIPEAPRDGQAYVRKDGEWVLLSTFL

SEQ ID NO: 10044 - protein, 1177 aa, Artificial Sequence
  SARS-CoV-2/Greece/16/2020__EPI_ISL_418265 spike protein (1-1147)(I712C_T1077C) Foldon construct
MFVFLVLLPLVSSQCVNLTTRTQLPPAYTNSFTRGVYYPDKVFRSSVLHSTQDLFLPFFSNVTWFHAIHVSGTNGTKRFDNPVLPFNDGVYFASTEKSNIIRGWIFGTTLDSKTQSLLIVNNATNVVIKVCEFQFCNDPFLGVYYHKNNKSWMESEFRVYSSANNCTFEYVSQPFLMDLEGKQGNFKNLREFVFKNVDGYFKIYSKHTPINLVRDLPQGFSALEPLVDLPIGINITRFQTLLALHRSYLTPGDSSSGWTAGAAAYYVGYLQPRTFLLKYNENGTITDAVDCALDPLSETKCTLKSFTVEKGIYQTSNFRVQPTESIVRFPNITNLCPFGEVFNATRFASVYAWNRKRISNCVADYSVLYNSASFSTFKCYGVSPTKLNDLCFTNVYADSFVIRGDEVRQIAPGQTGKIADYNYKLPDDFTGCVIAWNSNNLDSKVGGNYNYLYRLFRKSNLKPFERDISTEIYQAGSTPCNGVEGFNCYFPLQSYGFQPTNGVGYQPYRVVVLSFELLHAPATVCGPKKSTNLVKNKCVNFNFNGLTGTGVLTESNKKFLPFQQFGRDIADTTDAVRDPQTLEILDITPCSFGGVSVITPGTNTSNQVAVLYQDVNCTEVPVAIHADQLTPTWRVYSTGSNVFQTRAGCLIGAEHVNNSYECDIPIGAGICASYQTQTNSPRRARSVASQSIIAYTMSLGAENSVAYSNNSCAIPTNFTISVTTEILPVSMTKTSVDCTMYICGDSTECSNLLLQYGSFCTQLNRALTGIAVEQDKNTQEVFAQVKQIYKTPPIKDFGGFNFSQILPDPSKPSKRSFIEDLLFNKVTLADAGFIKQYGDCLGDIAARDLICAQKFNGLTVLPPLLTDEMIAQYTSALLAGTITSGWTFGAGAALQIPFAMQMAYRFNGIGVTQNVLYENQKLIANQFNSAIGKIQDSLSSTASALGKLQDVVNQNAQALNTLVKQLSSNFGAISSVLNDILSRLDKVEAEVQIDRLITGRLQSLQTYVTQQLIRAAEIRASANLAATKMSECVLGQSKRVDFCGKGYHLMSFPQSAPHGVVFLHVTYVPAQEKNFTCAPAICHDGKAHFPREGVFVSNGTHWFVTQRNFYEPQIITTDNTFVSGNCDVVIGIVNNTVYDPLQPELDSGGSGYIPEAPRDGQAYVRKDGEWVLLSTFL

SEQ ID NO: 10045 - protein, 1177 aa, Artificial Sequence
  SARS-CoV-2/Iceland/319/2020__EPI_ISL_417648 spike protein (1-1147)(I712C_T1077C) Foldon construct
MFVFLVLLPLVSSQCVNLTTRTQLPPAYTNSFTRGVYYPDKVFRSSVLHSTQDLFLPFFSNVTWFHAIHVSGTNGTKRFDNPVLPFNDGVYFASTEKSNIIRGWIFGTTLDSKTQSLLIVNNATNVVIKVCEFQFCNDPFLGVYYHKNNKSWMESEFRVYSSANNCTFEYVSQPFLIDLEGKQGNFKNLREFVFKNIDGYFKIYSKHTPINLVRDLPQGFSALEPLVDLPIGINITRFQTLLALHRSYLTPGDSSSGWTAGAAAYYVGYLQPRTFLLKYNENGTITDAVDCALDPLSETKCTLKSFTVEKGIYQTSNFRVQPTESIVRFPNITNLCPFGEVFNATRFASVYAWNRKRISNCVADYSVLYNSASFSTFKCYGVSPTKLNDLCFTNVYADSFVIRGDEVRQIAPGQTGKIADYNYKLPDDFTGCVIAWNSNNLDSKVGGNYNYLYRLFRKSNLKPFERDISTEIYQAGSTPCNGVEGFNCYFPLQSYGFQPTNGVGYQPYRVVVLSFELLHAPATVCGPKKSTNLVKNKCVNFNFNGLTGTGVLTESNKKFLPFQQFGRDIADTTDAVRDPQTLEILDITPCSFGGVSVITPGTNTSNQVAVLYQGVNCTEVPVAIHADQLTPTWRVYSTGSNVFQTRAGCLIGAEHVNNSYECDIPIGAGICASYQTQTNSPRRARSVASQSIIAYTMSLGAENSVAYSNNSCAIPTNFTISVTTEILPVSMTKTSVDCTMYICGDSTECSNLLLQYGSFCTQLNRALTGIAVEQDKNTQEVFAQVKQIYKTPPIKDFGGFNFSQILPDPSKPSKRSFIEDLLFNKVTLADAGFIKQYGDCLGDIAARDLICAQKFNGLTVLPPLLTDEMIAQYTSALLAGTITSGWTFGAGAALQIPFAMQMAYRFNGIGVTQNVLYENQKLIANQFNSAIGKIQDSLSSTASALGKLQDVVNQNAQALNTLVKQLSSNFGAISSVLNDILSRLDKVEAEVQIDRLITGRLQSLQTYVTQQLIRAAEIRASANLAATKMSECVLGQSKRVDFCGKGYHLMSFPQSAPHGVVFLHVTYVPAQEKNFTCAPAICHDGKAHFPREGVFVSNGTHWFVTQRNFYEPQIITTDNTFVSGNCDVVIGIVNNTVYDPLQPELDSGGSGYIPEAPRDGQAYVRKDGEWVLLSTFL

SEQ ID NO: 10046 - protein, 1177 aa, Artificial Sequence
  SARS-CoV-2/Congo/94/2020__EPI_ISL_417947 spike protein (1-1147)(I712C_T1077C) Foldon construct
MFVFLVLLPLVSSQCVNLTTRTQLPPAYTNSFTRGVYYPDKVFRSSVLHSTQDLFLPFFSNVTWFHAIHVSGTNGTKRFDNPVLPFNDGVYFASTEKSNIIRGWIFGTTLDSKTQSLLIVNNATNVVIKVCEFQFCNDPFLGVYYHKNNKSWMESEFRVYSSANNCTFEYVSQPFLMDLEGKQGNFKNLREFVFKNIDGYFKIYSKHTPINLVRDLPQGFSALEPLVDLPIGINITRFQTLLALHRSYLTPGDSSSGWTAGAAAYYVGYLQPRTFLLKYNENGTITDAVDCALDPLSETKCTLKSFTVEKGIYQTSNFRVQPTESIVRFPNITNLCPFGEVFNATRFASVYAWNRKRISNCVADYSVLYNSASFSTFKCYGVSPTKLNDLCFTNVYADSFVIRGDEVRQIAPGQTGKIADYNYKLPDDFTGCVIAWNSNNLDSKVGGNYNYLYRLFRKSNLKPFERDISTEIYQAGSTPCNGVEGFNCYFPLQSYGFQPTNGVGYQPYRVVVLSFELLHAPATVCGPKKSTNLVKNKCVNFNFNGLTGTGVLTESNKKFLPFQQFGRDIADTTDAVRDPQTLEILDITPCSFGGVSVITPGTNTSNQVAVLYQGVNCTEVPVAIHADQLTPTWRVYSTGSNVFQTRAGCLIGAEHVNNSYECDIPIGAGICASYQTQTNSPRRARSVASQSIIAYTMSLGAENSVAYSNNSCAIPTNFTISVTTEILPVSMTKTSVDCTMYICGDSTECSNLLLQYGSFCTQLNRALTGIAVEQDKNTQEVFAQVKQIYKTPPIKDFGGFNFSQILPDPSKPSKRSFIEDILFNKVTLADAGFIKQYGDCLGDIAARDLICAQKFNGLTVLPPLLTDEMIAQYTSALLAGTITSGWTFGAGAALQIPFAMQMAYRFNGIGVTQNVLYENQKLIANQFNSAIGKIQDSLSSTASALGKLQDVVNQNAQALNTLVKQLSSNFGAISSVLNDILSRLDKVEAEVQIDRLITGRLQSLQTYVTQQLIRAAEIRASANLAATKMSECVLGQSKRVDFCGKGYHLMSFPQSAPHGVVFLHVTYVPAQEKNFTCAPAICHDGKAHFPREGVFVSNGTHWFVTQRNFYEPQIITTDNTFVSGNCDVVIGIVNNTVYDPLQPELDSGGSGYIPEAPRDGQAYVRKDGEWVLLSTFL

SEQ ID NO: 10047 - protein, 1177 aa, Artificial Sequence
  SARS-CoV-2/Congo/158/2020__EPI_ISL_417950 spike protein (1-1147)(I712C_T1077C) Foldon construct
MFVFLVLLPLVSSQCVNLTTRTQLPPAYTNSFTRGVYYPDKVFRSSVLHSTQDLFLPFFSNVTWFHAIHVSGTNGTKRFDNPVLPFNDGVYFASTEKSNIIRGWIFGTTLDSKTQSLLIVNNATNVVIKVCEFQFCNDPFLGVYYHKNNKSWMESEFRVYSSANNCTFEYVSQPFLMDLEGKQGNFKNLREFVFKNIDGYFKIYSKHTPINLVRDLPQGFSALEPLVDLPIGINITRFQTLLALHRSYLTPGDSSSGWTAGAAAYYVGYLQPRTFLLKYNENGTITDAVDCALDPLSETKCTLKSFTVEKGIYQTSNFRVQPTESIVRFPNITNLCPFGEVFNATRFASVYAWNRKRISNCVADYSVLYNSASFSTFKCYGVSPTKLNDLCFTNVYADSFVIRGDEVRQIAPGQTGKIADYNYKLPDDFTGCVIAWNSNNLDSKVGGNYNYLYRLFRKSNLKPFERDISTEIYQAGSTPCNGVEGFNCYFPLQSYGFQPTNGVGYQPYRVVVLSFELLHAPATVCGPKKSTNLVKNKCVNFNFNGLTGTGVLTESNKKFLPFQQFGRDIADTTDAVRDPQTLEILDITPCSFGGVSVITPGTNTSNQVAVLYQDVNCTEVPVAIHADQLTPTWRVYSTGSNVFQTRAGCLIGAEHVNNSYECDIPIGAGICASYQTQTNSPRRARSVASQSIIAYTMSLGAENSVAYSNNSCAIPTNFTISVTTEILPVSMTKTSVDCTMYICGDSTECSNLLLQYGSFCTQLNRALTGIAVEQDKNTQEVFAQVKQIYKTPPIKDFGGFNFSQILPDPSKPSKRSFIEDLLFNKVTLADAGFIKQYGDCLGDIAARDLICAQKFNGLTVLPPLLTDEMIAQYTSALLAGTITSGWTFGAGAALQIPFAMQMAYRFNGIGVTQNVLYENQKLIANQFNSAIGKIQDSLSSTASALGKLQDVVNQNAQALNTLVKQLSSNFGAISSVLNDILSRLDKVEAEVQIDRLITGRLQSLQTYVTQQLIRAAEIRASANLAATKMSECVLGQSKRVDFCGKGYHLMSFPQSAPHGVVFLHVTYVPAQEKNFTCAPAICHDGKAHFPREGVFVSNGTHWFVTQRNFYEPQIITTDNTFLSGNCDVVIGIVNNTVYDPLQPELDSGGSGYIPEAPRDGQAYVRKDGEWVLLSTFL

SEQ ID NO: 10048 - protein, 1177 aa, Artificial Sequence
  SARS-CoV-2/USA/UT-00034/2020__EPI_ISL_417977 spike protein (1-1147)(I712C_T1077C) Foldon construct
MFVFLVLLPLVSSQCVNLTTRTQLPPAYTNSFTRGVYYPDKVFRSSVLHSTQDLFLPFFSNVTWFHAIHVSGTNGTKRFDNPVLPFNDGVYFASTEKSNIIRGWIFGTTLDSKTQSLLIVNNATNVVIKVCEFQFCNDPFLGVYYYKNNKSWMESEFRVYSSANNCTFEYVSQPFLMDLEGKQGNFKNLREFVFKNIDGYFKIYSKHTPINLVRDLPQGFSALEPLVDLPIGINITRFQTLLALHRSYLTPGDSSSGWTAGAAAYYVGYLQPRTFLLKYNENGTITDAVDCALDPLSETKCTLKSFTVEKGIYQTSNFRVQPTESIVRFPNITNLCPFGEVFNATRFASVYAWNRKRISNCVADYSVLYNSASFSTFKCYGVSPTKLNDLCFTNVYADSFVIRGDEVRQIAPGQTGKIADYNYKLPDDFTGCVIAWNSNNLDSKVGGNYNYLYRLFRKSNLKPFERDISTEIYQAGSTPCNGVEGFNCYFPLQSYGFQPTNGVGYQPYRVVVLSFELLHAPATVCGPKKSTNLVKNKCVNFNFNGLTGTGVLTESNKKFLPFQQFGRDIADTTDAVRDPQTLEILDITPCSFGGVSVITPGTNTSNQVAVLYQGVNCTEVPVAIHADQLTPTWRVYSTGSNVFQTRAGCLIGAEHVNNSYECDIPIGAGICASYQTQTNSPRRARSVASQSIIAYTMSLGAENSVAYSNNSCAIPTNFTISVTTEILPVSMTKTSVDCTMYICGDSTECSNLLLQYGSFCTQLNRALTGIAVEQDKNTQEVFAQVKQIYKTPPIKDFGGFNFSQILPDPSKPSKRSFIEDLLFNKVTLADAGFIKQYGDCLGDIAARDLICAQKFNGLTVLPPLLTDEMIAQYTSALLAGTITSGWTFGAGAALQIPFAMQMAYRFNGIGVTQNVLYENQKLIANQFNSAIGKIQDSLSSTASALGKLQDVVNQNAQALNTLVKQLSSNFGAISSVLNDILSRLDKVEAEVQIDRLITGRLQSLQTYVTQQLIRAAEIRASANLAATKMSECVLGQSKRVDFCGKGYHLMSFPQSAPHGVVFLHVTYVPAQEKNFTCAPAICHDGKAHFPREGVFVSNGTHWFVTQRNFYEPQIITTDNTFVSGNCDVVIGIVNNTVYDPLQPELDSGGSGYIPEAPRDGQAYVRKDGEWVLLSTFL

SEQ ID NO: 10049 - protein, 1177 aa, Artificial Sequence
  SARS-CoV-2/USA/UT-00033/2020__EPI_ISL_417976 spike protein (1-1147)(I712C_T1077C) Foldon construct
MFVFLVLLPLVSSQCVNLTTRTQLPPAYTNSFTRGVYYPDKVFRSSVLHSTQDLFLPFFSNVTWFHAIHVSGTNGTKRFDNPVLPFNDGVYFASTEKSNIIRGWIFGTTLDSKTQSLLIVNNATNVVIKVCEFQFCNDPFLGVYYHKNNKSWMESEFRVYSSANNCTFEYVSQPFLMDLEGKQGNFKNLREFVFKNIDGYFKIYSKHTPINLVRDLPQGFSALEPLVDLPIGINITRFQTLLALHRSYLTPGDSSSGLTAGAAAYYVGYLQPRTFLLKYNENGTITDAVDCALDPLSETKCTLKSFTVEKGIYQTSNFRVQPTESIVRFPNITNLCPFGEVFNATRFASVYAWNRKRISNCVADYSVLYNSASFSTFKCYGVSPTKLNDLCFTNVYADSFVIRGDEVRQIAPGQTGKIADYNYKLPDDFTGCVIAWNSNNLDSKVGGNYNYLYRLFRKSNLKPFERDISTEIYQAGSTPCNGVEGFNCYFPLQSYGFQPTNGVGYQPYRVVVLSFELLHAPATVCGPKKSTNLVKNKCVNFNFNGLTGTGVLTESNKKFLPFQQFGRDIADTTDAVRDPQTLEILDITPCSFGGVSVITPGTNTSNQVAVLYQGVNCTEVPVAIHADQLTPTWRVYSTGSNVFQTRAGCLIGAEHVNNSYECDIPIGAGICASYQTQTNSPRRARSVASQSIIAYTMSLGAENSVAYSNNSCAIPTNFTISVTTEILPVSMTKTSVDCTMYICGDSTECSNLLLQYGSFCTQLNRALTGIAVEQDKNTQEVFAQVKQIYKTPPIKDFGGFNFSQILPDPSKPSKRSFIEDLLFNKVTLADAGFIKQYGDCLGDIAARDLICAQKFNGLTVLPPLLTDEMIAQYTSALLAGTITSGWTFGAGAALQIPFAMQMAYRFNGIGVTQNVLYENQKLIANQFNSAIGKIQDSLSSTASALGKLQDVVNQNAQALNTLVKQLSSNFGAISSVLNDILSRLDKVEAEVQIDRLITGRLQSLQTYVTQQLIRAAEIRASANLAATKMSECVLGQSKRVDFCGKGYHLMSFPQSAPHGVVFLHVTYVPAQEKNFTCAPAICHDGKAHFPREGVFVSNGTHWFVTQRNFYEPQIITTDNTFVSGNCDVVIGIVNNTVYDPLQPELDSGGSGYIPEAPRDGQAYVRKDGEWVLLSTFL

SEQ ID NO: 10050 - protein, 1177 aa, Artificial Sequence
  SARS-CoV-2/USA/WI-13/2020__EPI_ISL_417516 spike protein (1-1147)(I712C_T1077C) Foldon construct
MFVFLVLLPLVSSQCVNLTTRTQLPPAYTNSFTRGVYYPDKVFRSSVLHSTQDLFLPFFSNVTWFHAIHVSGTNGTKRFDNPVLPFNDGVYFASTEKSNIIRGWIFGTTLDSKTQSLLIVNNATNVVIKVCEFQFCNDPFLGVYYHKNNKSWMESEFRVYSSANNCTFEYVSQPFLMDLEGKQGNFKNLREFVFKNIDGYFKIYSKHTPINLVRDLPQGFSALEPLVDLPIGINITRFQTLLALHRSYLTPGDSSSGWTAGAAAYYVGYLQPRTFLLKYNENGTITDAVDCALDPLSETKCTLKSFTVEKGIYQTSNFRVLPTESIVRFPNITNLCPFGEVFNATRFASVYAWNRKRISNCVADYSVLYNSASFSTFKCYGVSPTKLNDLCFTNVYADSFVIRGDEVRQIAPGQTGKIADYNYKLPDDFTGCVIAWNSNNLDSKVGGNYNYLYRLFRKSNLKPFERDISTEIYQAGSTPCNGVEGFNCYFPLQSYGFQPTNGVGYQPYRVVVLSFELLHAPATVCGPKKSTNLVKNKCVNFNFNGLTGTGVLTESNKKFLPFQQFGRDIADTTDAVRDPQTLEILDITPCSFGGVSVITPGTNTSNQVAVLYQGVNCTEVPVAIHADQLTPTWRVYSTGSNVFQTRAGCLIGAEHVNNSYECDIPIGAGICASYQTQTNSPRRARSVASQSIIAYTMSLGAENSVAYSNNSCAIPTNFTISVTTEILPVSMTKTSVDCTMYICGDSTECSNLLLQYGSFCTQLNRALTGIAVEQDKNTQEVFAQVKQIYKTPPIKDFGGFNFSQILPDPSKPSKRSFIEDLLFNKVTLADAGFIKQYGDCLGDIAARDLICAQKFNGLTVLPPLLTDEMIAQYTSALLAGTITSGWTFGAGAALQIPFAMQMAYRFNGIGVTQNVLYENQKLIANQFNSAIGKIQDSLSSTASALGKLQDVVNQNAQALNTLVKQLSSNFGAISSVLNDILSRLDKVEAEVQIDRLITGRLQSLQTYVTQQLIRAAEIRASANLAATKMSECVLGQSKRVDFCGKGYHLMSFPQSAPHGVVFLHVTYVPAQEKNFTCAPAICHDGKAHFPREGVFVSNGTHWFVTQRNFYEPQIITTDNTFVSGNCDVVIGIVNNTVYDPLQPELDSGGSGYIPEAPRDGQAYVRKDGEWVLLSTFL

SEQ ID NO: 10051 - protein, 1176 aa, Artificial Sequence
  SARS-CoV-2/India/1-27/2020__EPI_ISL_413522 spike protein (1-1146)(I711C_T1076C) Foldon construct
MFVFLVLLPLVSSQCVNLTTRTQLPPAYTNSFTRGVYYPDKVFRSSVLHSTQDLFLPFFSNVTWFHAIHVSGTNGTKRFDNPVLPFNDGVYFASTEKSNIIRGWIFGTTLDSKTQSLLIVNNATNVVIKVCEFQFCNDPFLGVYHKNNKSWMESEFRVYSSANNCTFEYVSQPFLMDLEGKQGNFKNLREFVFKNIDGYFKIYSKHTPINLVRDLPQGFSALEPLVDLPIGINITRFQTLLALHRSYLTPGDSSSGWTAGAAAYYVGYLQPRTFLLKYNENGTITDAVDCALDPLSETKCTLKSFTVEKGIYQTSNFRVQPTESIVRFPNITNLCPFGEVFNATRFASVYAWNRKRISNCVADYSVLYNSASFSTFKCYGVSPTKLNDLCFTNVYADSFVIRGDEVIQIAPGQTGKIADYNYKLPDDFTGCVIAWNSNNLDSKVGGNYNYLYRLFRKSNLKPFERDISTEIYQAGSTPCNGVEGFNCYFPLQSYGFQPTNGVGYQPYRVVVLSFELLHAPATVCGPKKSTNLVKNKCVNFNFNGLTGTGVLTESNKKFLPFQQFGRDIADTTDAVRDPQTLEILDITPCSFGGVSVITPGTNTSNQVAVLYQDVNCTEVPVAIHADQLTPTWRVYSTGSNVFQTRAGCLIGAEHVNNSYECDIPIGAGICASYQTQTNSPRRARSVASQSIIAYTMSLGAENSVAYSNNSCAIPTNFTISVTTEILPVSMTKTSVDCTMYICGDSTECSNLLLQYGSFCTQLNRALTGIAVEQDKNTQEVFAQVKQIYKTPPIKDFGGFNFSQILPDPSKPSKRSFIEDLLFNKVTLADAGFIKQYGDCLGDIAARDLICAQKFNGLTVLPPLLTDEMIAQYTSALLAGTITSGWTFGAGAALQIPFAMQMAYRFNGIGVTQNVLYENQKLIANQFNSAIGKIQDSLSSTASALGKLQDVVNQNAQALNTLVKQLSSNFGAISSVLNDILSRLDKVEAEVQIDRLITGRLQSLQTYVTQQLIRAAEIRASANLAATKMSECVLGQSKRVDFCGKGYHLMSFPQSAPHGVVFLHVTYVPAQEKNFTCAPAICHDGKAHFPREGVFVSNGTHWFVTQRNFYEPQIITTDNTFVSGNCDVVIGIVNNTVYDPLQPELDSGGSGYIPEAPRDGQAYVRKDGEWVLLSTFL

SEQ ID NO: 10052 - protein, 1171 aa, Artificial Sequence
  SARS-CoV-2/pangolin/Guangxi/P4L/2017__EPI_ISL_410538 spike protein (1-1141)(I706C_T1071C) Foldon construct
MFVFLFVLPLVSSQCVNLTTRTGIPPGYTNSSTRGVYYPDKVFRSSILHLTQDLFLPFFSNVTWFNTINYQGGFKKFDNPVLPFNDGVYFASTEKSNIIRGWIFGTTLDARTQSLLIVNNATNVVIKVCEFQFCTDPFLGVYYHNNNKTWVENEFRVYSSANNCTFEYISQPFLMDLEGKQGNFKNLREFVFKNVDGYFKIYSKHTPIDLVRDLPRGFAALEPLVDLPIGINITRFQTLLALHRSYLTPGNLESGWTTGAAAYYVGYLQQRTFLLSYNQNGTITDAVDCSLDPLSETKCTLKSLTVEKGIYQTSNFRVQPTISIVRFPNITNLCPFGEVFNASKFASVYAWNRKRISNCVADYSVLYNSTSFSTFKCYGVSPTKLNDLCFTNVYADSFVVKGDEVRQIAPGQTGVIADYNYKLPDDFTGCVIAWNSVKQDALTGGNYGYLYRLFRKSKLKPFERDISTEIYQAGSTPCNGQVGLNCYYPLERYGFHPTTGVNYQPFRVVVLSFELLNGPATVCGPKLSTTLVKDKCVNFNFNGLTGTGVLTTSKKQFLPFQQFGRDISDTTDAVRDPQTLEILDITPCSFGGVSVITPGTNTSNQVAVLYQDVNCTEVPMAIHAEQLTPAWRVYSAGANVFQTRAGCLVGAEHVNNSYECDIPVGAGICASYHSMSSLRSVNQRSIIAYTMSLGAENSVAYSNNSCAIPTNFTISVTTEILPVSMTKTSVDCTMYICGDSIECSNLLLQYGSFCTQLNRALTGIAVEQDKNTQEVFAQVKQIYKTPPIKDFGGFNFSQILPDPSKPSKRSFIEDLLFNKVTLADAGFIKQYGDCLGDIAARDLICAQKFNGLTVLPPLLTDEMIAQYTSALLAGTITSGWTFGAGAALQIPFAMQMAYRFNGIGVTQNVLYENQKLIANQFNSAIGKIQDSLSSTASALGKLQDVVNQNAQALNTLVKQLSSNFGAISSVLNDILSRLDKVEAEVQIDRLITGRLQSLQTYVTQQLIRAAEIRASANLAATKMSECVLGQSKRVDFCGKGYHLMSFPQSAPHGVVFLHVTYVPAQEKNFTCAPAICHEGKAHFPREGVFVSNGTHWFITQRNFYEPQIITTDNTFVSGSCDVVIGIVNNTVYDPLQPELDSGGSGYIPEAPRDGQAYVRKDGEWVLLSTFL

SEQ ID NO: 10053 - protein, 1171 aa, Artificial Sequence
  SARS-CoV-2/pangolin/Guangxi/P5L/2017__EPI_ISL_410540 spike protein (1-1141)(I706C_T1071C) Foldon construct
MFVFLFVLPLVSSQCVNLTTRTGIPPGYTNSSTRGVYYPDKVFRSSILHLTQDLFLPFFSNVTWFNTINYQGGFKKFDNPVLPFNDGVYFASTEKSNIIRGWIFGTTLDARTQSLLIVNNATNVVIKVCEFQFCTDPFLGVYYHNNNKTWVENEFRVYSSANNCTFEYISQPFLMDLEGKQGNFKNLREFVFKNVDGYFKIYSKHTPIDLVRDLPRGFAALEPLVDLPIGINITRFQTLLALHRSYLTPGKLESGWTTGAAAYYVGYLQQRTFLLSYNQNGTITDAVDCSLDPLSETKCTLKSLTVEKGIYQTSNFRVQPTISIVRFPNITNLCPFGEVFNASKFASVYAWNRKRISNCVADYSVLYNSTSFSTFKCYGVSPTKLNDLCFTNVYADSFVVKGDEVRQIAPGQTGVIADYNYKLPDDFTGCVIAWNSVKQDALTGGNYGYLYRLFRKSKLKPFERDISTEIYQAGSTPCNGQVGLNCYYPLERYGFHPTTGVNYQPFRVVVLSFELLNGPATVCGPKLSTTLVKDKCVNFNFNGLTGTGVLTTSKKQFLPFQQFGRDISDTTDAVRDPQTLEILDITPCSFGGVSVITPGTNTSNQVAVLYQDVNCTEVPMAIHAEQLTPAWRVYSAGANVFQTRAGCLVGAEHVNNSYECDIPVGAGICASYHSMSSFRSVNQRSIIAYTMSLGAENSVAYSNNSCAIPTNFTISVTTEILPVSMTKTSVDCTMYICGDSIECSNLLLQYGSFCTQLNRALTGIAVEQDKNTQEVFAQVKQIYKTPPIKDFGGFNFSQILPDPSKPSKRSFIEDLLFNKVTLADAGFIKQYGDCLGDIAARDLICAQKFNGLTVLPPLLTDEMIAQYTSALLAGTITSGWTFGAGAALQIPFAMQMAYRFNGIGVTQNVLYENQKLIANQFNSAIGKIQDSLSSTASALGKLQDVVNQNAQALNTLVKQLSSNFGAISSVLNDILSRLDKVEAEVQIDRLITGRLQSLQTYVTQQLIRAAEIRASANLAATKMSECVLGQSKRVDFCGKGYHLMSFPQSAPHGVVFLHVTYVPAQEKNFTCAPAICHEGKAHFPREGVFVSNGTHWFITQRNFYEPQIITTDNTFVSGSCDVVIGIVNNTVYDPLQPELDSGGSGYIPEAPRDGQAYVRKDGEWVLLSTFL

SEQ ID NO: 10054 - protein, 1171 aa, Artificial Sequence
  SARS-CoV-2/pangolin/Guangxi/P5E/2017__EPI_ISL_410541 spike protein (1-1141)(I706C_T1071C) Foldon construct
MFVFLFVLPLVSSQCVNLTTRTGIPPGYTNSSTRGVYYPDKVFRSSILHLTQDLFLPFFSNVTWFNTITYQGGSKKFDNPVLPFNDGVYFASTEKSNIIRGWIFGTTLDARTQSLLIVNNATNVVIKVCEFQFCTDPFLGVYYHNNNKTWVENEFRVYSSANNCTFEYISQPFLMDLEGKQGNFKNLREFVFKNVDGYFKIYSKHTPIDLVRDLPRGFAALEPLVDLPIGINITRFQTLLALHRSYLTPGKLESGWTTGAAAYYVGYLQQRTFLLSYNQNGTITDAVDCSLDPLSETKCTLKSLTVEKGIYQTSNFRVQPTISIVRFPNITNLCPFGEVFNASKFASVYAWNRKRISNCVADYSVLYNSTSFSTFKCYGVSPTKLNDLCFTNVYADSFVVKGDEVRQIAPGQTGVIADYNYKLPDDFTGCVIAWNSVKQDALTGDNYGYLYRLFRKSKLKPFERDISTEIYQAGSTPCNGQVGLNCYYPLERYGFHPTTGVNYQPFRVVVLSFELLNGPATVCGPKLSTTLVKDKCVNFNFNGLTGTGVLTTSKKQFLPFQQFGRDISDTTDAVRDPQTLEILDITPCSFGGVSVITPGTNTSNQVAVLYQDVNCTEVPMAIHAEQLTPAWRVYSAGANVFQTRAGCLVGAEHVNNSYECDIPVGAGICASYHSMSSFRSVNQRSIIAYTMSLGAENSVAYSNNSCAIPTNFTISVTTEILPVSMTKTSVDCTMYICGDSIECSNLLLQYGSFCTQLNRALTGIAVEQDKNTQEVFAQVKQIYKTPPIKDFGGFNFSQILPDPSKPSKRSFIEDLLFNKVTLADAGFIKQYGDCLGDIAARDLICAQKFNGLTVLPPLLTDEMIAQYTSALLAGTITSGWTFGAGAALQIPFAMQMAYRFNGIGVTQNVLYENQKLIANQFNSAIGKIQDSLSSTASALGKLQDVVNQNAQALNTLVKQLSSNFGAISSVLNDILSRLDKVEAEVQIDRLITGRLQSLQTYVTQQLIRAAEIRASANLAATKMSECVLGQSKRVDFCGKGYHLMSFPQSAPHGVVFLHVTYVPAQEKNFTCAPAICHEGKAHFPREGVFVSNGTHWFITQRNFYEPQIITTDNTFVSGSCDVVIGIVNNTVYDPLQPELDSGGSGYIPEAPRDGQAYVRKDGEWVLLSTFL

SEQ ID NO: 10055 - protein, 1169 aa, Artificial Sequence
  SARS-CoV-2/pangolin/Guangxi/P1E/2017__EPI_ISL_410539 spike protein (1-1139)(I704C_T1069C) Foldon construct
MFVFLFVLPLVSSQCVNLTTRTGIQPGYTNSSTRGVYYPDKVFRSSILHLTQDLFLPFFSNVTWFNTINYQGGFKKFDNPVLPFNDGVYFASTEKSNIIRGWIFGTTLDARTQSLLIVNNATNVVIKVCEFQFCTDPFLGVYYHNNNKTWVENEFRVYSSANNCTFEYISQPFLMDLEGKQGNFKNLREFVFKNVDGYFKIYSKHTPIDLVRDLPRGFAALEPLVDLPIGINITRFQTLLALHRSYLTPGKLESGWTTGAAAYYVGYLQQRTFLLSYNQNGTITDAVDCSLDPLSETKCTLKSLTVEKGIYQTSNFRVQPTISIVRFPNITNLCPFGEVFNASKFASVYAWNRKRISNCVADYSVLYNSTSFSTFKCYGVSPTKLNDLCFTNVYADSFVVKGDEVRQIAPGQTGVIADYNYKLPDDFTGCVIAWNSVKQDALTGGNYLYRLFRKSKLKPFERDISTEIYQAGSTPCNGQVGLNCYYPLERYGFHPTTGVNYQPFRVVVLSFELLNGPATVCGPKLSTTLVKDKCVNFNFNGLTGTGVLTTSKKQFLPFQQFGRDISDTTDAVRDPQTLEILDITPCSFGGVSVITPGTNTSNQVAVLYQDVNCTEVPMAIHAEQLTPAWRVYSAGANVFQTRAGCLVGAEHVNNSYECDIPVGAGICASYHSMSSLRSVNQRSIIAYTMSLGAENSVAYSNNSCAIPTNFTISVTTEILPVSMTKTSVDCTMYICGDSIECSNLLLQYGSFCTQLNRALTGIAVEQDKNTQEVFAQVKQIYKTPPIKDFGGFNFSQILPDPSKPSKRSFIEDLLFNKVTLADAGFIKQYGDCLGDIAARDLICAQKFNGLTVLPPLLTDEMIAQYTSALLAGTITSGWTFGAGAALQIPFAMQMAYRFNGIGVTQNVLYENQKLIANQFNSAIGKIQDSLSSTASALGKLQDVVNQNAQALNTLVKQLSSNFGAISSVLNDILSRLDKVEAEVQIDRLITGRLQSLQTYVTQQLIRAAEIRASANLAATKMSECVLGQSKRVDFCGKGYHLMSFPQSAPHGVVFLHVTYVPAQEKNFTCAPAICHEGKAHFPREGVFVSNGTHWFITQRNFYEPQIITTDNTFVSGSCDVVIGIVNNTVYDPLQPELDSGGSGYIPEAPRDGQAYVRKDGEWVLLSTFL

SEQ ID NO: 10056 - protein, 1177 aa, Artificial Sequence
  SARS-CoV-2/Wuhan/WIV05/2019__EPI_ISL_402128 spike protein (1-1147)(I714C_Y1110C) Foldon construct
MFVFLVLLPLVSSQCVNLTTRTQLPPAYTNSFTRGVYYPDKVFRSSVLHSTQDLFLPFFSNVTWFHAIHVSGTNGTKRFDNPVLPFNDGVYFASTEKSNIIRGWIFGTTLDSKTQSLLIVNNATNVVIKVCEFQFCNDPFLGVYYHKNNKSWMESEFRVYSSANNCTFEYVSQPFLMDLEGKQGNFKNLREFVFKNIDGYFKIYSKHTPINLVRDLPQGFSALEPLVDLPIGINITRFQTLLALHRSYLTPGDSSSGWTAGAAAYYVGYLQPRTFLLKYNENGTITDAVDCALDPLSETKCTLKSFTVEKGIYQTSNFRVQPTESIVRFPNITNLCPFGEVFNATRFASVYAWNRKRISNCVADYSVLYNSASFSTFKCYGVSPTKLNDLCFTNVYADSFVIRGDEVRQIAPGQTGKIADYNYKLPDDFTGCVIAWNSNNLDSKVGGNYNYLYRLFRKSNLKPFERDISTEIYQAGSTPCNGVEGFNCYFPLQSYGFQPTNGVGYQPYRVVVLSFELLHAPATVCGPKKSTNLVKNKCVNFNFNGLTGTGVLTESNKKFLPFQQFGRDIADTTDAVRDPQTLEILDITPCSFGGVSVITPGTNTSNQVAVLYQDVNCTEVPVAIHADQLTPTWRVYSTGSNVFQTRAGCLIGAEHVNNSYECDIPIGAGICASYQTQTNSPRRARSVASQSIIAYTMSLGAENSVAYSNNSIACPTNFTISVTTEILPVSMTKTSVDCTMYICGDSTECSNLLLQYGSFCTQLNRALTGIAVEQDKNTQEVFAQVKQIYKTPPIKDFGGFNFSQILPDPSKPSKRSFIEDLLFNKVTLADAGFIKQYGDCLGDIAARDLICAQKFNGLTVLPPLLTDEMIAQYTSALLAGTITSGWTFGAGAALQIPFAMQMAYRFNGIGVTQNVLYENQKLIANQFNSAIGKIQDSLSSTASALGKLQDVVNQNAQALNTLVKQLSSNFGAISSVLNDILSRLDKVEAEVQIDRLITGRLQSLQTYVTQQLIRAAEIRASANLAATKMSECVLGQSKRVDFCGKGYHLMSFPQSAPHGVVFLHVTYVPAQEKNFTTAPAICHDGKAHFPREGVFVSNGTHWFVTQRNFCEPQIITTDNTFVSGNCDVVIGIVNNTVYDPLQPELDSGGSGYIPEAPRDGQAYVRKDGEWVLLSTFL

SEQ ID NO: 10057 - protein, 1173 aa, Artificial Sequence
  SARS-CoV-2/bat/Yunnan/RaTG13/2013__EPI_ISL_402131 spike protein (1-1143)(I710C_Y1106C) Foldon construct
MFVFLVLLPLVSSQCVNLTTRTQLPPAYTNSSTRGVYYPDKVFRSSVLHLTQDLFLPFFSNVTWFHAIHVSGTNGIKRFDNPVLPFNDGVYFASTEKSNIIRGWIFGTTLDSKTQSLLIVNNATNVVIKVCEFQFCNDPFLGVYYHKNNKSWMESEFRVYSSANNCTFEYVSQPFLMDLEGKQGNFKNLREFVFKNIDGYFKIYSKHTPINLVRDLPPGFSALEPLVDLPIGINITRFQTLLALHRSYLTPGDSSSGWTAGAAAYYVGYLQPRTFLLKYNENGTITDAVDCALDPLSETKCTLKSFTVEKGIYQTSNFRVQPTDSIVRFPNITNLCPFGEVFNATTFASVYAWNRKRISNCVADYSVLYNSTSFSTFKCYGVSPTKLNDLCFTNVYADSFVITGDEVRQIAPGQTGKIADYNYKLPDDFTGCVIAWNSKHIDAKEGGNFNYLYRLFRKANLKPFERDISTEIYQAGSKPCNGQTGLNCYYPLYRYGFYPTDGVGHQPYRVVVLSFELLNAPATVCGPKKSTNLVKNKCVNFNFNGLTGTGVLTESNKKFLPFQQFGRDIADTTDAVRDPQTLEILDITPCSFGGVSVITPGTNASNQVAVLYQDVNCTEVPVAIHADQLTPTWRVYSTGSNVFQTRAGCLIGAEHVNNSYECDIPIGAGICASYQTQTNSRSVASQSIIAYTMSLGAENSVAYSNNSIACPTNFTISVTTEILPVSMTKTSVDCTMYICGDSTECSNLLLQYGSFCTQLNRALTGIAVEQDKNTQEVFAQVKQIYKTPPIKDFGGFNFSQILPDPSKPSKRSFIEDLLFNKVTLADAGFIKQYGDCLGDIAARDLICAQKFNGLTVLPPLLTDEMIAQYTSALLAGTITSGWTFGAGAALQIPFAMQMAYRFNGIGVTQNVLYENQKLIANQFNSAIGKIQDSLSSTASALGKLQDVVNQNAQALNTLVKQLSSNFGAISSVLNDILSRLDKVEAEVQIDRLITGRLQSLQTYVTQQLIRAAEIRASANLAATKMSECVLGQSKRVDFCGKGYHLMSFPQSAPHGVVFLHVTYVPAQEKNFTTAPAICHDGKAHFPREGVFVSNGTHWFVTQRNFCEPQIITTDNTFVSGSCDVVIGIVNNTVYDPLQPELDSGGSGYIPEAPRDGQAYVRKDGEWVLLSTFL

SEQ ID NO: 10058 - protein, 1177 aa, Artificial Sequence
  SARS-CoV-2/Wuhan/HBCDC-HB-01/2019__EPI_ISL_402132 spike protein (1-1147)(I714C_Y1110C) Foldon construct
MFVFLVLLPLVSSQCVNLTTRTQLPPAYTNSITRGVYYPDKVFRSSVLHSTQDLFLPFFSNVTWFHAIHVSGTNGTKRFDNPVLPFNDGVYFASTEKSNIIRGWIFGTTLDSKTQSLLIVNNATNVVIKVCEFQFCNDPFLGVYYHKNNKSWMESEFRVYSSANNCTFEYVSQPFLMDLEGKQGNFKNLREFVFKNIDGYFKIYSKHTPINLVRDLPQGFSALEPLVDLPIGINITRFQTLLALHRSYLTPGDSSSGWTAGAAAYYVGYLQPRTFLLKYNENGTITDAVDCALDPLSETKCTLKSFTVEKGIYQTSNFRVQPTESIVRFPNITNLCPFGEVFNATRFASVYAWNRKRISNCVADYSVLYNSASFSTFKCYGVSPTKLNDLCFTNVYADSFVIRGDEVRQIAPGQTGKIADYNYKLPDDFTGCVIAWNSNNLDSKVGGNYNYLYRLFRKSNLKPFERDISTEIYQAGSTPCNGVEGFNCYFPLQSYGFQPTNGVGYQPYRVVVLSFELLHAPATVCGPKKSTNLVKNKCVNFNFNGLTGTGVLTESNKKFLPFQQFGRDIADTTDAVRDPQTLEILDITPCSFGGVSVITPGTNTSNQVAVLYQDVNCTEVPVAIHADQLTPTWRVYSTGSNVFQTRAGCLIGAEHVNNSYECDIPIGAGICASYQTQTNSPRRARSVASQSIIAYTMSLGAENSVAYSNNSIACPTNFTISVTTEILPVSMTKTSVDCTMYICGDSTECSNLLLQYGSFCTQLNRALTGIAVEQDKNTQEVFAQVKQIYKTPPIKDFGGFNFSQILPDPSKPSKRSFIEDLLFNKVTLADAGFIKQYGDCLGDIAARDLICAQKFNGLTVLPPLLTDEMIAQYTSALLAGTITSGWTFGAGAALQIPFAMQMAYRFNGIGVTQNVLYENQKLIANQFNSAIGKIQDSLSSTASALGKLQDVVNQNAQALNTLVKQLSSNFGAISSVLNDILSRLDKVEAEVQIDRLITGRLQSLQTYVTQQLIRAAEIRASANLAATKMSECVLGQSKRVDFCGKGYHLMSFPQSAPHGVVFLHVTYVPAQEKNFTTAPAICHDGKAHFPREGVFVSNGTHWFVTQRNFCEPQIITTDNTFVSGNCDVVIGIVNNTVYDPLQPELDSGGSGYIPEAPRDGQAYVRKDGEWVLLSTFL

SEQ ID NO: 10059 - protein, 1177 aa, Artificial Sequence
  SARS-CoV-2/Guangdong/20SF028/2020__EPI_ISL_403936 spike protein (1-1147)(I714C_Y1110C) Foldon construct
MFVFLVLLPLVSSQCVNLTTRTQLPPAYTNSFTRGVYYPDKVFRSSVLYSTQDLFLPFFSNVTWFHAIHVSGTNGTKRFDNPVLPFNDGVYFASTEKSNIIRGWIFGTTLDSKTQSLLIVNNATNVVIKVCEFQFCNDPFLGVYYHKNNKSWMESEFRVYSSANNCTFEYVSQPFLMDLEGKQGNFKNLREFVFKNIDGYFKIYSKHTPINLVRDLPQGFSALEPLVDLPIGINITRFQTLLALHRSYLTPGDSSSGWTAGAAAYYVGYLQPRTFLLKYNENGTITDAVDCALDPLSETKCTLKSFTVEKGIYQTSNFRVQPTESIVRFPNITNLCPFGEVFNATRFASVYAWNRKRISNCVADYSVLYNSASFSTFKCYGVSPTKLNDLCFTNVYADSFVIRGDEVRQIAPGQTGKIADYNYKLPDDFTGCVIAWNSNNLDSKVGGNYNYLYRLFRKSNLKPFERDISTEIYQAGSTPCNGVEGFNCYFPLQSYGFQPTNGVGYQPYRVVVLSFELLHAPATVCGPKKSTNLVKNKCVNFNFNGLTGTGVLTESNKKFLPFQQFGRDIADTTDAVRDPQTLEILDITPCSFGGVSVITPGTNTSNQVAVLYQDVNCTEVPVAIHADQLTPTWRVYSTGSNVFQTRAGCLIGAEHVNNSYECDIPIGAGICASYQTQTNSPRRARSVASQSIIAYTMSLGAENSVAYSNNSIACPTNFTISVTTEILPVSMTKTSVDCTMYICGDSTECSNLLLQYGSFCTQLNRALTGIAVEQDKNTQEVFAQVKQIYKTPPIKDFGGFNFSQILPDPSKPSKRSFIEDLLFNKVTLADAGFIKQYGDCLGDIAARDLICAQKFNGLTVLPPLLTDEMIAQYTSALLAGTITSGWTFGAGAALQIPFAMQMAYRFNGIGVTQNVLYENQKLIANQFNSAIGKIQDSLSSTASALGKLQDVVNQNAQALNTLVKQLSSNFGAISSVLNDILSRLDKVEAEVQIDRLITGRLQSLQTYVTQQLIRAAEIRASANLAATKMSECVLGQSKRVDFCGKGYHLMSFPQSAPHGVVFLHVTYVPAQEKNFTTAPAICHDGKAHFPREGVFVSNGTHWFVTQRNFCEPQIITTDNTFVSGNCDVVIGIVNNTVYDPLQPELDSGGSGYIPEAPRDGQAYVRKDGEWVLLSTFL

SEQ ID NO: 10060 - protein, 1177 aa, Artificial Sequence
  SARS-CoV-2/Shenzhen/SZTH-001/2020__EPI_ISL_406592 spike protein (1-1147)(I714C_Y1110C) Foldon construct
MFVFLVLLPLVSSQCVNLTTRTQLPPAYTNSFTRGVYYPDKVFRSSVLHSTQDLFLPFFSNVTWFHAIHVSGTNGTKRFDNPVLPFNDGVYFASTEKSNIIRGWIFGTTLDSKTQSLLIVNNATNVVIKVCEFQFCNDPFLGVYYHKNNKSWMESEFRVYSSANNCTFEYVSQPFLMDLEGKQGNFKNLREFVFKNIDGYFKIYSKHTPINLVRDLPQGFSALEPLVDLPIGINITRFQTLLALHRSYLTPGDSSSGWTAGAAAYYVGYLQPRTFLLKYNENGTITDAVDCALDPLSETKCTLKSFTVEKGIYQTSNFRVQPTESIVRFPNITNLCPFGEVFNATRFASVYAWNRKRISNCVADYSVLYNSASFSTFKCYGVSPTKLNDLCFTNVYADSFVIRGDEVRQIAPGQTGKIADYNYKLPDDFTGCVIAWNSNNLDSKVGGNYNYLYRLFRKSNLKPFERDISTEIYQAGSTPCNGVEGFNCYFPLQSYGFQPTNGVGYQPYRVVVLSFELLHAPATVCGPKKSTNLVKNKCVNFNFNGLTGTGVLTESNKKFLPFQQFGRDIADTTDAVRDPQTLEILDITPCSFGGVSVITPGTNTSNQVAVLYQDVNCTEVPVAIHADQLTPTWRVYSTGSNVFQTRAGCLIGAEHVNNSYECDIPIGAGICASYQTQTNSPRRARSVASQSIIAYTMSLGAENSVAYSNNSIACPTNFTISVTTEILPVSMTKTSVDCTMYICGDSTECSNLLLQYGSFCTQLNRALTGIAVEQDKNTQEVFAQVKQIYKTPPIKDFGGFNFSQILPDPSKPSKRSFIEDLLFNKVTLADAGFIKQYGDCLGDIAARDLICAQKFNGLTVLPPLLTDEMIAQYTSALLAGTITSGWTFGAGAALQIPFAMQMAYRFNGIGVTQNVLYENQKLIANQFNSAIGKIQDSLSSTASALGKLQDVVNQNAQALNTLVKQLSSNFGAISSVLNDILSRLDKVEAEVQIDRLITGRLQSLQTYVTQQLIRAAEIRASANLAATKMSECVLGQSKRVDFCGKGYHLMSFPQSAPHGVVFLHVTYVPAQEKNFTTAPAICHDGKAHFPREGVFVSNGTHWFVTQRNFCEPQIITTDNTFVSGNCDVLIGIVNNTVYDPLQPELDSGGSGYIPEAPRDGQAYVRKDGEWVLLSTFL

SEQ ID NO: 10061 - protein, 1177 aa, Artificial Sequence
  SARS-CoV-2/Shenzhen/SZTH-004/2020__EPI_ISL_406595 spike protein (1-1147)(I714C_Y1110C) Foldon construct
MFVFLVLLPLVSSQCVNLTTRTQLPPAYTNSFTRGVYYPDKVFRSSVLHSTQDLFLPFFSNVTWFHAIHVSGTNGTKRFDNPVLPFNDGVYFASTEKSNIIRGWIFGTTLDSKTQSLLIVNNATNVVIKVCEFQFCNDPFLGVYYHKNNKSWMESEFRVYSSANNCTFEYVSQPFLMDLEGKQGNFKNLREFVFKNIDGYFKIYSKHTPINLVRDLPQGFSALEPLVDLPIGINITRFQTLLALHRSYLTPGDSSSGWTAGAAAYYVGYLQPRTFLLKYNENGTITDAVDCALDPLSETKCTLKSFTVEKGIYQTSNFRVQPTESIVRFPNITNLCPFGEVFNATRFASVYAWDRKRISNCVAYYSVLYNSASFSTFKCYGVSPTKLNDLCFTNVYADSFVIRGDEVRQIAPGQTGKIADYNYKLPDDFTGCVIAWNSNNLDSKVGGNYNYLYRLFRKSNLKPFERDISTEIYQAGSTPCNGVEGFNCYFPLQSYGFQPTNGVGYQPYRVVVLSFELLHAPATVCGPKKSTNLVKNKCVNFNFNGLTGTGVLTESNKKFLPFQQFGRDIADTTDAVRDPQTLEILDITPCSFGGVSVITPGTNTSNQVAVLYQDVNCTEVPVAIHADQLTPTWRVYSTGSNVFQTRAGCLIGAEHVNNSYECDIPIGAGICASYQTQTNSPRRARSVASQSIIAYTMSLGAENSVAYSNNSIACPTNFTISVTTEILPVSMTKTSVDCTMYICGDSTECSNLLLQYGSFCTQLNRALTGIAVEQDKNTQEVFAQVKQIYKTPPIKDFGGFNFSQILPDPSKPSKRSFIEDLLFNKVTLADAGFIKQYGDCLGDIAARDLICAQKFNGLTVLPPLLTDEMIAQYTSALLAGTITSGWTFGAGAALQIPFAMQMAYRFNGIGVTQNVLYENQKLIANQFNSAIGKIQDSLSSTASALGKLQDVVNQNAQALNTLVKQLSSNFGAISSVLNDILSRLDKVEAEVQIDRLITGRLQSLQTYVTQQLIRAAEIRASANLAATKMSECVLGQSKRVDFCGKGYHLMSFPQSAPHGVVFLHVTYVPAQEKNFTTAPAICHDGKAHFPREGVFVSNGTHWFVTQRNFCEPQIITTDNTFVSGNCDVVIGIVNNTVYDPLQPELDSGGSGYIPEAPRDGQAYVRKDGEWVLLSTFL

SEQ ID NO: 10062 - protein, 1177 aa, Artificial Sequence
  SARS-CoV-2/France/IDF0372/2020__EPI_ISL_406596 spike protein (1-1147)(I714C_Y1110C) Foldon construct
MFVFLVLLPLVSSQCVNLTTRTQLPPAYTNSFTRGVYYPDKVFRSSVLHSTQDLFLPFFSNVTWFHAIHVSGTNGTKRFDNPVLPFNDGVYFASTEKSNIIRGWIFGTTLDSKTQSLLIVNNATNVVIKVCEFQFCNDPFLGVYYHKNNKSWMESEFRVYSSANNCTFEYVSQPFLMDLEGKQGNFKNLREFVFKNIDGYFKIYSKHTPINLVRDLPQGFSALEPLVDLPIGINITRFQTLLALHRSYLTPGDSSSGWTAGAAAYYVGYLQPRTFLLKYNENGTITDAVDCALDPLSETKCTLKSFTVEKGIYQTSNFRVQPTESIVRFPNITNLCPFGEVFNATRFASVYAWNRKRISNCVADYSFLYNSASFSTFKCYGVSPTKLNDLCFTNVYADSFVIRGDEVRQIAPGQTGKIADYNYKLPDDFTGCVIAWNSNNLDSKVGGNYNYLYRLFRKSNLKPFERDISTEIYQAGSTPCNGVEGFNCYFPLQSYGFQPTNGVGYQPYRVVVLSFELLHAPATVCGPKKSTNLVKNKCVNFNFNGLTGTGVLTESNKKFLPFQQFGRDIADTTDAVRDPQTLEILDITPCSFGGVSVITPGTNTSNQVAVLYQDVNCTEVPVAIHADQLTPTWRVYSTGSNVFQTRAGCLIGAEHVNNSYECDIPIGAGICASYQTQTNSPRRARSVASQSIIAYTMSLGAENSVAYSNNSIACPTNFTISVTTEILPVSMTKTSVDCTMYICGDSTECSNLLLQYGSFCTQLNRALTGIAVEQDKNTQEVFAQVKQIYKTPPIKDFGGFNFSQILPDPSKPSKRSFIEDLLFNKVTLADAGFIKQYGDCLGDIAARDLICAQKFNGLTVLPPLLTDEMIAQYTSALLAGTITSGWTFGAGAALQIPFAMQMAYRFNGIGVTQNVLYENQKLIANQFNSAIGKIQDSLSSTASALGKLQDVVNQNAQALNTLVKQLSSNFGAISSVLNDILSRLDKVEAEVQIDRLITGRLQSLQTYVTQQLIRAAEIRASANLAATKMSECVLGQSKRVDFCGKGYHLMSFPQSAPHGVVFLHVTYVPAQEKNFTTAPAICHDGKAHFPREGVFVSNGTHWFVTQRNFCEPQIITTDNTFVSGNCDVVIGIVNNTVYDPLQPELDSGGSGYIPEAPRDGQAYVRKDGEWVLLSTFL

SEQ ID NO: 10063 - protein, 1177 aa, Artificial Sequence
  SARS-CoV-2/Australia/VIC01/2020__EPI_ISL_406844 spike protein (1-1147)(I714C_Y1110C) Foldon construct
MFVFLVLLPLVSSQCVNLTTRTQLPPAYTNSFTRGVYYPDKVFRSSVLHSTQDLFLPFFSNVTWFHAIHVSGTNGTKRFDNPVLPFNDGVYFASTEKSNIIRGWIFGTTLDSKTQSLLIVNNATNVVIKVCEFQFCNDPFLGVYYHKNNKSWMESEFRVYSSANNCTFEYVSQPFLMDLEGKQGNFKNLREFVFKNIDGYFKIYSKHTPINLVRDLPQGFSALEPLVDLPIGINITRFQTLLALHRRYLTPGDSSSGWTAGAAAYYVGYLQPRTFLLKYNENGTITDAVDCALDPLSETKCTLKSFTVEKGIYQTSNFRVQPTESIVRFPNITNLCPFGEVFNATRFASVYAWNRKRISNCVADYSVLYNSASFSTFKCYGVSPTKLNDLCFTNVYADSFVIRGDEVRQIAPGQTGKIADYNYKLPDDFTGCVIAWNSNNLDSKVGGNYNYLYRLFRKSNLKPFERDISTEIYQAGSTPCNGVEGFNCYFPLQSYGFQPTNGVGYQPYRVVVLSFELLHAPATVCGPKKSTNLVKNKCVNFNFNGLTGTGVLTESNKKFLPFQQFGRDIADTTDAVRDPQTLEILDITPCSFGGVSVITPGTNTSNQVAVLYQDVNCTEVPVAIHADQLTPTWRVYSTGSNVFQTRAGCLIGAEHVNNSYECDIPIGAGICASYQTQTNSPRRARSVASQSIIAYTMSLGAENSVAYSNNSIACPTNFTISVTTEILPVSMTKTSVDCTMYICGDSTECSNLLLQYGSFCTQLNRALTGIAVEQDKNTQEVFAQVKQIYKTPPIKDFGGFNFSQILPDPSKPSKRSFIEDLLFNKVTLADAGFIKQYGDCLGDIAARDLICAQKFNGLTVLPPLLTDEMIAQYTSALLAGTITSGWTFGAGAALQIPFAMQMAYRFNGIGVTQNVLYENQKLIANQFNSAIGKIQDSLSSTASALGKLQDVVNQNAQALNTLVKQLSSNFGAISSVLNDILSRLDKVEAEVQIDRLITGRLQSLQTYVTQQLIRAAEIRASANLAATKMSECVLGQSKRVDFCGKGYHLMSFPQSAPHGVVFLHVTYVPAQEKNFTTAPAICHDGKAHFPREGVFVSNGTHWFVTQRNFCEPQIITTDNTFVSGNCDVVIGIVNNTVYDPLQPELDSGGSGYIPEAPRDGQAYVRKDGEWVLLSTFL

SEQ ID NO: 10064 - protein, 1177 aa, Artificial Sequence
  SARS-CoV-2/Germany/BavPat1/2020__EPI_ISL_406862 spike protein (1-1147)(I714C_Y1110C) Foldon construct
MFVFLVLLPLVSSQCVNLTTRTQLPPAYTNSFTRGVYYPDKVFRSSVLHSTQDLFLPFFSNVTWFHAIHVSGTNGTKRFDNPVLPFNDGVYFASTEKSNIIRGWIFGTTLDSKTQSLLIVNNATNVVIKVCEFQFCNDPFLGVYYHKNNKSWMESEFRVYSSANNCTFEYVSQPFLMDLEGKQGNFKNLREFVFKNIDGYFKIYSKHTPINLVRDLPQGFSALEPLVDLPIGINITRFQTLLALHRSYLTPGDSSSGWTAGAAAYYVGYLQPRTFLLKYNENGTITDAVDCALDPLSETKCTLKSFTVEKGIYQTSNFRVQPTESIVRFPNITNLCPFGEVFNATRFASVYAWNRKRISNCVADYSVLYNSASFSTFKCYGVSPTKLNDLCFTNVYADSFVIRGDEVRQIAPGQTGKIADYNYKLPDDFTGCVIAWNSNNLDSKVGGNYNYLYRLFRKSNLKPFERDISTEIYQAGSTPCNGVEGFNCYFPLQSYGFQPTNGVGYQPYRVVVLSFELLHAPATVCGPKKSTNLVKNKCVNFNFNGLTGTGVLTESNKKFLPFQQFGRDIADTTDAVRDPQTLEILDITPCSFGGVSVITPGTNTSNQVAVLYQGVNCTEVPVAIHADQLTPTWRVYSTGSNVFQTRAGCLIGAEHVNNSYECDIPIGAGICASYQTQTNSPRRARSVASQSIIAYTMSLGAENSVAYSNNSIACPTNFTISVTTEILPVSMTKTSVDCTMYICGDSTECSNLLLQYGSFCTQLNRALTGIAVEQDKNTQEVFAQVKQIYKTPPIKDFGGFNFSQILPDPSKPSKRSFIEDLLFNKVTLADAGFIKQYGDCLGDIAARDLICAQKFNGLTVLPPLLTDEMIAQYTSALLAGTITSGWTFGAGAALQIPFAMQMAYRFNGIGVTQNVLYENQKLIANQFNSAIGKIQDSLSSTASALGKLQDVVNQNAQALNTLVKQLSSNFGAISSVLNDILSRLDKVEAEVQIDRLITGRLQSLQTYVTQQLIRAAEIRASANLAATKMSECVLGQSKRVDFCGKGYHLMSFPQSAPHGVVFLHVTYVPAQEKNFTTAPAICHDGKAHFPREGVFVSNGTHWFVTQRNFCEPQIITTDNTFVSGNCDVVIGIVNNTVYDPLQPELDSGGSGYIPEAPRDGQAYVRKDGEWVLLSTFL

SEQ ID NO: 10065 - protein, 1177 aa, Artificial Sequence
  SARS-CoV-2/Wuhan/HBCDC-HB-02/2020__EPI_ISL_412978 spike protein (1-1147)(I714C_Y1110C) Foldon construct
MFVFLVLLPLVSSQCVNLTTRTQLPPAYTNSFTRGVYYPDKVFRSSVLHSTQDLFLPFFSNVTWFHAIHVSGTNGTKRFDNPVLPFNDGVYFASTEKSNIIRGWIFGTTLDSKTQSLLIVNNATNVVIKVCEFQFCNDPFLGVYYHKNNKSWMESEFRVYSSANNCTFEYVSQPFLMDLEGKQGNFKNLREFVFKNIDGYFKIYSKHTPINLVRDLPQGFSALEPLVDLPIGINITRFQTLLALHRSYLTPGDSSSGWTAGAAAYYVGYLQPRTFLLKYNENGTITDAVDCALDPLSETKCTLKSFTVEKGIYQTSNFRVQPTESIVRFPNITNLCPFGEVFNATRFASVYAWNRKRISNCVADYSVLYNSASFSTFKCYGVSPTKLNDLCFTNVYADSFVIRGDEVRQIAPGQTGKIADYNYKLPDDFTGCVIAWNSNNLDSKVGGNYNYLYRLFRKSNLKPFERDISTEIYQAGSTPCNGVEGFNCYFPLQSYGFQPTNGVGYQPYRVVVLSFELLHAPATVCGPKKSTNLVKNKCVNFNFNGLTGTGVLTESNKKFLPFQQFGRDIADTTDAVRDPQTLEILDITPCSFGGVSVITPGTNTSNQVAVLYQDVNCTEVPVAIHADQLTPTWRVYSTGSNVFQTRAGCLIGAEHVNNSYECDIPIGAGICASYQTQTNSPRRARSVASQSIIAYTMSLGAENSVAYSNNSIACPTNFTISVTTEILPVSMTKTSVDCTMYICGDSTECSNFLLQYGSFCTQLNRALTGIAVEQDKNTQEVFAQVKQIYKTPPIKDFGGFNFSQILPDPSKPSKRSFIEDLLFNKVTLADAGFIKQYGDCLGDIAARDLICAQKFNGLTVLPPLLTDEMIAQYTSALLAGTITSGWTFGAGAALQIPFAMQMAYRFNGIGVTQNVLYENQKLIANQFNSAIGKIQDSLSSTASALGKLQDVVNQNAQALNTLVKQLSSNFGAISSVLNDILSRLDKVEAEVQIDRLITGRLQSLQTYVTQQLIRAAEIRASANLAATKMSECVLGQSKRVDFCGKGYHLMSFPQSAPHGVVFLHVTYVPAQEKNFTTAPAICHDGKAHFPREGVFVSNGTHWFVTQRNFCEPQIITTDNTFVSGNCDVVIGIVNNTVYDPLQPELDSGGSGYIPEAPRDGQAYVRKDGEWVLLSTFL

SEQ ID NO: 10066 - protein, 1177 aa, Artificial Sequence
  SARS-CoV-2/Australia/QLD02/2020__EPI_ISL_407896 spike protein (1-1147)(I714C_Y1110C) Foldon construct
MFVFLVLLPLVSSQCVNLTTRTQLPPAYTNSFTRGVYYPDKVFRSSVLHSTQDLFLPFFSNVTWFHAIHVSGTNGTKRFDNPVLPFNDGVYFASTEKSNIIRGWIFGTTLDSKTQSLLIVNNATNVVIKVCEFQFCNDPFLGVYYHKNNKSWMESEFRVYSSANNCTFEYVSQPFLMDLEGKQGNFKNLREFVFKNIDGYFKIYSKHTPINLVRDLPQGFSALEPLVDLPIGINITRFQTLLALHRSYLTPGDSSSGWTAGAAAYYVGYLQPRTFLLKYNENGTITDAVDCALDPLSETKCTLKSFTVEKGIYQTSNFRVQPTESIVRFPNITNLCPFGEVFNATRFASVYAWNRKRISNCVADYSVLYNSASFSTFKCYGVSPTKLNDLCFTNVYADSFVIRGDEVRQIAPGQTGKIADYNYKLPDDFTGCVIAWNSNNLDSKVGGNYNYLYRLFRKSNLKPFERDISTEIYQAGSTPCNGVEGFNCYFPLQSYGFQPTNGVGYQPYRVVVLSFELLHAPATVCGPKKSTNLVKNKCVNFNFNGLTGTGVLTESNKKFLPFQQFGRDIADTTDAVRDPQTLEILDITPCSFGGVSVITPGTNTSNQVAVLYQDVNCTEVPVAIHADQLTPTWRVYSTGSNVFQTRAGCLIGAEHVNNSYECDIPIGAGICASYQTQTNSPRRARSVASQSIIAYTMSLGAENSVAYSNNSIACPTNFTISVTTEILPVSMTKTSVDCTMYICGDSTECSNLLLQYGSFCTQLNRALTGIAVEQDKNTQEVFAQVKQIYKTPPIKDFGGFNFSQILPDPSKPSKRSFIEDLLFNKVTLADAGFIKQYGDCLGDIAARDLICAQKFNGLTVLPPLLTDEMIAQYTSALLAGTITSGWTFGAGAALQIPFAMQMAYRFNGIGVTQNVLYENQKLIANQFNSAIGKIQDSLSSTASALGKLQDVVNQNAQALNTLVKQLSSNFGAISSVLNDILSRLDKVEAEVQIDRLITGRLQSLQTYVTQQLIRAAEIRASANLAATKMSECVLGQSKRVDFCGKGYHLMSFPQSAPHGVVFLHVTYVPAQEKNFTTAPAICHDGKAHFPREGVFVSNGTHWFVTQRNFCEPQIITTDNTFVSGNCDVVIGIVNNTVYDPLQLELDSGGSGYIPEAPRDGQAYVRKDGEWVLLSTFL

SEQ ID NO: 10067 - protein, 1177 aa, Artificial Sequence
  SARS-CoV-2/India/1-31/2020__EPI_ISL_413523 spike protein (1-1147)(I714C_Y1110C) Foldon construct
MFVFLVLLPLVSSQCVNLTTRTQLPPAYTNSFTRGVYYPDKVFRSSVLHSTQDLFLPFFSNVTWFHAIHVSGTNGTKRFDNPVLPFNDGVYFASTEKSNIIRGWIFGTTLDSKTQSLLIVNNATNVVIKVCEFQFCNDPFLGVYYHKNNKSWMESEFRVYSSANNCTFEYVSQPFLMDLEGKQGNFKNLREFVFKNIDGYFKIYSKHTPINLVRDLPQGFSALEPLVDLPIGINITRFQTLLALHRSYLTPGDSSSGWTAGAAAYYVGYLQPRTFLLKYNENGTITDAVDCALDPLSETKCTLKSFTVEKGIYQTSNFRVQPTESIVRFPNITNLCPFGEVFNATRFASVYAWNRKRISNCVADYSVLYNSASFSTFKCYGVSPTKLNDLCFTNVYADSFVIRGDEVRQIAPGQTGKIADYNYKLPDDFTGCVIAWNSNNLDSKVGGNYNYLYRLFRKSNLKPFERDISTEIYQAGSTPCNGVEGFNCYFPLQSYGFQPTNGVGYQPYRVVVLSFELLHAPATVCGPKKSTNLVKNKCVNFNFNGLTGTGVLTESNKKFLPFQQFGRDIADTTDAVRDPQTLEILDITPCSFGGVSVITPGTNTSNQVAVLYQDVNCTEVPVAIHADQLTPTWRVYSTGSNVFQTRAGCLIGAEHVNNSYECDIPIGAGICASYQTQTNSPRRARSVASQSIIAYTMSLGAENSVAYSNNSIACPTNFTISVTTEILPVSMTKTSVDCTMYICGDSTECSNLLLQYGSFCTQLNRALTGIAVEQDKNTQEVFAQVKQIYKTPPIKDFGGFNFSQILPDPSKPSKRSFIEDLLFNKVTLADAGFIKQYGDCLGDIAARDLICAQKFNGLTVLPPLLTDEMIAQYTSALLAGTITSGWTFGAGAALQIPFAMQMAYRFNGIGVTQNVLYENQKLIANQFNSVIGKIQDSLSSTASALGKLQDVVNQNAQALNTLVKQLSSNFGAISSVLNDILSRLDKVEAEVQIDRLITGRLQSLQTYVTQQLIRAAEIRASANLAATKMSECVLGQSKRVDFCGKGYHLMSFPQSAPHGVVFLHVTYVPAQEKNFTTAPAICHDGKAHFPREGVFVSNGTHWFVTQRNFCEPQIITTDNTFVSGNCDVVIGIVNNTVYDPLQPELDSGGSGYIPEAPRDGQAYVRKDGEWVLLSTFL

SEQ ID NO: 10068 - protein, 1177 aa, Artificial Sequence
  SARS-CoV-2/Guangdong/GD2020087-P0008/2020__EPI_ISL_413863 spike protein (1-1147)(I714C_Y1110C) Foldon construct
MFVFLVLLPLVSSQCVNLTTRTQLPPAYTNSFTRGVYYPDKVFRSSVLHSTQDLFLPFFSNVTWFHAIHVSGTNGTKRFDNPVLPFNDGVYFASTEKSNIIRGWIFGTTLDSKTQSLLIVNNATNVVIKVCEFQFCNDPFLGVYYHKNNKSWMESEFRVYSSANNCTFEYVSQPFLMDLEGKQGNFKNLREFVFKNIDGYFKIYSKHTPINLVRDLPQGFSALEPLVDLPIGINITRFQTLLALHRSYLTPGDSSSGWTAGAAAYYVGYLQPRTFLLKYNENGTITDAVDCALDPLSETKCTLKSFTVEKGIYQTSNFRVQPTESIVRFPNITNLCPFGEVFNATRFASVYAWNRKRISNCVADYSVLYNSASFSTFKCYGVSPTKLNDLCFTNVYADSFVIRGDEVREIAPGQTGKIADYNYKLPDDFTGCVIAWNSNNLDSKVGGNYNYLYRLFRKSNLKPFERDISTEIYQAGSTPCNGVEGFNCYFPLQSYGFQPTNGVGYQPYRVVVLSFELLHAPATVCGPKKSTNLVKNKCVNFNFNGLTGTGVLTESNKKFLPFQQFGRDIADTTDAVRDPQTLEILDITPCSFGGVSVITPGTNTSNQVAVLYQDVNCTEVPVAIHADQLTPTWRVYSTGSNVFQTRAGCLIGAEHVNNSYECDIPIGAGICASYQTQTNSPRRARSVASQSIIAYTMSLGAENSVAYSNNSIACPTNFTISVTTEILPVSMTKTSVDCTMYICGDSTECSNLLLQYGSFCTQLNRALTGIAVEQDKNTQEVFAQVKQIYKTPPIKDFGGFNFSQILPDPSKPSKRSFIEDLLFNKVTLADAGFIKQYGDCLGDIAARDLICAQKFNGLTVLPPLLTDEMIAQYTSALLAGTITSGWTFGAGAALQIPFAMQMAYRFNGIGVTQNVLYENQKLIANQFNSAIGKIQDSLSSTASALGKLQDVVNQNAQALNTLVKQLSSNFGAISSVLNDILSRLDKVEAEVQIDRLITGRLQSLQTYVTQQLIRAAEIRASANLAATKMSECVLGQSKRVDFCGKGYHLMSFPQSAPHGVVFLHVTYVPAQEKNFTTAPAICHDGKAHFPREGVFVSNGTHWFVTQRNFCEPQIITTDNTFVSGNCDVVIGIVNNTVYDPLQPELDSGGSGYIPEAPRDGQAYVRKDGEWVLLSTFL

SEQ ID NO: 10069 - protein, 1177 aa, Artificial Sequence
  SARS-CoV-2/Sweden/01/2020__EPI_ISL_411951 spike protein (1-1147)(I714C_Y1110C) Foldon construct
MFVFLVLLPLVSSQCVNLTTRTQLPPAYTNSFTRGVYYPDKVFRSSVLHSTQDLFLPFFSNVTWFHAIHVSGTNGTKRFDNPVLPFNDGVYFASTEKSNIIRGWIFGTTLDSKTQSLLIVNNATNVVIKVCEFQFCNDPFLGVYYHKNNKSWMESEFRVYSSANNCTFEYVSQPFLMDLEGKQGNFKNLREFVFKNIDGYFKIYSKHTPINLVRDLPQGFSALEPLVDLPIGINITRFQTLLALHRSYLTPGDSSSGWTAGAAAYYVGYLQPRTFLLKYNENGTITDAVDCALDPLSETKCTLKSFTVEKGIYQTSNFRVQPTESIVRFPNITNLCPFGEVFNATRFASVYAWNRKRISNCVADYSVLYNSASFSTFKCYGVSPTKLNDLCFTNVYADSFVIRGDEVRQIAPGQTGKIADYNYKLPDDFTGCVIAWNSNNLDSKVGGNYNYLYRLFRKSNLKPFERDISTEIYQAGSTPCNGVEGFNCYFPLQSYGFQPTNGVGYQPYRVVVLSFELLHAPATVCGPKKSTNLVKNKCVNFNFNGLTGTGVLTESNKKFLPFQQFGRDIADTTDAVRDPQTLEILDITPCSFGGVSVITPGTNTSNQVAVLYQDVNCTEVPVAIHADQLTPTWRVYSTGSNVFQTRAGCLIGAEHVNNSYECDIPIGAGICASYQTQTNSPRRARSVASQSIIAYTMSLGAENSVAYSNNSIACPTNFTISVTTEILPVSMTKTSVDCTMYICGDSTECSNLLLQYGSFCTQLNRALTGIAVEQDKNTQEVFAQVKQIYKTPPIKDCGGFNFSQILPDPSKPSKRSFIEDLLFNKVTLADAGFIKQYGDCLGDIAARDLICAQKFNGLTVLPPLLTDEMIAQYTSALLAGTITSGWTFGAGAALQIPFAMQMAYRFNGIGVTQNVLYENQKLIANQFNSAIGKIQDSLSSTASALGKLQDVVNQNAQALNTLVKQLSSNFGAISSVLNDILSRLDKVEAEVQIDRLITGRLQSLQTYVTQQLIRAAEIRASANLAATKMSECVLGQSKRVDFCGKGYHLMSFPQSAPHGVVFLHVTYVPAQEKNFTTAPAICHDGKAHFPREGVFVSNGTHWFVTQRNFCEPQIITTDNTFVSGNCDVVIGIVNNTVYDPLQPELDSGGSGYIPEAPRDGQAYVRKDGEWVLLSTFL

SEQ ID NO: 10070 - protein, 1177 aa, Artificial Sequence
  SARS-CoV-2/Tianmen/HBCDC-HB-07/2020__EPI_ISL_412983 spike protein (1-1147)(I714C_Y1110C) Foldon construct
MFVFLVLLPLVSSQCVNLTTRTQLPPAYTNSFTRGVYYPDKVFRSSVLHSTQDLFLPFFSNVTWFHAIHVSGTNGTKRFDNPVLPFNDGVYFASTEKSNIIRGWIFGTTLDSKTQSLLIVNNATNVVIKVCEFQFCNDPFLGVYYHKNNKSWMESEFRVYSSANNCTFEYVSQPFLMDLEGKQGNFKNLREFVFKNIDGYFKIYSKHTPINLVRDLPQGFSALEPLVDLPIGINITRFQTLLALHRSYLTPGDSSSGWTAGAAAYYVGYLQPRTFLLKYNENGTITDAVDCALDPLSETKCTLKSFTVEKGIYQTSNFRVQPTESIVRFPNITNLCPFGEVFNATRFASVYAWNRKRISNCVADYSVLYNSASFSTFKCYGVSPTKLNDLCFTNVYADSFVIRGDEVRQIAPGQTGKIADYNYKLPDDFTGCVIAWNSNNLDSKVGGNYNYLYRLFRKSNLKPFERDISTEIYQAGSTPCNGVEGFNCYFPLQSYGFQPTNGVGYQPYRVVVLSFELLHAPATVCGPKKSTNLVKNKCVNFNFNGLTGTGVLTESNKKFLPFQQFGRDIADTTDAVRDPQTLEILDITPCSFGGVSVITPGTNTSNQVAVLYQDLNCTEVPVAIHADQLTPTWRVYSTGSNVFQTRAGCLIGAEHVNNSYECDIPIGAGICASYQTQTNSPRRARSVASQSIIAYTMSLGAENSVAYSNNSIACPTNFTISVTTEILPVSMTKTSVDCTMYICGDSTECSNLLLQYGSFCTQLNRALTGIAVEQDKNTQEVFAQVKQIYKTPPIKDFGGFNFSQILPDPSKPSKRSFIEDLLFNKVTLADAGFIKQYGDCLGDIAARDLICAQKFNGLTVLPPLLTDEMIAQYTSALLAGTITSGWTFGAGAALQIPFAMQMAYRFNGIGVTQNVLYENQKLIANQFNSAIGKIQDSLSSTASALGKLQDVVNQNAQALNTLVKQLSSNFGAISSVLNDILSRLDKVEAEVQIDRLITGRLQSLQTYVTQQLIRAAEIRASANLAATKMSECVLGQSKRVDFCGKGYHLMSFPQSAPHGVVFLHVTYVPAQEKNFTTAPAICHDGKAHFPREGVFVSNGTHWFVTQRNFCEPQIITTDNTFVSGNCDVVIGIVNNTVYDPLQPELDSGGSGYIPEAPRDGQAYVRKDGEWVLLSTFL

SEQ ID NO: 10071 - protein, 1177 aa, Artificial Sequence
  SARS-CoV-2/Hong Kong/case42_VM20002493/2020__EPI_ISL_414527 spike protein (1-1147)(I714C_Y1110C) Foldon construct
MFVFLVLLPLVSSQCVNLTTRTQLPPAYTNSFTRGVYYPDKVFRSSVLHSTQDLFLPFFSNVTWFHAIHVSGTNGTKRFDNPVLPFNDGVYFASTEKSNIIRGWIFGTTLDSKTQSLLIVNNATNVVIKVCEFQFCNDPFLGVYYHKNNKSWMESEFRVYSSANNCTFEYVSQPFLMDLEGKQGNFKNLREFVFKNIDGYFKIYSKHTPINLVRDLPQGFSALEPLVDLPIGINITRFQTLLALHRSYLTPGDSSSGWTAGAAAYYVGYLQPRTFLLKYNENGTITDAVDCALDPLSETKCTLKSFTVEKGIYQTSNFRVQPTESIVRFPNITNLCPFGEVFNATRFASVYAWNRKRISNCVADYSVLYNSASFSTFKCYGVSPTKLNDLCFTNVYADSFVIRGDEVRQIAPGQTGKIADYNYKLPDDFTGCVIAWNSNNLDSKVGGNYNYLYRLFRKSNLKPFERDISTEIYQAGSTPCNGVEGFNCYFPLQSYGFQPTNGVGYQPYRVVVLSFELLHAPATVCGPKKSTNLVKNKCVNFNFNGLTGTGVLTESNKKFLPFQQFGRDIADTTDAVRDPQTLEILDITPCSFGGVSVITPGTNTSNQVAVLYQDVNCTEVPVAIHADQLTPTWRVYSTGSNVFQTRAGCLIGAEHVNNSYECDIPIGAGICASYQTQTNSPRRARSVASQSIIAYTMSLGAENSVAYSNNSIACPTNFAISVTTEILPVSMTKTSVDCTMYICGDSTECSNLLLQYGSFCTQLNRALTGIAVEQDKNTQEVFAQVKQIYKTPPIKDFGGFNFSQILPDPSKPSKRSFIEDLLFNKVTLADAGFIKQYGDCLGDIAARDLICAQKFNGLTVLPPLLTDEMIAQYTSALLAGTITSGWTFGAGAALQIPFAMQMAYRFNGIGVTQNVLYENQKLIANQFNSAIGKIQDSLSSTASALGKLQDVVNQNAQALNTLVKQLSSNFGAISSVLNDILSRLDKVEAEVQIDRLITGRLQSLQTYVTQQLIRAAEIRASANLAATKMSECVLGQSKRVDFCGKGYHLMSFPQSAPHGVVFLHVTYVPAQEKNFTTAPAICHDGKAHFPREGVFVSNGTHWFVTQRNFCEPQIITTDNTFVSGNCDVVIGIVNNTVYDPLQPELDSGGSGYIPEAPRDGQAYVRKDGEWVLLSTFL

SEQ ID NO: 10072 - protein, 1177 aa, Artificial Sequence
  SARS-CoV-2/USA/CruiseA-23/2020__EPI_ISL_414482 spike protein (1-1147)(I714C_Y1110C) Foldon construct
MFVFLVLLPLVSSQCVNLTTRTQLPPAYTNSFTRGVYYPDKVFRSSVLHSTQDLFLPFFSNVTWFHAIHVSGTNGTKRFDNPVLPFNDGVYFASTEKSNIIRGWIFGTTLDSKTQSLLIVNNATNVVIKVCEFQFCNDPFLGVYYHKNNKSWMESEFRVYSSANNCTFEYVSQPFLMDLEVKQGNFKNLREFVFKNIDGYFKIYSKHTPINLVRDLPQGFSALEPLVDLPIGINITRFQTLLALHRSYLTPGDSSSGWTAGAAAYYVGYLQPRTFLLKYNENGTITDAVDCALDPLSETKCTLKSFTVEKGIYQTSNFRVQPTESIVRFPNITNLCPFGEVFNATRFASVYAWNRKRISNCVADYSVLYNSASFSTFKCYGVSPTKLNDLCFTNVYADSFVIRGDEVRQIAPGQTGKIADYNYKLPDDFTGCVIAWNSNNLDSKVGGNYNYLYRLFRKSNLKPFERDISTEIYQAGSTPCNGVEGFNCYFPLQSYGFQPTNGVGYQPYRVVVLSFELLHAPATVCGPKKSTNLVKNKCVNFNFNGLTGTGVLTESNKKFLPFQQFGRDIADTTDAVRDPQTLEILDITPCSFGGVSVITPGTNTSNQVAVLYQDVNCTEVPVAIHADQLTPTWRVYSTGSNVFQTRAGCLIGAEHVNNSYECDIPIGAGICASYQTQTNSPRRARSVASQSIIAYTMSLGAENSVAYSNNSIACPTNFTISVTTEILPVSMTKTSVDCTMYICGDSTECSNLLLQYGSFCTQLNRALTGIAVEQDKNTQEVFAQVKQIYKTPPIKDFGGFNFSQILPDPSKPSKRSFIEDLLFNKVTLADAGFIKQYGDCLGDIAARDLICAQKFNGLTVLPPLLTDEMIAQYTSALLAGTITSGWTFGAGAALQIPFAMQMAYRFNGIGVTQNVLYENQKLIANQFNSAIGKIQDSLSSTASALGKLQDVVNQNAQALNTLVKQLSSNFGAISSVLNDILSRLDKVEAEVQIDRLITGRLQSLQTYVTQQLIRAAEIRASANLAATKMSECVLGQSKRVDFCGKGYHLMSFPQSAPHGVVFLHVTYVPAQEKNFTTAPAICHDGKAHFPREGVFVSNGTHWFVTQRNFCEPQIITTDNTFVSGNCDVVIGIVNNTVYDPLQPELDSGGSGYIPEAPRDGQAYVRKDGEWVLLSTFL

SEQ ID NO: 10073 - protein, 1177 aa, Artificial Sequence
  SARS-CoV-2/Hong Kong/case85_VM20002868/2020__EPI_ISL_414519 spike protein (1-1147)(I714C_Y1110C) Foldon construct
MFVFLVLVPLVSSQCVNLTTRTQLPPAYTNSFTRGVYYPDKVFRSSVLHSTQDLFLPFFSNVTWFHAIHVSGTNGTKRFDNPVLPFNDGVYFASTEKSNIIRGWIFGTTLDSKTQSLLIVNNATNVVIKVCEFQFCNDPFLGVYYHKNNKSWMESEFRVYSSANNCTFEYVSQPFLMDLEGKQGNFKNLREFVFKNIDGYFKIYSKHTPINLVRDLPQGFSALEPLVDLPIGINITRFQTLLALHRSYLTPGDSSSGWTAGAAAYYVGYLQPRTFLLKYNENGTITDAVDCALDPLSETKCTLKSFTVEKGIYQTSNFRVQPTESIVRFPNITNLCPFGEVFNATRFASVYAWNRKRISNCVADYSVLYNSASFSTFKCYGVSPTKLNDLCFTNVYADSFVIRGDEVRQIAPGQTGKIADYNYKLPDDFTGCVIAWNSNNLDSKVGGNYNYLYRLFRKSNLKPFERDISTEIYQAGSTPCNGVEGFNCYFPLQSYGFQPTNGVGYQPYRVVVLSFELLHAPATVCGPKKSTNLVKNKCVNFNFNGLTGTGVLTESNKKFLPFQQFGRDIADTTDAVRDPQTLEILDITPCSFGGVSVITPGTNTSNQVAVLYQDVNCTEVPVAIHADQLTPTWRVYSTGSNVFQTRAGCLIGAEHVNNSYECDIPIGAGICASYQTQTNSPRRARSVASQSIIAYTMSLGAENSVAYSNNSIACPTNFTISVTTEILPVSMTKTSVDCTMYICGDSTECSNLLLQYGSFCTQLNRALTGIAVEQDKNTQEVFAQVKQIYKTPPIKDFGGFNFSQILPDPSKPSKRSFIEDLLFNKVTLADAGFIKQYGDCLGDIAARDLICAQKFNGLTVLPPLLTDEMIAQYTSALLAGTITSGWTFGAGAALQIPFAMQMAYRFNGIGVTQNVLYENQKLIANQFNSAIGKIQDSLSSTASALGKLQDVVNQNAQALNTLVKQLSSNFGAISSVLNDILSRLDKVEAEVQIDRLITGRLQSLQTYVTQQLIRAAEIRASANLAATKMSECVLGQSKRVDFCGKGYHLMSFPQSAPHGVVFLHVTYVPAQEKNFTTAPAICHDGKAHFPREGVFVSNGTHWFVTQRNFCEPQIITTDNTFVSGNCDVVIGIVNNTVYDPLQPELDSGGSGYIPEAPRDGQAYVRKDGEWVLLSTFL

SEQ ID NO: 10074 - protein, 1177 aa, Artificial Sequence; identical to SEQ ID NO: 10064
  SARS-CoV-2/England/200990660/2020__EPI_ISL_414523 spike protein (1-1147)(I714C_Y1110C) Foldon construct

SEQ ID NO: 10075 - protein, 1177 aa, Artificial Sequence
  SARS-CoV-2/Australia/NSW09/2020__EPI_ISL_413595 spike protein (1-1147)(I714C_Y1110C) Foldon construct
MFVFLVLLPLVSSQCVNLTTRTQLPPAYTNSFTRGVYYPDKVFRSSVLHSTQDLFLPFFSNVTWFHAIHVSGTNGTKRFDNPVLPFNDGVYFASTEKSNIIRGWIFGTTLDSKTQSLLIVNNATNVVIKVCEFQFCNDPFLGVYYHKNNKSWMESEFRVYSSANNCTFEYVSQPFLMDLEGKQGNFKNLREFVFKNIDGYFKIYSKHTPINLVRDLPQGFSALEPLVDLPIGINITRFQTLLALHRSYLTPGDSSSGWTAGAAAYYVGYLQPRTFLLKYNENGTITDAVDCALDPLSETKCTLKSFTVEKGIYQTSNFRVQPTESIVRFPNITNLCPFGEVFNATRFASVYAWNRKRISNCVADYSVLYNSASFSTFKCYGVSPTKLNDLCFTNVYADSFVIRGDEVRQIAPGQTGKIADYNYKLPDDFTGCVIAWNSNNLDSKVGGNYNYLYRLFRKSNLKPFERDISTEIYQAGSTPCNGVEGFNCYFPLQSYGFQPTNGVGYQPYRVVVLSFELLHAPATVCGPKKSTNLVKNKCVNFNFNGLTGTGVLTESNKKFLPFQQFGRDIADTTDAVRDPQTLEILDITPCSFGGVSVITPGTNTSNQVAVLYQDVNCTEVPVAIHADQLTPTWRVYSTGSNVFQTRAGCLIGAEHVNNSYECDIPIGAGICASYQTQTNSPRRARSVASQSIIAYTMSLGAENSVAYSNNSIACPTNFTISVTTEILPVSMTKTSVDCTMYICGDSTECSNLLLQYGSFCTQLNRALTGIAVEQDKNTQEVFAQVKQIYKTPPIKDFGGFNFSQILPDPSKPSKRSFIEDLLFNKVTLADAGFIKQYGDCLGDIAARDLICAQKFNGLTVLPPLLTDEMIAQYTSALLAGTITSGWTFGAGAALQIPFAMQMAYRFNGIGVTQNVLYENQKLIANQFNSAIGKIQDSLSFTASALGKLQDVVNQNAQALNTLVKQLSSNFGAISSVLNDILSRLDKVEAEVQIDRLITGRLQSLQTYVTQQLIRAAEIRASANLAATKMSECVLGQSKRVDFCGKGYHLMSFPQSAPHGVVFLHVTYVPAQEKNFTTAPAICHDGKAHFPREGVFVSNGTHWFVTQRNFCEPQIITTDNTFVSGNCDVVIGIVNNTVYDPLQPELDSGGSGYIPEAPRDGQAYVRKDGEWVLLSTFL

SEQ ID NO: 10076 - protein, 1177 aa, Artificial Sequence; identical to SEQ ID NO: 10056
  SARS-CoV-2/Australia/NSW10/2020__EPI_ISL_413596 spike protein (1-1147)(I714C_Y1110C) Foldon construct

SEQ ID NO: 10077 - protein, 1177 aa, Artificial Sequence
  SARS-CoV-2/Switzerland/1000477797/2020__EPI_ISL_413023 spike protein (1-1147)(I714C_Y1110C) Foldon construct
MFVFLVLLPLVSSQCVNLTTRTQLPPAYTNSFTRGVYYPDKVFRSSVLHSTQDLFLPFFSNVTWFHAIHVSGTNGTKRFDNPVLPFNDGVYFASTEKSNIIRGWIFGTTLDSKTQSLLIVNNATNVVIKVCEFQFCNDPFLGVYYHKNNKSWMESEFRVYSSANNCTFEYVSQPFLMDLEGKQGNFKNLREFVFKNIDGYFNIYSKHTPINLVRDLPQGFSALEPLVDLPIGINITRFQTLLALHRSYLTPGDSSSGWTAGAAAYYVGYLQPRTFLLKYNENGTITDAVDCALDPLSETKCTLKSFTVEKGIYQTSNFRVQPTESIVRFPNITNLCPFGEVFNATRFASVYAWNRKRISNCVADYSVLYNSASFSTFKCYGVSPTKLNDLCFTNVYADSFVIRGDEVRQIAPGQTGKIADYNYKLPDDFTGCVIAWNSNNLDSKVGGNYNYLYRLFRKSNLKPFERDISTEIYQAGSTPCNGVEGFNCYFPLQSYGFQPTNGVGYQPYRVVVLSFELLHAPATVCGPKKSTNLVKNKCVNFNFNGLTGTGVLTESNKKFLPFQQFGRDIADTTDAVRDPQTLEILDITPCSFGGVSVITPGTNTSNQVAVLYQGVNCTEVPVAIHADQLTPTWRVYSTGSNVFQTRAGCLIGAEHVNNSYECDIPIGAGICASYQTQTNSPRRARSVASQSIIAYTMSLGAENSVAYSNNSIACPTNFTISVTTEILPVSMTKTSVDCTMYICGDSTECSNLLLQYGSFCTQLNRALTGIAVEQDKNTQEVFAQVKQIYKTPPIKDFGGFNFSQILPDPSKPSKRSFIEDLLFNKVTLADAGFIKQYGDCLGDIAARDLICAQKFNGLTVLPPLLTDEMIAQYTSALLAGTITSGWTFGAGAALQIPFAMQMAYRFNGIGVTQNVLYENQKLIANQFNSAIGKIQDSLSSTASALGKLQDVVNQNAQALNTLVKQLSSNFGAISSVLNDILSRLDKVEAEVQIDRLITGRLQSLQTYVTQQLIRAAEIRASANLAATKMSECVLGQSKRVDFCGKGYHLMSFPQSAPHGVVFLHVTYVPAQEKNFTTAPAICHDGKAHFPREGVFVSNGTHWFVTQRNFCEPQIITTDNTFVSGNCDVVIGIVNNTVYDPLQPELDSGGSGYIPEAPRDGQAYVRKDGEWVLLSTFL

SEQ ID NO: 10078 - protein, 1177 aa, Artificial Sequence
  SARS-CoV-2/Belgium/BA-02291/2020__EPI_ISL_415159 spike protein (1-1147)(I714C_Y1110C) Foldon construct
MFVFLVLLPLVSSQCVNLTTRTQLPPAYTNSFTRGVYYPDKVFRSSVLHSTQDLFLPFFSNVTWFHAIHVSGTNGTKRFDNPVLPFNDGVYFASTEKSNIIRGWIFGTTLDSKTQSLLIVNNATNVVIKVCEFQFCNDPFLGVYYHKNNKSWMESEFRVYSSANNCTFEYVSQPFLMDLEGKQGNFKNLREFVFKNIDGYFKIYSKHTPINLVRDLPQGFSALEPLVDLPIGINITRFQTLLALHRSYLTPGDSSSGWTAGAAAYYVGYLQPRTFLLKYNENGTITDAVDCALDPLSETKCTLKSFTVEKGIYQTSNFRVQPTESIVRFPNITNLCPFGEVFNATRFASVYAWNRKRISNCVADYSVLYNSASFSTFKCYGVSPTKLNDLCFTNVYADSFVIRGDEVRQIAPGQTGKIADYNYKLPDDFTGCVIAWNSNNLDSKVGGNYNYLYRLFRRSNLKPFERDISTEIYQAGSTPCNGVEGFNCYFPLQSYGFQPTNGVGYQPYRVVVLSFELLPAPATVCGPKKSTNLVKNKCVNFNFNGLTGTGVLTESNKKFLPFQQFGRDIADTTDAVRDPQTLEILDITPCSFGGVSVITPGTNTSNQVAVLYQGVNCTEVPVAIHADQLTPTWRVYSTGSNVFQTRAGCLIGAEHVNNSYECDIPIGAGICASYQTQTNSPRRARSVASQSIIAYTMSLGAENSVAYSNNSIACPTNFTISVTTEILPVSMTKTSVDCTMYICGDSTECSNLLLQYGSFCTQLNRALTGIAVEQDKNTQEVFAQVKQIYKTPPIKDFGGFNFSQILPDPSKPSKRSFIEDLLFNKVTLADAGFIKQYGDCLGDIAARDLICAQKFNGLTVLPPLLTDEMIAQYTSALLAGTITSGWTFGAGAALQIPFAMQMAYRFNGIGVTQNVLYENQKLIANQFNSAIGKIQDSLSSAAPALGKLQDVVNQNAQALNTLVKQLSSNFGAISSVLNDILSRLDKVEAEVQIDRLITGRLQSLQTYVTQQLIRAAEIRASANLAATKMSECVLGQSKRVDFCGKGYHLMSFPQSAPHGVVFLHVTYVPAQEKNFTTAPAICHDGKAHFPREGVFVSNGTHWFVTQRNFCEPQIITTDNTFVSGNCDVVIGIVNNTVYDPLQPELDSGGSGYIPEAPRDGQAYVRKDGEWVLLSTFL

SEQ ID NO: 10079 - protein, 1177 aa, Artificial Sequence
  SARS-CoV-2/USA/WA8-UW5/2020__EPI_ISL_413486 spike protein (1-1147)(I714C_Y1110C) Foldon construct
MFVFLVLLPLVSSQCVNLTTRTQLPPAYTNSFTRGVYYPDKVFRSSVLHSTQDLFLPFFSNVTWFHAIHVSGTNGTKRFDNPVLPFNDGVYFASTEKSNIIRGWIFGTTLDSKTQSLLIVNNATNVVIKVCEFQFCNDPFLGVYYHKNNKSWMESEFRVYSSANNCTFEYVSQPFLMDLEGKQGNFKNLREFVFKNIDGYFKIYSKHTPINLVRDLPQGFSALEPLVDLPIGINITRFQTLLALHRSYLTPGDSSSGWTAGAAAYYVGYLQPRTFLLKYNENGTITDAVDCALDPLSETKCTLKSFTVEKGIYQTSNFRVQPTESIVRFPNITNLCPFGEVFNATRFASVYAWNRKRISNCVADYSVLYNSASFSTFKCYGVSPTKLNDLCFTNVYADSFVIRGDEVRQIAPGQTGKIADYNYKLPDDFTGCVIAWNSNNLDSKVGGNYNYLYRLFRKSNLKPFERDISTEIYQAGSTPCNGVEGFNCYFPLQSYGFQPTNGVGYQPYRVVVLSFELLHAPATVCGPKKSTNLVKNKCVNFNFNGLTGTGVLTESNKKFLPFQQFGRDIADTTDAVRDPQTLEILDITPCSFGGVSVITPGTNTSNQVAVLYQDVNCTEVPVAIHADQLTPTWRVYSTGSNVFQTRAGCLIGAEYVNNSYECDIPIGAGICASYQTQTNSPRRARSVASQSIIAYTMSLGAENSVAYSNNSIACPTNFTISVTTEILPVSMTKTSVDCTMYICGDSTECSNLLLQYGSFCTQLNRALTGIAVEQDKNTQEVFAQVKQIYKTPPIKDFGGFNFSQILPDPSKPSKRSFIEDLLFNKVTLADAGFIKQYGDCLGDIAARDLICAQKFNGLTVLPPLLTDEMIAQYTSALLAGTITSGWTFGAGAALQIPFAMQMAYRFNGIGVTQNVLYENQKLIANQFNSAIGKIQDSLSSTASALGKLQDVVNQNAQALNTLVKQLSSNFGAISSVLNDILSRLDKVEAEVQIDRLITGRLQSLQTYVTQQLIRAAEIRASANLAATKMSECVLGQSKRVDFCGKGYHLMSFPQSAPHGVVFLHVTYVPAQEKNFTTAPAICHDGKAHFPREGVFVSNGTHWFVTQRNFCEPQIITTDNTFVSGNCDVVIGIVNNTVYDPLQPELDSGGSGYIPEAPRDGQAYVRKDGEWVLLSTFL

SEQ ID NO: 10080 - protein, 1177 aa, Artificial Sequence
  SARS-CoV-2/England/20102000506/2020__EPI_ISL_415147 spike protein (1-1147)(I714C_Y1110C) Foldon construct
MFVFLVLLPLVSSQCVNLTTRTQLPPAYTNSFTRGVYYPDKVFRSSVLHSTQDLFLPFFSNVTWFHAIHVSGTNGTKRFDNPVLPFNDGVYFASTEKSNIIRGWIFGTTLDSKTQSLLIVNNATNVVIKVCEFQFCNDPFLGVYYHKNNKSWMESEFRVYSSANNCTFEYVSQPFLMDLEGKQGNFKNLREFVFKNIDGYFKIYSKHTPINLVRDLPQGFSALEPLVDLPIGINITRFQTLLALHRSYLTPGDSSSGWTAGAAAYYVGYLQPRTFLLKYNENGTITDAVDCALDPLSETKCTLKSFTVEKGIYQTSNFRVQPTESIVRFPNITNLCPFGEVFNATRFASVYAWNRKRISNCVADYSVLYNSASFSTFKCYGVSPTKLNDLCFTNVYADSFVIRGDEVRQIAPGQTGKIADYNYKLPDDFTGCVIAWNSNNLDSKVGGNYNYLYRLFRKSNLKPFERDISTEIYQAGSTPCNGVEGFNCYFPLQSYGFQPTNGVGYQPYRVVVLSFELLHAPATVCGPKKSTNLVKNKCVNFNFNGLTGTGVLTESNKKFLPFQQFGRDIADTTDAVRDPQTLEILDITPCSFGGVSVITPGTNTSNQVAVLYQGVNCTEVPVAIHADQLTPTWRVYSTGSNVFQTRAGCLIGAEHVNNSYECDIPIGAGICASYQTQTNSPRRARSVASQSIIAYTMSLGAENSVAYSNNSIACPTNFTISVTTEILPVSMTKTSVDCTMYICGDSTECSNLLLQYGSFCTQLNRALTGIAVEQDKNTQEVFAQVKQIYKTPPIKDFGGFNFSQILPDPSKPSKRSFIEDLLFNKVTLADAGFIKQYGYCLGDIAARDLICAQKFNGLTVLPPLLTDEMIAQYTSALLAGTITSGWTFGAGAALQIPFAMQMAYRFNGIGVTQNVLYENQKLIANQFNSAIGKIQDSLSSTASALGKLQDVVNQNAQALNTLVKQLSSNFGAISSVLNDILSRLDKVEAEVQIDRLITGRLQSLQTYVTQQLIRAAEIRASANLAATKMSECVLGQSKRVDFCGKGYHLMSFPQSAPHGVVFLHVTYVPAQEKNFTTAPAICHDGKAHFPREGVFVSNGTHWFVTQRNFCEPQIITTDNTFVSGNCDVVIGIVNNTVYDPLQPELDSGGSGYIPEAPRDGQAYVRKDGEWVLLSTFL

SEQ ID NO: 10081 - protein, 1177 aa, Artificial Sequence
  SARS-CoV-2/Belgium/VAG-03013/2020__EPI_ISL_415155 spike protein (1-1147)(I714C_Y1110C) Foldon construct
MFVFLVLLPLVSSQCVNLTTRTQLPPAYTNSFTRGVYYPDKVFRSSVLHSTQDLFLPFFSNVTWFHAIHVSGTNGTKRFDNPVLPFNDGVYFASTEKSNIIRGWIFGTTLDSKTQSLLIVNNATNVVIKVCEFQFCNDPFLGVYYHKNNKSWMESEFRVYSSANNCTFEYVSQPFLMDLEGKQGNFKNLREFVFKNIDGYFKIYSKHTPINLVRDLPQGFSALEPLVDLPIGINITRFQTLLALHRSYLTPGDSSSGWTAGAAAYYVGYLQPRTFLLKYNENGTITDAVDCALDPLSETKCTLKSFTVEKGIYQTSNFRVQPTESIVRFPNITNLCPFGEVFNATRFASVYAWNRKRISNCVADYSVLYNSASFSTFKCYGVSPTKLNDLCFTNVYADSFVIRGDEVRQIAPGQTGKIADYNYKLPDDFTGCVIAWNSNNLDSKVGGNYNYLYRLFRKSNLKPFERDISTEIYQAGSTPCNGVEGFNCYFPLQSYGFQPTNGVGYQPYRVVVLSFELLHAPATVCGPKKSTNLVKNKCVNFNFNGLTGTGVLTESNKKFLPFQQFGRDIADTTDAVRDPQTLEILDITPCSFGGVSVITPGTNTSNQVAVLYQGVNCTEVPVAIHADQLTPTWRVYSTGSNVFQTRAGCLIGAEHVNNSYECDIPIGAGICASYQTQTNSPRRARSVASQSIIAYTMSLGAENSVAYSNNSIACPTNFTISVTTEILPVSMTKTSVDCTMYICGDSTECSNLLLQYGSFCTQLNRALTGIAVEQDKNTQEVFAQVKQIYKTPPIKDFGGFNFSQILPDPSKPSKRSFIEDLLFNKVTLADAGFIKQYGDCLGDIAARDLICAQKFNGLTVLPPLLTDEMIAQYTSALLAGTITSGWTFGAGAALQIPFAMQMAYRFNGIGVTQNVLYENQKLIANQFNSAIGKIQDSLSSTATALGKLQDVVNQNAQALNTLVKQLSSNFGAISSVLNDILSRLDKVEAEVQIDRLITGRLQSLQTYVTQQLIRAAEIRASANLAATKMSECVLGQSKRVDFCGKGYHLMSFPQSAPHGVVFLHVTYVPAQEKNFTTAPAICHDGKAHFPREGVFVSNGTHWFVTQRNFCEPQIITTDNTFVSGNCDVVIGIVNNTVYDPLQPELDSGGSGYIPEAPRDGQAYVRKDGEWVLLSTFL

SEQ ID NO: 10082 - protein, 1177 aa, Artificial Sequence
  SARS-CoV-2/Belgium/BC-03016/2020__EPI_ISL_415157 spike protein (1-1147)(I714C_Y1110C) Foldon construct
MFVFLVLLPLVSSQCVNLTTRTQLPPAYTNSFTRGVYYPDKVFRSSVLHSTQDLFLPFFSNVTWFHAIHVSGTNGTKRFDNPVLPFNDGVYFASTEKSNIIRGWIFGTTLDSKTQSLLIVNNATNVVIKVCEFQFCNDPFLGVYYHKNNKSWMESEFRVYSSANNCTFEYVSQPFLMDLEGKQGNFKNLREFVFKNIDGYFKIYSKHTPINLVRDLPQGFSALEPLVDLPIGINITRFQTLLALHRSYLTPGDSSSGWTAGAAAYYVGYLQPRTFLLKYNENGTITDAVDCALDPLSETKCTLKSFTVEKGIYQTSNFRVQPTESIVRFPNITNLCPFGEVFNATRFASVYAWNRKRISNCVADYSVLYNSASFSTFKCYGVSPTKLNDLCFTNVYADSFVIRGDEVRQIAPGQTGKIADYNYKLPDDFTGCVIAWNSNNLDSKVGGNYNYLYRLFRKSNLKPFERDISTEIYQAGSTPCNGVEGFNCYFPLQSYGFQPTNGVGYQPYRVVVLSFELLHAPATVCGPKKSTNLVKNKCVNFNFNGLTGTGVLTESNKKFLPFQQFGRDIADTTDAVRDPQTLEILDITPCSFGGVSVITPGTNTSNQVAVLYQGVNCTEVPVAIHADQLTPTWRVYSTGSNVFQTRAGCLIGAEHVNNSYECDIPIGAGICASYQTQTNSPRRARSVASQSIIAYTMSLGAENSVAYSNNSIACPTNFTISVTTEILPVSMTKTSVDCTMYICGDSTECSNLLLQYGSFCTQLNRALTGIAVEQDKNTQEVFAQVKQIYKTPPIKDFGGFNFSQILPDPSKPSKRSFIEDLLFNKVTLADAGFIKQYGDCLGDIAARDLICAQKFNGLTVLPPLLTDEMIAQYTSALLAGTITSGWTFGAGAALQIPFAMQMAYRFNGIGVTQNVLYENQKLIANQFNSAIGKIQDSLSSTAPALGKLQDVVNQNAQALNTLVKQLSSNFGAISSVLNDILSRLDKVEAEVQIDRLITGRLQSLQTYVTQQLIRAAEIRASANLAATKMSECVLGQSKRVDFCGKGYHLMSFPQSAPHGVVFLHVTYVPAQEKNFTTAPAICHDGKAHFPREGVFVSNGTHWFVTQRNFCEPQIITTDNTFVSGNCDVVIGIVNNTVYDPLQPELDSGGSGYIPEAPRDGQAYVRKDGEWVLLSTFL

SEQ ID NO: 10083 - protein, 1177 aa, Artificial Sequence
  SARS-CoV-2/Germany/BavPat3/2020__EPI_ISL_414521 spike protein (1-1147)(I714C_Y1110C) Foldon construct
MFVFLVLLPLVSSQCVNLTTRTQLPPAYTNSFTRGVYYPDKVFRSSVLHSTQDLFLPFFSNVTWFHAIHVSGTNGTKRFDNPVLPFNDGVYFASTEKSNIIRGWIFGTTLDSKTQSLLIVNNATNVVIKVCEFQFCNDPFLGVYYHKNNKSWMESEFRVYSSANNCTFEYVSQPFLMDLEGKQGNFKNLREFVFKNIDGYFKIYSKHTPINLVRDLPQGFSALEPLVDLPIGINITRFQTLLALHRSYLTPGDSSSGWTAGAAAYYVGYLQPRTFLLKYNENGTITDAVDCALDPLSETKCTLKSFTVEKGIYQTSNFRVQPTESIVRFPNITNLCPFGEVFNATRFASVYAWNRKRISNCVADYSVLYNSASFSTFKCYGVSPTKLNDLCFTNVYADSFVIRGDEVRQIAPGQTGKIADYNYKLPDDFTGCVIAWNSNNLDSKVGGNYNYLYRLFRKSNLKPFERDISTEIYQAGSTPCNGVEGFNCYFPLQSYGFQPTNGVGYQPYRVVVLSFELLHAPATVCGPKKSTNLVKNKCVNFNFNGLTGTGVLTESNKKFLPFQQFGRDIADTTDAVRDPQTLEILDITPCSFGGVSVITPGTNTSNQVAVLYQDVNCTEVPVAIHADQLTPTWRVYSTGSNVFQTRAGCLIGAEHVNNSYECDIPIGAGICASYQTQTNSPRRARSVASQSIIAYTMSLGAENSVAYSNNSIACPTNFTISVTTEILPVSMTKTSVDCTMYICGDSTECSNLLLQYGSFCTQLNRALTGIAVEQDKNTQQVFAQVKQIYKTPPIKDFGGFNFSQILPDPSKPSKRSFIEDLLFNKVTLADAGFIKQYGDCLGDIAARDLICAQKFNGLTVLPPLLTDEMIAQYTSALLAGTITSGWTFGAGAALQIPFAMQMAYRFNGIGVTQNVLYENQKLIANQFNSAIGKIQDSLSSTASALGKLQDVVNQNAQALNTLVKQLSSNFGAISSVLNDILSRLDKVEAEVQIDRLITGRLQSLQTYVTQQLIRAAEIRASANLAATKMSECVLGQSKRVDFCGKGYHLMSFPQSAPHGVVFLHVTYVPAQEKNFTTAPAICHDGKAHFPREGVFVSNGTHWFVTQRNFCEPQIITTDNTFVSGNCDVVIGIVNNTVYDPLQPELDSGGSGYIPEAPRDGQAYVRKDGEWVLLSTFL

SEQ ID NO: 10084 - protein, 1177 aa, Artificial Sequence
  SARS-CoV-2/France/HF1805/2020__EPI_ISL_414628 spike protein (1-1147)(I714C_Y1110C) Foldon construct
MFVFLVLLPLVSSQCVNLTTRTQLPPAYTNSFTRGVYYPDKVFRSSVLHSTQDLFLPFFSNVTWFHAIHVSGTNGTKRFDNPVLPFNDGVYFASTEKSNIIRGWIFGTTLDSKTQSLLIVNNATNVVIKVCEFQFCNDPFLGVYYHKNNKSWMESEFRVYSSANNCTFEYVSQPFLMDLEGKQGNFKNLREFVFKNIDGYFKIYSKHTPINLVRDLPQGFSALEPLVDLPIGINITRFQTLLALHRSYLTPGDSSSGWTAGAAAYYVGYLQPRTFLLKYNENGTITDAVDCALDPLSETKCTLKSFTVEKGIYQTSNFRVQPTESIVRFPNITNLCPFGEVFNATRFASVYAWNRKRISNCVADYSVLYNSASFSTFKCYGVSPTKLNDLCFTNVYADSFVIRGDEVRQIAPGQTGKIADYNYKLPDDFTGCVIAWNSNNLDSKVGGNYNYLYRLFRKSNLKPFERDISTEIYQAGSTPCNGVEGFNCYFPLQSYGFQPTNGVGYQPYRVVVLSFELLHAPATVCGPKKSTNLVKNKCVNFNFNGLTGTGVLTESNKKFLPFQQFGRDIADTTDAVRDPQTLEILDITPCSFGGVSVITPGTNTSNQVAVLYQGVNCTEVPVAIHADQLTPTWRVYSTGSNVFQTRAGCLIGAEHVNNSYECDIPIGAGICASYQTQTNSPRRARSVASQSIIAYTMSLGAENSVAYSNNSIACPTNFTISVTTEILPVSMTKTSVDCTMYICGDSTECSNLLLQYGSFCTQLNRALTGIAVEQDKNTQEVFAQVKQIYKTPPIKDFGGFNFSQILPDPSKPSKRSFIEDLLFNKVTLADAGFIKQYGDCLGDIAARDLICAQKFNGLTVLPPLLTDEMIAQYTSALLAGTITSGWTFGAGAALQIPFAMQMAYRFNGIGVTQNVLYENQKLIANQFNSAIGKIQDSLSSTASALGKLQDVVNQNAQALNTLVKQLSSNFGAISSVLNDILSRLDKVEAEVQIDRLITGRLQSLQTYVTQQLIRAAEIRASANLAATKMSECVLGQSKRVDFCGKGYHLMSFPQSAPHGVVFLHVTYVPAQEKNFTTAPAICHDGKAHFPREGVFVSNGTHWFVTQRNFCEPQIITTDNTFVSGNCDVVIGVVNNTVYDPLQPELDSGGSGYIPEAPRDGQAYVRKDGEWVLLSTFL

SEQ ID NO: 10085 - protein, 1177 aa, Artificial Sequence
  SARS-CoV-2/Netherlands/ZuidHolland_9/2020__EPI_ISL_414445 spike protein (1-1147)(I714C_Y1110C) Foldon construct
MFVFLVLLPLVSSQCVNLTTRTQLPPAYTNSFTRGVYYPDKVFRSSVLHSTQDLFLPFFSNVTWFHAIHVSGTNGTKRFDNPVLPFNDGVYFASTEKSNIIRGWIFGTTLDSKTQSLLIVNNATNVVIKVCEFQFCNDPFLGVYYHKNNKSWMESEFRVYSSANNCTFEYVSQPFLMDLEGKQGNFKNLREFVFKNIDGYFKIYSKHTPINLVRDLPQGFSALEPLVDLPIGINITRFQTLLALHRSYLTPGDSSSGWTAGAAAYYVGYLQPRTFLLKYNENGTITDAVDCALDPLSETKCTLKSFTVEKGIYQTSNFRVQPTESIVRFPNITNLCPFGEVFNATRFASVYAWNRKRISNCVADYSVLYNSASFSTFKCYGVSPTKLNDLCFTNVYADSFVIRGDEVRQIAPGQTGKIADYNYKLPDDFTGCVIAWNSNNLDSKVGGNYNYLYRLFRKSNLKPFERDISTEIYQAGSTPCNGVEGFNCYFPLQSYGFQPTNGVGYQPYRVVVLSFELLHAPATVCGPKKSTNLVKNKCVNFNFNGLTGTGVLTESNKKFLPFQQFGRDIADTTDAVRDPQTLEILDITPCSFGGVSVITPGTNTSNQVAVLYQGVNCTEVPVAIHADQLTPTWRVYSTGSNVFQTRAGCLIGAEHVNNSYECDIPIGAGICASYQTQTNSPRRARSVASQSIIAYTMSLGAENSVAYSNNSIACPTNFTISVTTEILPVSMTKTSVDCTMYICGDSTECSNLLLQYGSFCTQLNRALTGIAVEQDKNTQEVFAQVKQIYKTPPIKDFGGFNFSQILPDPSKPSKRSFIEDLLFNKVTLADAGFIKQYGDCLGDIAARDLICVQKFNGLTVLPPLLTDEMIAQYTSALLAGTITSGWTFGAGAALQIPFAMQMAYRFNGIGVTQNVLYENQKLIANQFNSAIGKIQDSLSSTASALGKLQDVVNQNAQALNTLVKQLSSNFGAISSVLNDILSRLDKVEAEVQIDRLITGRLQSLQTYVTQQLIRAAEIRASANLAATKMSECVLGQSKRVDFCGKGYHLMSFPQSAPHGVVFLHVTYVPAQEKNFTTAPAICHDGKAHFPREGVFVSNGTHWFVTQRNFCEPQIITTDNTFVSGNCDVVIGIVNNTVYDPLQPELDSGGSGYIPEAPRDGQAYVRKDGEWVLLSTFL

SEQ ID NO: 10086 - protein, 1177 aa, Artificial Sequence
  SARS-CoV-2/Finland/FIN03032020A/2020__EPI_ISL_413602 spike protein (1-1147)(I714C_Y1110C) Foldon construct
MFVFLVLLPLVSSQCVNLTTRTQLPPAYTNSFTRGVYYPDKVFRSSVLHSTQDLFLPFFSNVTWFHAIHVSGTNGTKRFDNPVLPFNDGVYFASTEKSNIIRGWIFGTTLDSKTQSLLIVNNATNVVIKVCEFQFCNDPFLGVYYHKNNKSWMESEFRVYSSANNCTFEYVSQPFLMDLEGKQGNFKNLREFVFKNIDGYFKIYSKHTPINLVRDLPQGFSALEPLVDLPIGINITRFQTLLALHRSYLTPGDSSSGWTAGAAAYYVGYLQPRTFLLKYNENGTITDAVDCALDPLSETKCTLKSFTVEKGIYQTSNFRVQPTESIVRFPNITNLCPFGEVFNATRFASVYAWNRKRISNCVADYSVLYNSASFSTFKCYGVSPTKLNDLCFTNVYADSFVIRGDEVRQIAPGQTGKIADYNYKLPDDFTGCVISWNSNNLDSKVGGNYNYLYRLFRKSNLKPFERDISTEIYQAGSTPCNGVEGFNCYFPLQSYGFQPTNGVGYQPYRVVVLSFELLHAPATVCGPKKSTNLVKNKCVNFNFNGLTGTGVLTESNKKFLPFQQFGRDIADTTDAVRDPQTLEILDITPCSFGGVSVITPGTNTSNQVAVLYQGVNCTEVPVAIHADQLTPTWRVYSTGSNVFQTRAGCLIGAEHVNNSYECDIPIGAGICASYQTQTNSPRRARSVASQSIIAYTMSLGAENSVAYSNNSIACPTNFTISVTTEILPVSMTKTSVDCTMYICGDSTECSNLLLQYGSFCTQLNRALTGIAVEQDKNTQEVFAQVKQIYKTPPIKDFGGFNFSQILPDPSKPSKRSFIEDLLFNKVTLADAGFIKQYGDCLGDIAARDLICAQKFNGLTVLPPLLTDEMIAQYTSALLAGTITSGWTFGAGAALQIPFAMQMAYRFNGIGVTQNVLYENQKLIANQFNSAIGKIQDSLSSTASALGKLQDVVNQNAQALNTLVKQLSSNFGAISSVLNDILSRLDKVEAEVQIDRLITGRLQSLQTYVTQQLIRAAEIRASANLAATKMSECVLGQSKRVDFCGKGYHLMSFPQSAPHGVVFLHVTYVPAQEKNFTTAPAICHDGKAHFPREGVFVSNGTHWFVTQRNFCEPQIITTDNTFVSGNCDVVIGIVNNTVYDPLQPELDSGGSGYIPEAPRDGQAYVRKDGEWVLLSTFL

SEQ ID NO: 10087 - protein, 1177 aa, Artificial Sequence
  SARS-CoV-2/France/GE1977/2020__EPI_ISL_414632 spike protein (1-1147)(I714C_Y1110C) Foldon construct
MFVFLVLLPLVSSQCVNLTTRTQLPPAYTNSFTRGVYYPDKVFRSSVLHSTQDLFLPFFSNVTWFHAIHVSGTNGTKRFDNPVLPFNDGVYFASTEKSNIIRGWIFGTTLDSKTQSLLIVNNATNVVIKVCEFQFCNDPFLGVYYHKNNKSWMESEFRVYSSANNCTFEYVSQPFLMDLEGKQGNFKNLREFVFKNIDGYFKIYSKHTPINLVRDLPQGFSALEPLVDLPIGINITRFQTLLALHRSYLTPGDSSSGWTAGAAAYYVGYLQPRTFLLKYNENGTITDAVDCALDPLSETKCTLKSFTVEKGIYQTSNFRVQPTESIVRFPNITNLCPFGEVFNATRFASVYAWNRKRISNCVADYSVLYNSASFSTFKCYGVSPTKLNDLCFTNVYADSFVIRGDEVRQIAPGQTGKIADYNYKLPDDFTGCVIAWNSNNLDSKVGGNYNYLYRLFRKSNLKPFERDISTEIYQAGSTPCNGVEGFNCYFPLQSYGFQPTNGVGYQPYRVVVLSFELLHAPATVCGPKKSTNLVKNKCVNFNFNGLTGTGVLTESNKKFLPFQQFGRDIADTTDAVRDPQTLEILDITPCSFGGVSVITPGTNTSNQVAVLYQGVNCTEVPVAIHADQLTPTWRVYSTGSNVFQTRAGCLIGAEHVNNSYECDIPIGAGICASYQTQTNSPRRARSVASQSIIAYTMSLGAENSVAYSNNSIACPTNFTISVTTEILPVSMTKTSVDCTMYICGDSTECSNLLLQYGSFCTQLNRALTGIAVEQDKNTQEVFAQVKQIYKTPPIKDFGGFNFSQILPDPSKPSKRSFIEDLLFNKVTLADAGFIKQYGDCLGDIAARDLICAQKFNGLTVLPPLLTDEMIAQYTSALLAGTITSGWTFGAGAALQIPFAMQMAYRFNGIGVTQNVLYENQKLIANQFNSAIGKIQDSLFSTASALGKLQDVVNQNAQALNTLVKQLSSNFGAISSVLNDILSRLDKVEAEVQIDRLITGRLQSLQTYVTQQLIRAAEIRASANLAATKMSECVLGQSKRVDFCGKGYHLMSFPQSAPHGVVFLHVTYVPAQEKNFTTAPAICHDGKAHFPREGVFVSNGTHWFVTQRNFCEPQIITTDNTFVSGNCDVVIGIVNNTVYDPLQPELDSGGSGYIPEAPRDGQAYVRKDGEWVLLSTFL

SEQ ID NO: 10088 - protein, 1177 aa, Artificial Sequence
  SARS-CoV-2/Finland/FIN-313/2020__EPI_ISL_414641 spike protein (1-1147)(I714C_Y1110C) Foldon construct
MFVFLVLLPLVSSQCVNLTTRTQLPPAYTNSFTRGVYYPDKVFRSSVLHSTQDLFLPFFSNVTWFHAIHVSGTNGTKRFDNPVLPFNDGVYFASTEKSNIIRGWIFGTTLDSKTQSLLIVNNATNVVIKVCEFQFCNDPFLGVYYHKNNKSWMESEFRVYSSANNCTFEYVSQPFLMDLEGKQGNFKNLREFVFKNIDGYFKIYSKHTPINLVRDLPQGFSALEPLVDLPIGINITRFKTLLALHRSYLTPGDSSSGWTAGAAAYYVGYLQPRTFLLKYNENGTITDAVDCALDPLSETKCTLKSFTVEKGIYQTSNFRVQPTESIVRFPNITNLCPFGEVFNATRFASVYAWNRKRISNCVADYSVLYNSASFSTFKCYGVSPTKLNDLCFTNVYADSFVIRGDEVRQIAPGQTGKIADYNYKLPDDFTGCVIAWNSNNLDSKVGGNYNYLYRLFRKSNLKPFERDISTEIYQAGSTPCNGVEGFNCYFPLQSYGFQPTNGVGYQPYRVVVLSFELLHAPATVCGPKKSTNLVKNKCVNFNFNGLTGTGVLTESNKKFLPFQQFGRDIADTTDAVRDPQTLEILDITPCSFGGVSVITPGTNTSNQVAVLYQGVNCTEVPVAIHADQLTPTWRVYSTGSNVFQTRAGCLIGAEHVNNSYECDIPIGAGICASYQTQTNSPRRARSVASQSIIAYTMSLGAENSVAYSNNSIACPTNFTISVTTEILPVSMTKTSVDCTMYICGDSTECSNLLLQYGSFCTQLNRALTGIAVEQDKNTQEVFAQVKQIYKTPPIKDFGGFNFSQILPDPSKPSKRSFIEDLLFNKVTLADAGFIKQYGDCLGDIAARDLICAQKFNGLTVLPPLLTDEMIAQYTSALLAGTITSGWTFGAGAALQIPFAMQMAYRFNGIGVTQNVLYENQKLIANQFNSAIGKIQDSLSSTASALGKLQDVVNQNAQALNTLVKQLSSNFGAISSVLNDILSRLDKVEAEVQIDRLITGRLQSLQTYVTQQLIRAAEIRASANLAATKMSECVLGQSKRVDFCGKGYHLMSFPQSAPHGVVFLHVTYVPAQEKNFTTAPAICHDGKAHFPREGVFVSNGTHWFVTQRNFCEPQIITTDNTFVSGNCDVVIGIVNNTVYDPLQPELDSGGSGYIPEAPRDGQAYVRKDGEWVLLSTFL

SEQ ID NO: 10089 - protein, 1177 aa, Artificial Sequence
  SARS-CoV-2/Netherlands/ZuidHolland_2/2020__EPI_ISL_414556 spike protein (1-1147)(I714C_Y1110C) Foldon construct
MFVFLVLLPLVSSQCVNLTTRTQLPPAYTNSFTRGVYYPDKVFRSSVLHSTQDLFLPFFSNVTWFHAIHVSGTNGTKRFDNPVLPFNDGVYFASTEKSNIIRGWIFGTTLDSKTQSLLIVNNATNVVIKVCEFQFCNDPFLGVYYHKNNKSWMESEFRVYSSANNCTFEYVSQPFLMDLEGKQGNFKNLREFVFKNIDGYFKIYSKHTPINLVRDLPQGFSALEPLVDLPIGINITRFQTLLALHRSYLTPGDSSSGWTAGAAAYYVGYLQPRTFLLKYNENGTITDAVDCALDPLSETKCTLKSFTVEKGIYQTSNFRVQPTESIVRFPNITNLCPFGEVFNATRFASVYAWNRKRISNCVADYSVLYNSASFSTFKCYGVSPTKLNDLCFTNVYADSFVIRGDEVRQIAPGQTGKIADYNYKLPDDFTGCVIAWNSNNLDSKVGGNYNYLYRLFRKSNLKPFERDISTEIYQAGSTPCNGVEGFNCYFPLQSYGFQPTNGVGYQPYRVVVLSFELLHAPATVCGPKKSTNLVKNKCVNFNFNGLTGTGVLTESNKKFLPFQQFGRDIADTTDAVRDPQTLEILDITPCSFGGVSVITPGTNTSNQVAVLYQGVNCTEVPVAIHADQLTPTWRVYSTGSNVFQTRAGCLIGAEHVNNSYECDIPIGAGICASYQTQTNSPRRARSVASQSIIAYTMSLGAENSVAYSNNSIACPTNFTISVTTEILPVSMTKTSVDCTMYICGDSTECSNLLLQYGSFCTQLNRALTGIALEQDKNTQEVFAQVKQIYKTPPIKDFGGFNFSQILPDPSKPSKRSFIEDLLFNKVTLADAGFIKQYGDCLGDIAARDLICAQKFNGLTVLPPLLTDEMIAQYTSALLAGTITSGWTFGAGAALQIPFAMQMAYRFNGIGVTQNVLYENQKLIANQFNSAIGKIQDSLSSTASALGKLQDVVNQNAQALNTLVKQLSSNFGAISSVLNDILSRLDKVEAEVQIDRLITGRLQSLQTYVTQQLIRAAEIRASANLAATKMSECVLGQSKRVDFCGKGYHLMSFPQSAPHGVVFLHVTYVPAQEKNFTTAPAICHDGKAHFPREGVFVSNGTHWFVTQRNFCEPQIITTDNTFVSGNCDVVIGIVNNTVYDPLQPELDSGGSGYIPEAPRDGQAYVRKDGEWVLLSTFL

SEQ ID NO: 10090 - protein, 1177 aa, Artificial Sequence
  SARS-CoV-2/USA/WA-UW31/2020__EPI_ISL_414618 spike protein (1-1147)(I714C_Y1110C) Foldon construct
MFVFLVLLPLVSSQCVNLTTRTQLPPAYTNSFTRGVYYPDKVFRSSVLHSTQDLFLPFFSNVTWFHAIHVSGTNGTKRFDNPVLPFNDGVYFASTEKSNIIRGWIFGTTLDSKTQSLLIVNNATNVVIKVCEFQFCNDPFLGVYYHKNNKSWMESEFRVYSSANNCTFEYVSQPFLMDLEGKQGNFKNLREFVFKNIDGYFKIYSKHTPINLVRDLPQGFSALEPLVDLPIGINITRFQTLLALHRSYLTPGDSSSGWTAGAAAYYVGYLQPRTFLLKYNENGTITDAVDCALDPLSETKCTLKSFTVEKGIYQTSNFRVQPTESIVRFPNITNLCPFGEVFNATRFASVYAWNRKRISNCVADYSVLYNSASFSTFKCYGVSPTKLNDLCFTNVYADSFVIRGDEVRQIAPGQTGKIADYNYKLPDDFTGCVIAWNSNNLDSKVGGNYNYLYRLFRKSNLKPFERDISTEIYQAGSTPCNGAEGFNCYFPLQSYGFQPTNGVGYQPYRVVVLSFELLHAPATVCGPKKSTNLVKNKCVNFNFNGLTGTGVLTESNKKFLPFQQFGRDIADTTDAVRDPQTLEILDITPCSFGGVSVITPGTNTSNQVAVLYQDVNCTEVPVAIHADQLTPTWRVYSTGSNVFQTRAGCLIGAEHVNNSYECDIPIGAGICASYQTQTNSPRRARSVASQSIIAYTMSLGAENSVAYSNNSIACPTNFTISVTTEILPVSMTKTSVDCTMYICGDSTECSNLLLQYGSFCTQLNRALTGIAVEQDKNTQEVFAQVKQIYKTPPIKDFGGFNFSQILPDPSKPSKRSFIEDLLFNKVTLADAGFIKQYGDCLGDIAARDLICAQKFNGLTVLPPLLTDEMIAQYTSALLAGTITSGWTFGAGAALQIPFAMQMAYRFNGIGVTQNVLYENQKLIANQFNSAIGKIQDSLSSTASALGKLQDVVNQNAQALNTLVKQLSSNFGAISSVLNDILSRLDKVEAEVQIDRLITGRLQSLQTYVTQQLIRAAEIRASANLAATKMSECVLGQSKRVDFCGKGYHLMSFPQSAPHGVVFLHVTYVPAQEKNFTTAPAICHDGKAHFPREGVFVSNGTHWFVTQRNFCEPQIITTDNTFVSGNCDVVIGIVNNTVYDPLQPELDSGGSGYIPEAPRDGQAYVRKDGEWVLLSTFL

SEQ ID NO: 10091 - protein, 1177 aa, Artificial Sequence
  SARS-CoV-2/South Korea/SNU01/2020__EPI_ISL_411929 spike protein (1-1147)(I714C_Y1110C) Foldon construct
MFVFLVLLPLVSSQCVNLTTRTQLPPAYTNSFTRGVYYPDKVFRSSVLHSTQDLFLPFFSNVTWFHAIHVSGTNGTKRFDNPVLPFNDGVYFASTEKSNIIRGWIFGTTLDSKTQSLLIVNNATNVVIKVCEFQFCNDPFLGVYYHKNNKSWMESEFRVYSSANNCTFEYVSQPFLMDLEGKQGNFKNLREFVFKNIDGYFKIYSKHTPINLVRDLPQGFWALEPLVDLPIGINITRFQTLLALHRSYLTPGDSSSGWTAGAAAYYVGYLQPRTFLLKYNENGTITDAVDCALDPLSETKCTLKSFTVEKGIYQTSNFRVQPTESIVRFPNITNLCPFGEVFNATRFASVYAWNRKRISNCVADYSVLYNSASFSTFKCYGVSPTKLNDLCFTNVYADSFVIRGDEVRQIAPGQTGKIADYNYKLPDDFTGCVIAWNSNNLDSKVGGNYNYLYRLFRKSNLKPFERDISTEIYQAGSTPCNGVEGFNCYFPLQSYGFQPTNGVGYQPYRVVVLSFELLHAPATVCGPKKSTNLVKNKCVNFNFNGLTGTGVLTESNKKFLPFQQFGRDIADTTDAVRDPQTLEILDITPCSFGGVSVITPGTNTSNQVAVLYQDVNCTEVPVAIHADQLTPTWRVYSTGSNVFQTRAGCLIGAEHVNNSYECDIPIGAGICASYQTQTNSPRRARSVASQSIIAYTMSLGAENSVAYSNNSIACPTNFTISVTTEILPVSMTKTSVDCTMYICGDSTECSNLLLQYGSFCTQLNRALTGIAVEQDKNTQEVFAQVKQIYKTPPIKDFGGFNFSQILPDPSKPSKRSFIEDLLFNKVTLADAGFIKQYGDCLGDIAARDLICAQKFNGLTVLPPLLTDEMIAQYTSALLAGTITSGWTFGAGAALQIPFAMQMAYRFNGIGVTQNVLYENQKLIANQFNSAIGKIQDSLSSTASALGKLQDVVNQNAQALNTLVKQLSSNFGAISSVLNDILSRLDKVEAEVQIDRLITGRLQSLQTYVTQQLIRAAEIRASANLAATKMSECVLGQSKRVDFCGKGYHLMSFPQSAPHGVVFLHVTYVPAQEKNFTTAPAICHDGKAHFPREGVFVSNGTHWFVTQRNFCEPQIITTDNTFVSGNCDVVIGIVNNTVYDPLQPELDSGGSGYIPEAPRDGQAYVRKDGEWVLLSTFL

SEQ ID NO: 10092 - protein, 1177 aa, Artificial Sequence
  SARS-CoV-2/China/WF0004/2020__EPI_ISL_413694 spike protein (1-1147)(I714C_Y1110C) Foldon construct
MFVFLVLLPLVSSQCVNLTTRTQLPPAYTNSFTRGVYYPDKVFRSSVLHSTQDLFLPFFSNVTWFHAIHVSGTNGTKRFDNPVLPFNDGVYFASTEKSNIIRGWIFGTTLDSKTQSLLIVNNATNVVIKVCEFQFCNDPFLGVYYHKNNKSWTESEFRVYSSANNCTFEYVSQPFLMDLEGKQGNFKNLREFVFKNIDGYFKIYSKHTPINLVRDLPQGFSALEPLVDLPIGINITRFQTLLALHRSYLTPGDSSSGWTAGAAAYYVGYLQPRTFLLKYNENGTITDAVDCALDPLSETKCTLKSFTVEKGIYQTSNFRVQPTESIVRFPNITNLCPFGEVFNATRFASVYAWNRKRISNCVADYSVLYNSASFSTFKCYGVSPTKLNDLCFTNVYADSFVIRGDEVRQIAPGQTGKIADYNYKLPDDFTGCVIAWNSNNLDSKVGGNYNYLYRLFRKSNLKPFERDISTEIYQAGSTPCNGVEGFNCYFPLQSYGFQPTNGVGYQPYRVVVLSFELLHAPATVCGPKKSTNLVKNKCVNFNFNGLTGTGVLTESNKKFLPFQQFGRDIADTTDAVRDPQTLEILDITPCSFGGVSVITPGTNTSNQVAVLYQDVNCTEVPVAIHADQLTPTWRVYSTGSNVFQTRAGCLIGAEHVNNSYECDIPIGAGICASYQTQTNSPRRARSVASQSIIAYTMSLGAENSVAYSNNSIACPTNFTISVTTEILPVSMTKTSVDCTMYICGDSTECSNLLLQYGSFCTQLNRALTGIAVEQDKNTQEVFAQVKQIYKTPPIKDFGGFNFSQILPDPSKPSKRSFIEDLLFNKVTLADAGFIKQYGDCLGDIAARDLICAQKFNGLTVLPPLLTDEMIAQYTSALLAGTITSGWTFGAGAALQIPFAMQMAYRFNGIGVTQNVLYENQKLIANQFNSAIGKIQDSLSSTASALGKLQDVVNQNAQALNTLVKQLSSNFGAISSVLNDILSRLDKVEAEVQIDRLITGRLQSLQTYVTQQLIRAAEIRASANLAATKMSECVLGQSKRFDFCGKGYHLMSFPQSAPHGVVFLHVTYVPAQEKNFTTAPAICHDGKAHFPREGVFVSNGTHWFVTQRNFCEPQIITTDNTFVSGNCDVVIGIVNNTVYDPLQPELDSGGSGYIPEAPRDGQAYVRKDGEWVLLSTFL

SEQ ID NO: 10093 - protein, 1177 aa, Artificial Sequence
  SARS-CoV-2/China/WF0028/2020__EPI_ISL_413791 spike protein (1-1147)(I714C_Y1110C) Foldon construct
MFVFLVLLPLVSSQCVNLTTRTQLPPAYTNSFTRGVYYPDKVFRSSVLHSTQDLFLPFFSNVTWFHAIHVSGTNGTKRFDNPVLPFNDGVYFASTEKSNIIRGWIFGTTLDSKTQSLLIVNNATNVVIKVCEFQFCNDPFLGVYYHKNNKSWMESEFRVYSSANNCTFEYVSQPFLMDLEGKQGNFKNLREFVFKNIDGYFKIYSKHTPINLVRDLPQGFSALEPLVDLPIGINITRFQTLLALHRSYLTPGDSSSGWTAGAAAYYVGYLQPRTFLLKYNENGTITDAVDCALDPLSETKCTLKSFTVEKGIYQTSNFRVQPTESIVRFPNITNLCPFGEVFNATRFASVYAWNRKRISNCVADYSVLYNSASFSTFKCYGVSPTKLNDLCFTNVYADSFVIRGDEVRQIAPGQTGKIADYNYKLPDDFTGCVIAWNSNNLDSKVGGNYNYLYRLFRKSNLKPFERDISTEIYQAGSTPCNGVEGFNCYFPLQSYGFQPTNGVGYQPYRVVVLSFELLHAPATVCGPKKSTNLVKNKCVNFNFNGLTGTGVLTESNKKFLPFQQFGRDIADTTDAVRDPQTLEILDITPCSFGGVSVITPGTNTSNQVAVLYQDVNCTEVPVAIHADQLTPTWRVYSTGSNVFQTRAGCLIGAEHVNNSYECDIPIGAGICASYQTQTNSPRRARSVASQSIIAYTMSLGAENSVAYSNNSIACPTNFTISVTTEILPVSMTKTSVDCTMYICGDSTECSNLLLQYGSFCTQLNRALTGIAVEQDKNTQEVFAQVKQIYKTPPIKDFGGFNFSQILPDPSKPSKRSFIEDLLFNKVTLADAGFIKQYGDCLGDIAARDLICAQKFNGLTVLPPLLTDEMIAQYTSALLAGTITSGWTFGAGAALQIPFAMQMAYRFNGIGVTQNVLYENQKLIANQFNSAIGKIQDSLSSTASALGKLQDVVNQNAQALNTLVKQLSSNFGAISSVLNDILSRLDKVEAEVQIDRLITGRLQSLQTYVTQQLIRAAEIRASANLAATKMSECVLGQSKRVDFCGKGYHLMSFPQSAPHGVVFLHVTYVPAQEKNFTTAPAICHDGKAHFPREGVFVSNGTHWFVTQRNFCEPQIITTDNTFVSGNCDVVIGIVNNTVYDPLQPELESGGSGYIPEAPRDGQAYVRKDGEWVLLSTFL

SEQ ID NO: 10094 - protein, 1177 aa, Artificial Sequence
  SARS-CoV-2/2019-nCoV/USA-CruiseA-18/2020__MT159716.1 spike protein (1-1147)(I714C_Y1110C) Foldon construct
MFVFLVLLPLVSSQCVNLTTRTQLPPAYTNSFTRGVYYPDKVFRSSVLHSTQDLFLPFFSNVTWFHAIHVSGTNGTKRFDNPVLPFNDGVYFASTEKSNIIRGWIFGTTLDSKTQSLLIVNNATNVVIKVCEFQFCNDPFLGVYYHKNNKSWMESELRVYSSANNCTFEYVSQPFLMDLEGKQGNFKNLREFVFKNIDGYFKIYSKHTPINLVRDLPQGFSALEPLVDLPIGINITRFQTLLALHRSYLTPGDSSSGWTAGAAAYYVGYLQPRTFLLKYNENGTITDAVDCALDPLSETKCTLKSFTVEKGIYQTSNFRVQPTESIVRFPNITNLCPFGEVFNATRFASVYAWNRKRISNCVADYSVLYNSASFSTFKCYGVSPTKLNDLCFTNVYADSFVIRGDEVRQIAPGQTGKIADYNYKLPDDFTGCVIAWNSNNLDSKVGGNYNYLYRLFRKSNLKPFERDISTEIYQAGSTPCNGVEGFNCYFPLQSYGFQPTNGVGYQPYRVVVLSFELLHAPATVCGPKKSTNLVKNKCVNFNFNGLTGTGVLTESNKKFLPFQQFGRDIADTTDAVRDPQTLEILDITPCSFGGVSVITPGTNTSNQVAVLYQDVNCTEVPVAIHADQLTPTWRVYSTGSNVFQTRAGCLIGAEHVNNSYECDIPIGAGICASYQTQTNSPRRARSVASQSIIAYTMSLGAENSVAYSNNSIACPTNFTISVTTEILPVSMTKTSVDCTMYICGDSTECSNLLLQYGSFCTQLNRALTGIAVEQDKNTQEVFAQVKQIYKTPPIKDFGGFNFSQILPDPSKPSKRSFIEDLLFNKVTLADAGFIKQYGDCLGDIAARDLICAQKFNGLTVLPPLLTDEMIAQYTSALLAGTITSGWTFGAGAALQIPFAMQMAYRFNGIGVTQNVLYENQKLIANQFNSAIGKIQDSLSSTASALGKLQDVVNQNAQALNTLVKQLSSNFGAISSVLNDILSRLDKVEAEVQIDRLITGRLQSLQTYVTQQLIRAAEIRASANLAATKMSECVLGQSKRVDFCGKGYHLMSFPQSAPHGVVFLHVTYVPAQEKNFTTAPAICHDGKAHFPREGVFVSNGTHWFVTQRNFCEPQIITTDNTFVSGNCDVVIGIVNNTVYDPLQPELDSGGSGYIPEAPRDGQAYVRKDGEWVLLSTFL

SEQ ID NO: 10095 - protein, 1177 aa, Artificial Sequence
  SARS-CoV-2/SARS-CoV-2/Yunnan-01/human/2020/CHN__MT049951.1 spike protein (1-1147)(I714C_Y1110C) Foldon construct
MFVFLVLLPLVSSQCVNLTTRTQLPPANTNSFTRGVYYPDKVFRSSVLHSTQDLFLPFFSNVTWFHAIHVSGTNGTKRFDNPVLPFNDGVYFASTEKSNIIRGWIFGTTLDSKTQSLLIVNNATNVVIKVCEFQFCNDPFLGVYYHKNNKSWMESEFRVYSSANNCTFEYVSQPFLMDLEGKQGNFKNLREFVFKNIDGYFKIYSKHTPINLVRDLPQGFSALEPLVDLPIGINITRFQTLLALHRSYLTPGDSSSGWTAGAAAYYVGYLQPRTFLLKYNENGTITDAVDCALDPLSETKCTLKSFTVEKGIYQTSNFRVQPTESIVRFPNITNLCPFGEVFNATRFASVYAWNRKRISNCVADYSVLYNSASFSTFKCYGVSPTKLNDLCFTNVYADSFVIRGDEVRQIAPGQTGKIADYNYKLPDDFTGCVIAWNSNNLDSKVGGNYNYLYRLFRKSNLKPFERDISTEIYQAGSTPCNGVEGFNCYFPLQSYGFQPTNGVGYQPYRVVVLSFELLHAPATVCGPKKSTNLVKNKCVNFNFNGLTGTGVLTESNKKFLPFQQFGRDIADTTDAVRDPQTLEILDITPCSFGGVSVITPGTNTSNQVAVLYQDVNCTEVPVAIHADQLTPTWRVYSTGSNVFQTRAGCLIGAEHVNNSYECDIPIGAGICASYQTQTNSPRRARSVASQSIIAYTMSLGAENSVAYSNNSIACPTNFTISVTTEILPVSMTKTSVDCTMYICGDSTECSNLLLQYGSFCTQLNRALTGIAVEQDKNTQEVFAQVKQIYKTPPIKDFGGFNFSQILPDPSKPSKRSFIEDLLFNKVTLADAGFIKQYGDCLGDIAARDLICAQKFNGLTVLPPLLTDEMIAQYTSALLAGTITSGWTFGAGAALQIPFAMQMAYRFNGIGVTQNVLYENQKLIANQFNSAIGKIQDSLSSTASALGKLQDVVNQNAQALNTLVKQLSSNFGAISSVLNDILSRLDKVEAEVQIDRLITGRLQSLQTYVTQQLIRAAEIRASANLAATKMSECVLGQSKRVDFCGKGYHLMSFPQSAPHGVVFLHVTYVPAQEKNFTTAPAICHDGKAHFPREGVFVSNGTHWFVTQRNFCEPQIITTDNTFVSGNCDVVIGIVNNTVYDPLQPELDSGGSGYIPEAPRDGQAYVRKDGEWVLLSTFL

SEQ ID NO: 10096 - protein, 1177 aa, Artificial Sequence
  SARS-CoV-2/USA/WA-UW292/2020__EPI_ISL_418077 spike protein (1-1147)(I714C_Y1110C) Foldon construct
MFVFLVLLPLVSSQCVNLTTRTQLPPAYTNSFTRGVYYPDKVFRSSVLHSTQDLFLPFFSNVTWFHAIHVSGTNGTKRFDNPVLPFNDGVYFASTEKSNIIRGWIFGTTLDSKTQSLLIVNNATNVVIKVCEFQFCNDPFLGVYYHKNNKSWMESEFRVYSSANNCTFEYVSQPFLMDLEGKQGNFKNLREFVFKNIDGYFKIYSKHTPINLVRDLPQGFSALEPLVDLPIGINITRFQTLLALHRSYLTPGDSSSGWTAGAAAYYVGYLQPRTFLLKYNENGTITDAVDCALDPLSETKCTLKSFTVEKGIYQTSNFRVQPTESIVRFPNITNLCPFGEVFNATRFASVYAWNRKRISNCVADYSVLYNSASFSTFKCYGVSPTKLNDLCFTNVYADSFVIRGDEVRQIAPGQTGKIADYNYKLPDDFTGCVIAWNSNNLDSKVGGNYNYLYRLFRKSNLKPFERDISTEIYQASSTPCNGVEGFNCYFPLQSYGFQPTNGVGYQPYRVVVLSFELLHAPATVCGPKKSTNLVKNKCVNFNFNGLTGTGVLTESNKKFLPFQQFGRDIADTTDAVRDPQTLEILDITPCSFGGVSVITPGTNTSNQVAVLYQDVNCTEVPVAIHADQLTPTWRVYSTGSNVFQTRAGCLIGAEHVNNSYECDIPIGAGICASYQTQTNSPRRARSVASQSIIAYTMSLGAENSVAYSNNSIACPTNFTISVTTEILPVSMTKTSVDCTMYICGDSTECSNLLLQYGSFCTQLNRALTGIAVEQDKNTQEVFAQVKQIYKTPPIKDFGGFNFSQILPDPSKPSKRSFIEDLLFNKVTLADAGFIKQYGDCLGDIAARDLICAQKFNGLTVLPPLLTDEMIAQYTSALLAGTITSGWTFGAGAALQIPFAMQMAYRFNGIGVTQNVLYENQKLIANQFNSAIGKIQDSLSSTASALGKLQDVVNQNAQALNTLVKQLSSNFGAISSVLNDILSRLDKVEAEVQIDRLITGRLQSLQTYVTQQLIRAAEIRASANLAATKMSECVLGQSKRVDFCGKGYHLMSFPQSAPHGVVFLHVTYVPAQEKNFTTAPAICHDGKAHFPREGVFVSNGTHWFVTQRNFCEPQIITTDNTFVSGNCDVVIGIVNNTVYDPLQPELDSGGSGYIPEAPRDGQAYVRKDGEWVLLSTFL

SEQ ID NO: 10097 - protein, 1177 aa, Artificial Sequence
  SARS-CoV-2/Iceland/192/2020__EPI_ISL_417819 spike protein (1-1147)(I714C_Y1110C) Foldon construct
MFVFFVLLPLVSSQCVNLTTRTQLPPAYTNSFTRGVYYPDKVFRSSVLHSTQDLFLPFFSNVTWFHAIHVSGTNGTKRFDNPVLPFNDGVYFASTEKSNIIRGWIFGTTLDSKTQSLLIVNNATNVVIKVCEFQFCNDPFLGVYYHKNNKSWMESEFRVYSSANNCTFEYVSQPFLMDLEGKQGNFKNLREFVFKNIDGYFKIYSKHTPINLVRDLPQGFSALEPLVDLPIGINITRFQTLLALHRSYLTPGDSSSGWTAGAAAYYVGYLQPRTFLLKYNENGTITDAVDCALDPLSETKCTLKSFTVEKGIYQTSNFRVQPTESIVRFPNITNLCPFGEVFNATRFASVYAWNRKRISNCVADYSVLYNSASFSTFKCYGVSPTKLNDLCFTNVYADSFVIRGDEVRQIAPGQTGKIADYNYKLPDDFTGCVIAWNSNNLDSKVGGNYNYLYRLFRKSNLKPFERDISTEIYQAGSTPCNGVEGFNCYFPLQSYGFQPTNGVGYQPYRVVVLSFELLHAPATVCGPKKSTNLVKNKCVNFNFNGLTGTGVLTESNKKFLPFQQFGRDIADTTDAVRDPQTLEILDITPCSFGGVSVITPGTNTSNQVAVLYQGVNCTEVPVAIHADQLTPTWRVYSTGSNVFQTRAGCLIGAEHVNNSYECDIPIGAGICASYQTQTNSPRRARSVASQSIIAYTMSLGAENSVAYSNNSIACPTNFTISVTTEILPVSMTKTSVDCTMYICGDSTECSNLLLQYGSFCTQLNRALTGIAVEQDKNTQEVFAQVKQIYKTPPIKDFGGFNFSQILPDPSKPSKRSFIEDLLFNKVTLADAGFIKQYGDCLGDIAARDLICAQKFNGLTVLPPLLTDEMIAQYTSALLAGTITSGWTFGAGAALQIPFAMQMAYRFNGIGVTQNVLYENQKLIANQFNSAIGKIQDSLSSTASALGKLQDVVNQNAQALNTLVKQLSSNFGAISSVLNDILSRLDKVEAEVQIDRLITGRLQSLQTYVTQQLIRAAEIRASANLAATKMSECVLGQSKRVDFCGKGYHLMSFPQSAPHGVVFLHVTYVPAQEKNFTTAPAICHDGKAHFPREGVFVSNGTHWFVTQRNFCEPQIITTDNTFVSGNCDVVIGIVNNTVYDPLQPELDSGGSGYIPEAPRDGQAYVRKDGEWVLLSTFL

SEQ ID NO: 10098 - protein, 1177 aa, Artificial Sequence
  SARS-CoV-2/Belgium/ULG-6939/2020__EPI_ISL_417020 spike protein (1-1147)(I714C_Y1110C) Foldon construct
MFVFLVLLPLVSSQCVNLTTRTQLPPAYTNSFTRGVYYPDKVFRSSVLHSTQDLFLPFFSNVTWFHAIHVSGTNGTKRFDNPVLPFNDGVYFASTEKSNIIRGWIFGTTLDSKTQSLLIVNNATNVVIKVCEFQFCNDPFLGVYYHKNNKSWMESEFRVYSSANNCTFEYVSQPFLMDLEGKQGNFKNLREFVFKNIDGYFKIYSKHTPINLVRDLPQGFSALEPLVDLPIGINITRFQTLLALHRSYLTPGDSSSGWTAGAAAYYVGYLQPRTFLLKYNENGTITDAVDCALDPLSETKCTLKSFTVEKGIYQTSNFRVQPTESIVRFPNITNLCPFGEVFNATRFASVYAWNRKRISNCVADYSVLYNSASFSTFKCYGVSPTKLNDLCFTNVYADSFVIRGDEVRQIAPGQTGKIADYNYKLPDDFTGCVIAWNSNNLDSKVGGNYNYLYRLFRKSNLKPFERDISTEIYQAGSTPCNGVEGFNCYFPLQSYGFQPTNGVGYQPYRVVVLSFELLHAPATVCGPKKSTNLVKNKCVNFNFNGLTGTGVLTESNKKFLPFQQFGRDIADTTDAVRDPQTLEILDITPCSFGGVSVITPGTNTSNQVAVLYQGVNCTEVPVAIHADQLTPTWRVYSTGSNVFQTRAGCLIGAEHVNNSYECDIPIGAGICASYQTQTNSPRRARSVASQSIIAYTMSLGAENSVVYSNNSIACPTNFTISVTTEILPVSMTKTSVDCTMYICGDSTECSNLLLQYGSFCTQLNRALTGIAVEQDKNTQEVFAQVKQIYKTPPIKDFGGFNFSQILPDPSKPSKRSFIEDLLFNKVTLADAGFIKQYGDCLGDIAARDLICAQKFNGLTVLPPLLTDEMIAQYTSALLAGTITSGWTFGAGAALQIPFAMQMAYRFNGIGVTQNVLYENQKLIANQFNSAIGKIQDSLSSTASALGKLQDVVNQNAQALNTLVKQLSSNFGAISSVLNDILSRLDKVEAEVQIDRLITGRLQSLQTYVTQQLIRAAEIRASANLAATKMSECVLGQSKRVDFCGKGYHLMSFPQSAPHGVVFLHVTYVPAQEKNFTTAPAICHDGKAHFPREGVFVSNGTHWFVTQRNFCEPQIITTDNTFVSGNCDVVIGIVNNTVYDPLQPELDSGGSGYIPEAPRDGQAYVRKDGEWVLLSTFL

SEQ ID NO: 10099 - protein, 1177 aa, Artificial Sequence
  SARS-CoV-2/France/HF2496/2020__EPI_ISL_418231 spike protein (1-1147)(I714C_Y1110C) Foldon construct
MFVFLVLLPLVSSQCVNLTTRTQLPPAYTNSFTRGVYYPDKVFRSSVLHSTQDLFLPFFSNVTWFHAIHVSGTNGTKRFDNPVLPFNDGVYFASTEKSNIIRGWIFGTTLDSKTQSLLIVNNATNVVIKVCEFQFCNDPFLGVYYHKNNKSWMESEFRVYSSANNCTFEYVSQPFLMDLEGKQGNFKNLREFVFKNIDGYFKIYSKHTPINLVRDLPQGFSALEPLVDLPIGINITRFQTLLALHRSYLTPGDSSSGWTAGAAAYYVGYLQPRTFLLKYNENGTITDAVDCALDPLSETKCTLKSFTVEKGIYQTSNFRVQPTESIVRFPNITNLCPFGEVFNATRFASVYAWNRKRISNCVADYSVLYNSASFSTFKCYGVSPTKLNDLCFTNVYADSFVIRGDEVRQIAPGQTGKIADYNYKLPDDFTGCVIAWNSNNLDSKVGGNYNYLYRLFRKSNLKPFERDISTEIYQAGSTPCNGVEGFNCYFPLQSYGFQPTNGVGYQPYRVVVLSFELLHAPATVCGPKKSTNLVKNKCVNFNFNGLTGTGVLTESNKKFLPFQQFGRDIADTTDAVRDPQTLEILDITPCSFGGVSVITPGTNTSNQVAVLYQGVNCTEVPVAIHADQLTPTWRVYSTGSNVFQTRAGCLIGAEHVNNSYECDIPIGAGICASYQTQTNSPRRARSVASQSIIAYTMSLGAENSVAYSNNSIACPTNFTISVTTEILPVSMTKTSVDCTMYICGDSTECSNLLLQYGSFCTQLNRALTGIAVEQDKNTQEVFAQVKQIYKTPPIKDFGGFNFSQILPDPSKPSKRSFIEDLLFNKVTLADAGFIKQYGDCLGDIVARDLICAQKFNGLTVLPPLLTDEMIAQYTSALLAGTITSGWTFGAGAALQIPFAMQMAYRFNGIGVTQNVLYENQKLIANQFNSAIGKIQDSLSSTASALGKLQDVVNQNAQALNTLVKQLSSNFGAISSVLNDILSRLDKVEAEVQIDRLITGRLQSLQTYVTQQLIRAAEIRASANLAATKMSECVLGQSKRVDFCGKGYHLMSFPQSAPHGVVFLHVTYVPAQEKNFTTAPAICHDGKAHFPREGVFVSNGTHWFVTQRNFCEPQIITTDNTFVSGNCDVVIGIVNNTVYDPLQPELDSGGSGYIPEAPRDGQAYVRKDGEWVLLSTFL

SEQ ID NO: 10100 - protein, 1177 aa, Artificial Sequence
  SARS-CoV-2/USA/WA-UW291/2020__EPI_ISL_418076 spike protein (1-1147)(I714C_Y1110C) Foldon construct
MFVFLVLLPLVSSQCVNLTTRTQLPPAYTNSFTRGVYYPDKVFRSSVLHSTQDLFLPFFSNVTWFHAIHVSGTNGTKRFDNPVLPFNDGVYFASTEKSNIIRGWIFGTTLDSKTQSLLIVNNATNVVIKVCEFQFCNDPFLGVYYHKNNKSWMESEFRVYSSANNCTFEYVSQPFLMDLEGKQGNFKNLREFVFKNIDGYFKIYSKHTPINLVRDLPQGFSALEPLVDLPIGINITRFQTLLALHRSYLTPGDSSSGWTAGAAAYYVGYLQPRTFLLKYNENGTITDAVDCALDPLSETKCTLKSFTVEKGIYQTSNFRVQPTESIVRFPNITNLCPFGEVFNATRFASVYAWNRKRISNCVADYSVLYNSASFSTFKCYGVSPTKLNDLCFTNVYADSFVIRGDEVRQIAPGQTGKIADYNYKLPDDFTGCVIAWNSNNLDSKVGGNYNYLYRLFRKSNLKPFERDISTEIYQAGSTPCNGVEGFNCYFPLQSYGFQPTNGVGYQPYRVVVLSFELLHAPATVCGPKKSTNLVKNKCVNFNFNGLTGTGVLTESNKKFLPFQQFGRDIADTTDAVRDPQTLEILDITPCSFGGVSVITPGTNTSNQVAVLYQGVNCTEVPVAIHADQLTPTWRVYSTGSNVFQTRAGCLIGAEHVNNSYECDIPIGAGICASYQTQTNSPRRARSVASQSIIAYTMSLGAENSVAYSNNSIACPTNFTISVTTEILPVSMTKTSVDCTMYICGDSTECSNLLLQYGSFCTQLNRALTGIAVEQDKNTQEVFAQVKQIYKTPPIKDFGGFNFSQILPDPSKPSKRSFIEDLLFNKVTLADAGFIKQYGDCLGDIAARDLICAQKFNGLTVLPPLLTDEMIAQYTSALLAGTITSGWTFGAGAALQIPFAMQMAYRFNGIGVTQNVLYENQKLIANQFNSAIGKIQYSLSSTASALGKLQDVVNQNAQALNTLVKQLSSNFGAISSVLNDILSRLDKVEAEVQIDRLITGRLQSLQTYVTQQLIRAAEIRASANLAATKMSECVLGQSKRVDFCGKGYHLMSFPQSAPHGVVFLHVTYVPAQEKNFTTAPAICHDGKAHFPREGVFVSNGTHWFVTQRNFCEPQIITTDNTFVSGNCDVVIGIVNNTVYDPLQPELDSGGSGYIPEAPRDGQAYVRKDGEWVLLSTFL

SEQ ID NO: 10101 - protein, 1177 aa, Artificial Sequence; identical to SEQ ID NO: 10064
  SARS-CoV-2/Portugal/PT0034/2020__EPI_ISL_418019 spike protein (1-1147)(I714C_Y1110C) Foldon construct

SEQ ID NO: 10102 - protein, 1177 aa, Artificial Sequence; identical to SEQ ID NO: 10056
  SARS-CoV-2/Iceland/202/2020__EPI_ISL_417750 spike protein (1-1147)(I714C_Y1110C) Foldon construct

SEQ ID NO: 10103 - protein, 1177 aa, Artificial Sequence
  SARS-CoV-2/USA/WA-UW261/2020__EPI_ISL_418046 spike protein (1-1147)(I714C_Y1110C) Foldon construct
MFVFLVLLPLVSSQCVNLTTRTQLPPAYTNSFTRGVYYPDKVFRSSVLHSTQDLFLPFFSNVTWFHAIHVSGTNGTKRFDNPVLPFNDGVYFASTEKSNIIRGWIFGTTLDSKTQSLLIVNNATNVVIKVCEFQFCNDPFLGVYYHKNNKSWMESEFRVYSSANNCTFEYVSQPFLMDLEGKQGNFKNLREFVFKNIDGYFKIYSKHTPINLVRDLPQGFSALEPLVDLPIGINITRFQTLLALHRSYLTPGDSSSGWTAGAAAYYVGYLQPRTFLLKYNENGTITDAVDCALDPLSETKCTLKSFTVEKGIYQTSNFRVQPTESIVRFPNITNLCPFGEVFNATRFTSVYAWNRKRISNCVADYSVLYNSASFSTFKCYGVSPTKLNDLCFTNVYADSFVIRGDEVRQIAPGQTGKIADYNYKLPDDFTGCVIAWNSNNLDSKVGGNYNYLYRLFRKSNLKPFERDISTEIYQAGSTPCNGVEGFNCYFPLQSYGFQPTNGVGYQPYRVVVLSFELLHAPATVCGPKKSTNLVKNKCVNFNFNGLTGTGVLTESNKKFLPFQQFGRDIADTTDAVRDPQTLEILDITPCSFGGVSVITPGTNTSNQVAVLYQDVNCTEVPVAIHADQLTPTWRVYSTGSNVFQTRAGCLIGAEHVNNSYECDIPIGAGICASYQTQTNSPRRARSVASQSIIAYTMSLGAENSVAYSNNSIACPTNFTISVTTEILPVSMTKTSVDCTMYICGDSTECSNLLLQYGSFCTQLNRALTGIAVEQDKNTQEVFAQVKQIYKTPPIKDFGGFNFSQILPDPSKPSKRSFIEDLLFNKVTLADAGFIKQYGDCLGDIAARDLICAQKFNGLTVLPPLLTDEMIAQYTSALLAGTITSGWTFGAGAALQIPFAMQMAYRFNGIGVTQNVLYENQKLIANQFNSAIGKIQDSLSSTASALGKLQDVVNQNAQALNTLVKQLSSNFGAISSVLNDILSRLDKVEAEVQIDRLITGRLQSLQTYVTQQLIRAAEIRASANLAATKMSECVLGQSKRVDFCGKGYHLMSFPQSAPHGVVFLHVTYVPAQEKNFTTAPAICHDGKAHFPREGVFVSNGTHWFVTQRNFCEPQIITTDNTFVSGNCDVVIGIVNNTVYDPLQPELDSGGSGYIPEAPRDGQAYVRKDGEWVLLSTFL

SEQ ID NO: 10104 - protein, 1177 aa, Artificial Sequence
  SARS-CoV-2/Portugal/PT0035/2020__EPI_ISL_418020 spike protein (1-1147)(I714C_Y1110C) Foldon construct
MFVFLVLLPLVSSQCVNLTTRTQLPPAYTNSFTRGVYYPDKVFRSSVLHSTQDLFLPFFSNVTWFHAIHVSGTNGTKRFDNPVLPFNDGVYFASTEKSNIIRGWIFGTTLDSKTQSLLIVNNATNVVIKVCEFQFCNDPFLGVYYHKNNKSWMESEFRVYSSANNCTFEYVSQPFLMDLEGKQGNFKNLREFVFKNIDGYFKIYSKHTPINLVRDLPQGFSALEPLVDLPIGINITRFQTLLALHRSYLTPGDSSSGWTAGAAAYYVGYLQPRTFLLKYNENGTITDAVDCALDPLSETKCTLKSFTVEKGIYQTSNFRVQPTESIVRFPNITNLCPFGEVFNATRFASVYAWNRKRISNCVADYSVLYNSASFSTFKCYGVSPTKLNDLCFTNVYADSFVIRGDEVRQIAPGQTGKIADYNYKLPDDFTGCVIAWNSNNLDSKVGGNYNYLYRLFRKSNLKPFERDISTEIYQAGSTPCNGVEGFNCYFPLQSYGFQPTNGVGYQPYRVVVLSFELLHAPATVCGPKKSTNLVKNKCVNFNFNGLTGTGVLTESNKKFLPFQQFGRDIADTTDAVRDPQTLEILDITPCSFGGVSVITPGTNTSNQVAVLYQDVNCTEVPVAIHADQLTPTWRVYSTGSNVFQTRAGCLIGAEHVNNSYECDIPIGAGICASYQTQTNSPRRARSVASQSIIAYTMSLGAENSVAYSNNSIACPTNFTISVTTEILPVSMTKTSVDCTMYICGDSTECSNLLLQYGSFCTQLNRALTGIAVEQDKNTQEVFAQVKQIYKTPPIKDFGGFNFSQILPDPSKPSKRSFIEDLLFNKVTLADAGFIKQYGDCLGDISARDLICAQKFNGLTVLPPLLTDEMIAQYTSALLAGTITSGWTFGAGAALQIPFAMQMAYRFNGIGVTQNVLYENQKLIANQFNSAIGKIQDSLSSTASALGKLQDVVNQNAQALNTLVKQLSSNFGAISSVLNDILSRLDKVEAEVQIDRLITGRLQSLQTYVTQQLIRAAEIRASANLAATKMSECVLGQSKRVDFCGKGYHLMSFPQSAPHGVVFLHVTYVPAQEKNFTTAPAICHDGKAHFPREGVFVSNGTHWFVTQRNFCEPQIITTDNTFVSGNCDVVIGIVNNTVYDPLQPELDSGGSGYIPEAPRDGQAYVRKDGEWVLLSTFL

SEQ ID NO: 10105 - protein, 1177 aa, Artificial Sequence
  SARS-CoV-2/USA/NY-NYUMC7/2020__EPI_ISL_418192 spike protein (1-1147)(I714C_Y1110C) Foldon construct
MFVFLVLLPLVSSQCVNLTTRTQLPPAYTNSFTRGVYYPDKVFRSSVLHSTQDLFLPFFSNVTWFHAIHVSGTNGTKRFDNPVLPFNDGVYFASTEKSNIIRGWIFGTTLDSKTQSLLIVNNATNVVIKVCEFQFCNDPFLGVYHHKNNKSWMESEFRVYSSANNCTFEYVSQPFLMDLEGKQGNFKNLREFVFKNIDGYFKIYSKHTPINLVRDLPQGFSALEPLVDLPIGINITRFQTLLALHRSYLTPGDSSSGWTAGAAAYYVGYLQPRTFLLKYNENGTITDAVDCALDPLSETKCTLKSFTVEKGIYQTSNFRVQPTESIVRFPNITNLCPFGEVFNATRFASVYAWNRKRISNCVADYSVLYNSASFSTFKCYGVSPTKLNDLCFTNVYADSFVIRGDEVRQIAPGQTGKIADYNYKLPDDFTGCVIAWNSNNLDSKVGGNYNYLYRLFRKSNLKPFERDISTEIYQAGSTPCNGVEGFNCYFPLQSYGFQPTNGVGYQPYRVVVLSFELLHAPATVCGPKKSTNLVKNKCVNFNFNGLTGTGVLTESNKKFLPFQQFGRDIADTTDAVRDPQTLEILDITPCSFGGVSVITPGTNTSNQVAVLYQGVNCTEVPVAIHADQLTPTWRVYSTGSNVFQTRAGCLIGAEHVNNSYECDIPIGAGICASYQTQTNSPRRARSVASQSIIAYTMSLGAENSVAYSNNSIACPTNFTISVTTEILPVSMTKTSVDCTMYICGDSTECSNLLLQYGSFCTQLNRALTGIAVEQDKNTQEVFAQVKQIYKTPPIKDFGGFNFSQILPDPSKPSKRSFIEDLLFNKVTLADAGFIKQYGDCLGDIAARDLICAQKFNGLTVLPPLLTDEMIAQYTSALLAGTITSGWTFGAGAALQIPFAMQMAYRFNGIGVTQNVLYENQKLIANQFNSAIGKIQDSLSSTASALGKLQDVVNQNAQALNTLVKQLSSNFGAISSVLNDILSRLDKVEAEVQIDRLITGRLQSLQTYVTQQLIRAAEIRASANLAATKMSECVLGQSKRVDFCGKGYHLMSFPQSAPHGVVFLHVTYVPAQEKNFTTAPAICHDGKAHFPREGVFVSNGTHWFVTQRNFCEPQIITTDNTFVSGNCDVVIGIVNNTVYDPLQPELDSGGSGYIPEAPRDGQAYVRKDGEWVLLSTFL

SEQ ID NO: 10106 - protein, 1177 aa, Artificial Sequence
  SARS-CoV-2/Iceland/189/2020__EPI_ISL_417709 spike protein (1-1147)(I714C_Y1110C) Foldon construct
MFVFLVLLPLVSSQCVNLTTRTQLPPAYTNSFTRGVYYPDKVFRSSVLHSTQDLFLPFFSNVTWFHAIHVSGTNGTKRFDNPVLPFNDGVYFASTEKSNIIRGWIFGTTLDSKTQSLLIVNNATNVVIKVCEFQFCNDPFLGVYYHKNNKSWMESEFRVYSSANNCTFEYVSQPFLMDLEGKQGNFKNLREFVFKNIDGYFKIYSKHTPINLVRDLPQGFSALEPLVDLPIGINITRFQTLLALHRSYLTPGDSSSGWTAGAAAYYVGYLQPRTFLLKYNENGTITDAVDCALDPLSETKCTLKSFTVEKGIYQTSNFRVQPTESIVRFPNITNLCPFGEVFNATRFASVYAWNRKRISNCVADYSVLYNSASFSTFKCYGVSPTKLNDLCFTNVYADSFVIRGDEVRQIAPGQTGKIADYNYKLPDDFTGCVIAWNSNNLDSKVGGNYNYLYRLFRKSNLKPFERDISTEIYQAGSTPCNGVEGFNCYFPLQSYGFQPTNGVGYQPYRVVVLSFELLHAPATVCGPKKSTNLVKNKCVNFNFNGLTGTGVLTESNKKFLPFQQFGRDIADTTDAVRDPQTLEILDITPCSFGGVSVITPGTNTSNQVAVLYQGVNCTEVPVAIHADQLTPTWRVYSTGSNVFQTRAGCLIGAEHVNNSYECDIPIGAGICASYQTQTNSPRRARSVASQSIIAYTMSLGAENSVAYSNNSIACPTNFTISVTTEILPVSMTKTSVDCTMYICGDSTECSNLLLQYGSFCTQLNRALTGIAVEQDKNTQEVFAQVKQIYKTPPIKDFGGFNFSQILPDPSKPSKRSFIEDLLFNKVTLADAGFTKQYGDCLGDIAARDLICAQKFNGLTVLPPLLTDEMIAQYTSALLAGTITSGWTFGAGAALQIPFAMQMAYRFNGIGVTQNVLYENQKLIANQFNSAIGKIQDSLSSTASALGKLQDVVNQNAQALNTLVKQLSSNFGAISSVLNDILSRLDKVEAEVQIDRLITGRLQSLQTYVTQQLIRAAEIRASANLAATKMSECVLGQSKRVDFCGKGYHLMSFPQSAPHGVVFLHVTYVPAQEKNFTTAPAICHDGKAHFPREGVFVSNGTHWFVTQRNFCEPQIITTDNTFVSGNCDVVIGIVNNTVYDPLQPELDSGGSGYIPEAPRDGQAYVRKDGEWVLLSTFL

SEQ ID NO: 10107 - protein, 1177 aa, Artificial Sequence
  SARS-CoV-2/Australia/NSW56/2020__EPI_ISL_417408 spike protein (1-1147)(I714C_Y1110C) Foldon construct
MFVFLVLLPLVSSQCVNLTTRTQLPPAYTNSFTRGVYYPDKVFRSSVLHSTQDLFLPFFSNVTWFHAIHVSGTNGTKRFDNPVLPFNDGVYFASTEKSNIIRGWIFGTTLDSKTQSLLIVNNATNVVIKVCEFQFCNDPFLGVYYHKNNKSWMESEFRVYSSANNCTFEYVSQPFLMDLEGKQGNFKNLREFVFKNIDGYFKIYSKHTPINLVRDLPQGFSALEPLVDLPIGINITRFQTLLALHRSYLTPGDSSSGWTAGAAAYYVGYLQPRTFLLKYNENGTITDAVDCALDPLSETKCTLKSFTVEKGIYQTSNFRVQPTESIVRFPNITNLCPFGEVFNATRFASVYAWNRKRISNCVADYSVLYNSASFSTFKCYGVSPTKLNDLCFTNVYADSFVIRGDEVRQIAPGQTGKIADYNYKLPDDFTGCVIAWNSNNLDSKVGGNYNYLYRLFRKSNLKPFERDISTEIYQAGSTPCNGVEGFNCYFPLQSYGFQPTNGVGYQPYRVVVLSFELLHAPATVCGPKKSTNLVKNKCVNFNFNGLTGTGVLTESNKKFLPFQQFGRDIADTTDAVRDPQTLEILDITPCSFGGVSVITPGTNTSNQVAVLYQDVNCTEVPVAIHADQLTPTWRVYSTGSNVFQTRAGCLIGAEHVNNSYECDIPIGAGICASYQTQTNSPRRARSVASQSIIAYTMSLGAENSVAYSNNSIACPTNFTISVTTEILPVSMTKTSVDCTMYICGDSTECSNLLLQYGSFCTQLNRALTGIAVEQDKNTQEVFAQVKQIYKTPPIKDFGGFNFSQILPDSSKPSKRSFIEDLLFNKVTLADAGFIKQYGDCLGDIAARDLICAQKFNGLTVLPPLLTDEMIAQYTSALLAGTITSGWTFGAGAALQIPFAMQMAYRFNGIGVTQNVLYENQKLIANQFNSAIGKIQDSLSSTASALGKLQDVVNQNAQALNTLVKQLSSNFGAISSVLNDILSRLDKVEAEVQIDRLITGRLQSLQTYVTQQLIRAAEIRASANLAATKMSECVLGQSKRVDFCGKGYHLMSFPQSAPHGVVFLHVTYVPAQEKNFTTAPAICHDGKAHFPREGVFVSNGTHWFVTQRNFCEPQIITTDNTFVSGNCDVVIGIVNNTVYDPLQPELDSGGSGYIPEAPRDGQAYVRKDGEWVLLSTFL

SEQ ID NO: 10108 - protein, 1177 aa, Artificial Sequence
  SARS-CoV-2/Iceland/280/2020__EPI_ISL_417608 spike protein (1-1147)(I714C_Y1110C) Foldon construct
MFVFLVLLPLVSSQCVNLTTRTQLPPAYTNSFTRGVYYPDKVFRSSVLHSTQDLFLPFFSNVTWFHAIHVSGTNGTKRFDNPVLPFNDGVYFASTEKSNIIRGWIFGTTLDSKTQSLLIVNNATNVVIKVCEFQFCNDPFLGVYYHKNNKSWMESEFRVYSSANNCTFEYVSQPFLMDLEGKQGNFKNLREFVFKNIDGYFKIYSKHTPINLVRDLPQGFSALEPLVDLPIGINITRFQTLLALHRSYLTPGDSSSGWTAGAAAYYVGYLQPRTFLLKYNENGTITDAVDCALDPLSETKCTLKSFTVEKGIYQTSNFRVQPTESIVRFPNITNLCPFGEVFNATRFASVYAWNRKRISNCVADYSVLYNSASFSTFKCYGVSPTKLNDLCFTNVYADSFVIRGDEVRQIAPGQTGKIADYNYKLPDDFTGCVIAWNSNNLDSKVGGNYNYLYRLFRKSNLKPFERDISTEIYQAGSTPCNGVEGFNCYFPLQSYGFQPTNGVGYQPYRVVVLSFELLHAPATVCGPKKSTNLVKNKCVNFNFNGLTGTGVLTESNKKFLPFQQFGRDIADTTDAVRDPQTLEILDITPCSFGGVSVITPGTNTSNQVAVLYQGVNCTEVPVAIHADQLTPTWRVYSTGSNVFQTRAGCLIGAEHVNNSYECDIPIGAGICASYHTQTNSPRRARSVASQSIIAYTMSLGAENSVAYSNNSIACPTNFTISVTTEILPVSMTKTSVDCTMYICGDSTECSNLLLQYGSFCTQLNRALTGIAVEQDKNTQEVFAQVKQIYKTPPIKDFGGFNFSQILPDPSKPSKRSFIEDLLFNKVTLADAGFIKQYGDCLGDIAARDLICAQKFNGLTVLPPLLTDEMIAQYTSALLAGTITSGWTFGAGAALQIPFAMQMAYRFNGIGVTQNVLYENQKLIANQFNSAIGKIQDSLSSTASALGKLQDVVNQNAQALNTLVKQLSSNFGAISSVLNDILSRLDKVEAEVQIDRLITGRLQSLQTYVTQQLIRAAEIRASANLAATKMSECVLGQSKRVDFCGKGYHLMSFPQSAPHGVVFLHVTYVPAQEKNFTTAPAICHDGKAHFPREGVFVSNGTHWFVTQRNFCEPQIITTDNTFVSGNCDVVIGIVNNTVYDPLQPELDSGGSGYIPEAPRDGQAYVRKDGEWVLLSTFL

SEQ ID NO: 10109 - protein, 1177 aa, Artificial Sequence; identical to SEQ ID NO: 10064
  SARS-CoV-2/Iceland/247/2020__EPI_ISL_417575 spike protein (1-1147)(I714C_Y1110C) Foldon construct

SEQ ID NO: 10110 - protein, 1177 aa, Artificial Sequence
  SARS-CoV-2/Iceland/238/2020__EPI_ISL_417566 spike protein (1-1147)(I714C_Y1110C) Foldon construct
MFVFLVLLPLVSSQCVNLTTRTQLPPAYTNSFTRGVYYPDKVFRSSVLHSTQDLFLPFFSNVTWFHAIHVSGTNGTKRFDNPVLPFNDGVYFASTEKSNIIRGWIFGTTLDSKTQSLLIVNNATNVVIKVCEFQFCNDPFLGVYYHKNNKSWMESEFRVYSSANNCTFEYVSQPFLMDLEGKQGNFKNLREFVFKNIDGYFKIYSKHTPINLVRDLPQGFSALEPLVDLPIGINITRFQTLLALHRSYLTPGDSSSGWTAGAAAYYVGYLQPRTFLLKYNENGTITDAVDCALDPLSETKCTLKSFTVEKGIYQTSNFRVQPTESIVRFPNITNLCPFGEVFNATRFASVYAWNRKRISNCVADYSVLYNSASFSTFKCYGVSPTKLNDLCFTNVYADSFVIRGDEVRQIAPGQTGKIADYNYKLPDDFTGCVIAWNSNNLDSKVGGNYNYLYRLFRKSNLKPFERDISTEIYQAGSTPCNGVEGFNCYFPLQSYGFQPTNGVGYQPYRVVVLSFELLHAPATVCGPKKSTNLVKNKCVNFNFNGLTGTGVLTESNKKFLPFQQFGRDIADTTDAVRDPQTLEILDITPCSFGGVSVITPGTNTSNQVAVLYQGVNCTEVPVAIHADQLTPTWRVYSTGSNVFQTRAGCLIGAEHVNNSYECDIPIGAGICASYQTQTNSPRRARSVASQSIIAYTMSLGAENSVAYSNNSIACPTNFTISVTTEILPVSMTKTSVDCTMYICGDSTECSNLLLQYGSFCTQLNRALTGIAVEQDKNTQEVFAQVKQIYKTPPIKDFGGFNFSQILPDPSKPSKRSFIEDLLFNKVTLADVGFIKQYGDCLGDIAARDLICAQKFNGLTVLPPLLTDEMIAQYTSALLAGTITSGWTFGAGAALQIPFAMQMAYRFNGIGVTQNVLYENQKLIANQFNSAIGKIQDSLSSTASALGKLQDVVNQNAQALNTLVKQLSSNFGAISSVLNDILSRLDKVEAEVQIDRLITGRLQSLQTYVTQQLIRAAEIRASANLAATKMSECVLGQSKRVDFCGKGYHLMSFPQSAPHGVVFLHVTYVPAQEKNFTTAPAICHDGKAHFPREGVFVSNGTHWFVTQRNFCEPQIITTDNTFVSGNCDVVIGIVNNTVYDPLQPELDSGGSGYIPEAPRDGQAYVRKDGEWVLLSTFL

SEQ ID NO: 10111 - protein, 1177 aa, Artificial Sequence
  SARS-CoV-2/Greece/16/2020__EPI_ISL_418265 spike protein (1-1147)(I714C_Y1110C) Foldon construct
MFVFLVLLPLVSSQCVNLTTRTQLPPAYTNSFTRGVYYPDKVFRSSVLHSTQDLFLPFFSNVTWFHAIHVSGTNGTKRFDNPVLPFNDGVYFASTEKSNIIRGWIFGTTLDSKTQSLLIVNNATNVVIKVCEFQFCNDPFLGVYYHKNNKSWMESEFRVYSSANNCTFEYVSQPFLMDLEGKQGNFKNLREFVFKNVDGYFKIYSKHTPINLVRDLPQGFSALEPLVDLPIGINITRFQTLLALHRSYLTPGDSSSGWTAGAAAYYVGYLQPRTFLLKYNENGTITDAVDCALDPLSETKCTLKSFTVEKGIYQTSNFRVQPTESIVRFPNITNLCPFGEVFNATRFASVYAWNRKRISNCVADYSVLYNSASFSTFKCYGVSPTKLNDLCFTNVYADSFVIRGDEVRQIAPGQTGKIADYNYKLPDDFTGCVIAWNSNNLDSKVGGNYNYLYRLFRKSNLKPFERDISTEIYQAGSTPCNGVEGFNCYFPLQSYGFQPTNGVGYQPYRVVVLSFELLHAPATVCGPKKSTNLVKNKCVNFNFNGLTGTGVLTESNKKFLPFQQFGRDIADTTDAVRDPQTLEILDITPCSFGGVSVITPGTNTSNQVAVLYQDVNCTEVPVAIHADQLTPTWRVYSTGSNVFQTRAGCLIGAEHVNNSYECDIPIGAGICASYQTQTNSPRRARSVASQSIIAYTMSLGAENSVAYSNNSIACPTNFTISVTTEILPVSMTKTSVDCTMYICGDSTECSNLLLQYGSFCTQLNRALTGIAVEQDKNTQEVFAQVKQIYKTPPIKDFGGFNFSQILPDPSKPSKRSFIEDLLFNKVTLADAGFIKQYGDCLGDIAARDLICAQKFNGLTVLPPLLTDEMIAQYTSALLAGTITSGWTFGAGAALQIPFAMQMAYRFNGIGVTQNVLYENQKLIANQFNSAIGKIQDSLSSTASALGKLQDVVNQNAQALNTLVKQLSSNFGAISSVLNDILSRLDKVEAEVQIDRLITGRLQSLQTYVTQQLIRAAEIRASANLAATKMSECVLGQSKRVDFCGKGYHLMSFPQSAPHGVVFLHVTYVPAQEKNFTTAPAICHDGKAHFPREGVFVSNGTHWFVTQRNFCEPQIITTDNTFVSGNCDVVIGIVNNTVYDPLQPELDSGGSGYIPEAPRDGQAYVRKDGEWVLLSTFL

SEQ ID NO: 10112 - protein, 1177 aa, Artificial Sequence
  SARS-CoV-2/Iceland/319/2020__EPI_ISL_417648 spike protein (1-1147)(I714C_Y1110C) Foldon construct
MFVFLVLLPLVSSQCVNLTTRTQLPPAYTNSFTRGVYYPDKVFRSSVLHSTQDLFLPFFSNVTWFHAIHVSGTNGTKRFDNPVLPFNDGVYFASTEKSNIIRGWIFGTTLDSKTQSLLIVNNATNVVIKVCEFQFCNDPFLGVYYHKNNKSWMESEFRVYSSANNCTFEYVSQPFLIDLEGKQGNFKNLREFVFKNIDGYFKIYSKHTPINLVRDLPQGFSALEPLVDLPIGINITRFQTLLALHRSYLTPGDSSSGWTAGAAAYYVGYLQPRTFLLKYNENGTITDAVDCALDPLSETKCTLKSFTVEKGIYQTSNFRVQPTESIVRFPNITNLCPFGEVFNATRFASVYAWNRKRISNCVADYSVLYNSASFSTFKCYGVSPTKLNDLCFTNVYADSFVIRGDEVRQIAPGQTGKIADYNYKLPDDFTGCVIAWNSNNLDSKVGGNYNYLYRLFRKSNLKPFERDISTEIYQAGSTPCNGVEGFNCYFPLQSYGFQPTNGVGYQPYRVVVLSFELLHAPATVCGPKKSTNLVKNKCVNFNFNGLTGTGVLTESNKKFLPFQQFGRDIADTTDAVRDPQTLEILDITPCSFGGVSVITPGTNTSNQVAVLYQGVNCTEVPVAIHADQLTPTWRVYSTGSNVFQTRAGCLIGAEHVNNSYECDIPIGAGICASYQTQTNSPRRARSVASQSIIAYTMSLGAENSVAYSNNSIACPTNFTISVTTEILPVSMTKTSVDCTMYICGDSTECSNLLLQYGSFCTQLNRALTGIAVEQDKNTQEVFAQVKQIYKTPPIKDFGGFNFSQILPDPSKPSKRSFIEDLLFNKVTLADAGFIKQYGDCLGDIAARDLICAQKFNGLTVLPPLLTDEMIAQYTSALLAGTITSGWTFGAGAALQIPFAMQMAYRFNGIGVTQNVLYENQKLIANQFNSAIGKIQDSLSSTASALGKLQDVVNQNAQALNTLVKQLSSNFGAISSVLNDILSRLDKVEAEVQIDRLITGRLQSLQTYVTQQLIRAAEIRASANLAATKMSECVLGQSKRVDFCGKGYHLMSFPQSAPHGVVFLHVTYVPAQEKNFTTAPAICHDGKAHFPREGVFVSNGTHWFVTQRNFCEPQIITTDNTFVSGNCDVVIGIVNNTVYDPLQPELDSGGSGYIPEAPRDGQAYVRKDGEWVLLSTFL

SEQ ID NO: 10113 - protein, 1177 aa, Artificial Sequence
  SARS-CoV-2/Congo/94/2020__EPI_ISL_417947 spike protein (1-1147)(I714C_Y1110C) Foldon construct
MFVFLVLLPLVSSQCVNLTTRTQLPPAYTNSFTRGVYYPDKVFRSSVLHSTQDLFLPFFSNVTWFHAIHVSGTNGTKRFDNPVLPFNDGVYFASTEKSNIIRGWIFGTTLDSKTQSLLIVNNATNVVIKVCEFQFCNDPFLGVYYHKNNKSWMESEFRVYSSANNCTFEYVSQPFLMDLEGKQGNFKNLREFVFKNIDGYFKIYSKHTPINLVRDLPQGFSALEPLVDLPIGINITRFQTLLALHRSYLTPGDSSSGWTAGAAAYYVGYLQPRTFLLKYNENGTITDAVDCALDPLSETKCTLKSFTVEKGIYQTSNFRVQPTESIVRFPNITNLCPFGEVFNATRFASVYAWNRKRISNCVADYSVLYNSASFSTFKCYGVSPTKLNDLCFTNVYADSFVIRGDEVRQIAPGQTGKIADYNYKLPDDFTGCVIAWNSNNLDSKVGGNYNYLYRLFRKSNLKPFERDISTEIYQAGSTPCNGVEGFNCYFPLQSYGFQPTNGVGYQPYRVVVLSFELLHAPATVCGPKKSTNLVKNKCVNFNFNGLTGTGVLTESNKKFLPFQQFGRDIADTTDAVRDPQTLEILDITPCSFGGVSVITPGTNTSNQVAVLYQGVNCTEVPVAIHADQLTPTWRVYSTGSNVFQTRAGCLIGAEHVNNSYECDIPIGAGICASYQTQTNSPRRARSVASQSIIAYTMSLGAENSVAYSNNSIACPTNFTISVTTEILPVSMTKTSVDCTMYICGDSTECSNLLLQYGSFCTQLNRALTGIAVEQDKNTQEVFAQVKQIYKTPPIKDFGGFNFSQILPDPSKPSKRSFIEDILFNKVTLADAGFIKQYGDCLGDIAARDLICAQKFNGLTVLPPLLTDEMIAQYTSALLAGTITSGWTFGAGAALQIPFAMQMAYRFNGIGVTQNVLYENQKLIANQFNSAIGKIQDSLSSTASALGKLQDVVNQNAQALNTLVKQLSSNFGAISSVLNDILSRLDKVEAEVQIDRLITGRLQSLQTYVTQQLIRAAEIRASANLAATKMSECVLGQSKRVDFCGKGYHLMSFPQSAPHGVVFLHVTYVPAQEKNFTTAPAICHDGKAHFPREGVFVSNGTHWFVTQRNFCEPQIITTDNTFVSGNCDVVIGIVNNTVYDPLQPELDSGGSGYIPEAPRDGQAYVRKDGEWVLLSTFL

SEQ ID NO: 10114 - protein, 1177 aa, Artificial Sequence
  SARS-CoV-2/Congo/158/2020__EPI_ISL_417950 spike protein (1-1147)(I714C_Y1110C) Foldon construct
MFVFLVLLPLVSSQCVNLTTRTQLPPAYTNSFTRGVYYPDKVFRSSVLHSTQDLFLPFFSNVTWFHAIHVSGTNGTKRFDNPVLPFNDGVYFASTEKSNIIRGWIFGTTLDSKTQSLLIVNNATNVVIKVCEFQFCNDPFLGVYYHKNNKSWMESEFRVYSSANNCTFEYVSQPFLMDLEGKQGNFKNLREFVFKNIDGYFKIYSKHTPINLVRDLPQGFSALEPLVDLPIGINITRFQTLLALHRSYLTPGDSSSGWTAGAAAYYVGYLQPRTFLLKYNENGTITDAVDCALDPLSETKCTLKSFTVEKGIYQTSNFRVQPTESIVRFPNITNLCPFGEVFNATRFASVYAWNRKRISNCVADYSVLYNSASFSTFKCYGVSPTKLNDLCFTNVYADSFVIRGDEVRQIAPGQTGKIADYNYKLPDDFTGCVIAWNSNNLDSKVGGNYNYLYRLFRKSNLKPFERDISTEIYQAGSTPCNGVEGFNCYFPLQSYGFQPTNGVGYQPYRVVVLSFELLHAPATVCGPKKSTNLVKNKCVNFNFNGLTGTGVLTESNKKFLPFQQFGRDIADTTDAVRDPQTLEILDITPCSFGGVSVITPGTNTSNQVAVLYQDVNCTEVPVAIHADQLTPTWRVYSTGSNVFQTRAGCLIGAEHVNNSYECDIPIGAGICASYQTQTNSPRRARSVASQSIIAYTMSLGAENSVAYSNNSIACPTNFTISVTTEILPVSMTKTSVDCTMYICGDSTECSNLLLQYGSFCTQLNRALTGIAVEQDKNTQEVFAQVKQIYKTPPIKDFGGFNFSQILPDPSKPSKRSFIEDLLFNKVTLADAGFIKQYGDCLGDIAARDLICAQKFNGLTVLPPLLTDEMIAQYTSALLAGTITSGWTFGAGAALQIPFAMQMAYRFNGIGVTQNVLYENQKLIANQFNSAIGKIQDSLSSTASALGKLQDVVNQNAQALNTLVKQLSSNFGAISSVLNDILSRLDKVEAEVQIDRLITGRLQSLQTYVTQQLIRAAEIRASANLAATKMSECVLGQSKRVDFCGKGYHLMSFPQSAPHGVVFLHVTYVPAQEKNFTTAPAICHDGKAHFPREGVFVSNGTHWFVTQRNFCEPQIITTDNTFLSGNCDVVIGIVNNTVYDPLQPELDSGGSGYIPEAPRDGQAYVRKDGEWVLLSTFL

SEQ ID NO: 10115 - protein, 1177 aa, Artificial Sequence
  SARS-CoV-2/USA/UT-00034/2020__EPI_ISL_417977 spike protein (1-1147)(I714C_Y1110C) Foldon construct
MFVFLVLLPLVSSQCVNLTTRTQLPPAYTNSFTRGVYYPDKVFRSSVLHSTQDLFLPFFSNVTWFHAIHVSGTNGTKRFDNPVLPFNDGVYFASTEKSNIIRGWIFGTTLDSKTQSLLIVNNATNVVIKVCEFQFCNDPFLGVYYYKNNKSWMESEFRVYSSANNCTFEYVSQPFLMDLEGKQGNFKNLREFVFKNIDGYFKIYSKHTPINLVRDLPQGFSALEPLVDLPIGINITRFQTLLALHRSYLTPGDSSSGWTAGAAAYYVGYLQPRTFLLKYNENGTITDAVDCALDPLSETKCTLKSFTVEKGIYQTSNFRVQPTESIVRFPNITNLCPFGEVFNATRFASVYAWNRKRISNCVADYSVLYNSASFSTFKCYGVSPTKLNDLCFTNVYADSFVIRGDEVRQIAPGQTGKIADYNYKLPDDFTGCVIAWNSNNLDSKVGGNYNYLYRLFRKSNLKPFERDISTEIYQAGSTPCNGVEGFNCYFPLQSYGFQPTNGVGYQPYRVVVLSFELLHAPATVCGPKKSTNLVKNKCVNFNFNGLTGTGVLTESNKKFLPFQQFGRDIADTTDAVRDPQTLEILDITPCSFGGVSVITPGTNTSNQVAVLYQGVNCTEVPVAIHADQLTPTWRVYSTGSNVFQTRAGCLIGAEHVNNSYECDIPIGAGICASYQTQTNSPRRARSVASQSIIAYTMSLGAENSVAYSNNSIACPTNFTISVTTEILPVSMTKTSVDCTMYICGDSTECSNLLLQYGSFCTQLNRALTGIAVEQDKNTQEVFAQVKQIYKTPPIKDFGGFNFSQILPDPSKPSKRSFIEDLLFNKVTLADAGFIKQYGDCLGDIAARDLICAQKFNGLTVLPPLLTDEMIAQYTSALLAGTITSGWTFGAGAALQIPFAMQMAYRFNGIGVTQNVLYENQKLIANQFNSAIGKIQDSLSSTASALGKLQDVVNQNAQALNTLVKQLSSNFGAISSVLNDILSRLDKVEAEVQIDRLITGRLQSLQTYVTQQLIRAAEIRASANLAATKMSECVLGQSKRVDFCGKGYHLMSFPQSAPHGVVFLHVTYVPAQEKNFTTAPAICHDGKAHFPREGVFVSNGTHWFVTQRNFCEPQIITTDNTFVSGNCDVVIGIVNNTVYDPLQPELDSGGSGYIPEAPRDGQAYVRKDGEWVLLSTFL

SEQ ID NO: 10116 - protein, 1177 aa, Artificial Sequence
  SARS-CoV-2/USA/UT-00033/2020__EPI_ISL_417976 spike protein (1-1147)(I714C_Y1110C) Foldon construct
MFVFLVLLPLVSSQCVNLTTRTQLPPAYTNSFTRGVYYPDKVFRSSVLHSTQDLFLPFFSNVTWFHAIHVSGTNGTKRFDNPVLPFNDGVYFASTEKSNIIRGWIFGTTLDSKTQSLLIVNNATNVVIKVCEFQFCNDPFLGVYYHKNNKSWMESEFRVYSSANNCTFEYVSQPFLMDLEGKQGNFKNLREFVFKNIDGYFKIYSKHTPINLVRDLPQGFSALEPLVDLPIGINITRFQTLLALHRSYLTPGDSSSGLTAGAAAYYVGYLQPRTFLLKYNENGTITDAVDCALDPLSETKCTLKSFTVEKGIYQTSNFRVQPTESIVRFPNITNLCPFGEVFNATRFASVYAWNRKRISNCVADYSVLYNSASFSTFKCYGVSPTKLNDLCFTNVYADSFVIRGDEVRQIAPGQTGKIADYNYKLPDDFTGCVIAWNSNNLDSKVGGNYNYLYRLFRKSNLKPFERDISTEIYQAGSTPCNGVEGFNCYFPLQSYGFQPTNGVGYQPYRVVVLSFELLHAPATVCGPKKSTNLVKNKCVNFNFNGLTGTGVLTESNKKFLPFQQFGRDIADTTDAVRDPQTLEILDITPCSFGGVSVITPGTNTSNQVAVLYQGVNCTEVPVAIHADQLTPTWRVYSTGSNVFQTRAGCLIGAEHVNNSYECDIPIGAGICASYQTQTNSPRRARSVASQSIIAYTMSLGAENSVAYSNNSIACPTNFTISVTTEILPVSMTKTSVDCTMYICGDSTECSNLLLQYGSFCTQLNRALTGIAVEQDKNTQEVFAQVKQIYKTPPIKDFGGFNFSQILPDPSKPSKRSFIEDLLFNKVTLADAGFIKQYGDCLGDIAARDLICAQKFNGLTVLPPLLTDEMIAQYTSALLAGTITSGWTFGAGAALQIPFAMQMAYRFNGIGVTQNVLYENQKLIANQFNSAIGKIQDSLSSTASALGKLQDVVNQNAQALNTLVKQLSSNFGAISSVLNDILSRLDKVEAEVQIDRLITGRLQSLQTYVTQQLIRAAEIRASANLAATKMSECVLGQSKRVDFCGKGYHLMSFPQSAPHGVVFLHVTYVPAQEKNFTTAPAICHDGKAHFPREGVFVSNGTHWFVTQRNFCEPQIITTDNTFVSGNCDVVIGIVNNTVYDPLQPELDSGGSGYIPEAPRDGQAYVRKDGEWVLLSTFL

SEQ ID NO: 10117 - protein, 1177 aa, Artificial Sequence
  SARS-CoV-2/USA/WI-13/2020__EPI_ISL_417516 spike protein (1-1147)(I714C_Y1110C) Foldon construct
MFVFLVLLPLVSSQCVNLTTRTQLPPAYTNSFTRGVYYPDKVFRSSVLHSTQDLFLPFFSNVTWFHAIHVSGTNGTKRFDNPVLPFNDGVYFASTEKSNIIRGWIFGTTLDSKTQSLLIVNNATNVVIKVCEFQFCNDPFLGVYYHKNNKSWMESEFRVYSSANNCTFEYVSQPFLMDLEGKQGNFKNLREFVFKNIDGYFKIYSKHTPINLVRDLPQGFSALEPLVDLPIGINITRFQTLLALHRSYLTPGDSSSGWTAGAAAYYVGYLQPRTFLLKYNENGTITDAVDCALDPLSETKCTLKSFTVEKGIYQTSNFRVLPTESIVRFPNITNLCPFGEVFNATRFASVYAWNRKRISNCVADYSVLYNSASFSTFKCYGVSPTKLNDLCFTNVYADSFVIRGDEVRQIAPGQTGKIADYNYKLPDDFTGCVIAWNSNNLDSKVGGNYNYLYRLFRKSNLKPFERDISTEIYQAGSTPCNGVEGFNCYFPLQSYGFQPTNGVGYQPYRVVVLSFELLHAPATVCGPKKSTNLVKNKCVNFNFNGLTGTGVLTESNKKFLPFQQFGRDIADTTDAVRDPQTLEILDITPCSFGGVSVITPGTNTSNQVAVLYQGVNCTEVPVAIHADQLTPTWRVYSTGSNVFQTRAGCLIGAEHVNNSYECDIPIGAGICASYQTQTNSPRRARSVASQSIIAYTMSLGAENSVAYSNNSIACPTNFTISVTTEILPVSMTKTSVDCTMYICGDSTECSNLLLQYGSFCTQLNRALTGIAVEQDKNTQEVFAQVKQIYKTPPIKDFGGFNFSQILPDPSKPSKRSFIEDLLFNKVTLADAGFIKQYGDCLGDIAARDLICAQKFNGLTVLPPLLTDEMIAQYTSALLAGTITSGWTFGAGAALQIPFAMQMAYRFNGIGVTQNVLYENQKLIANQFNSAIGKIQDSLSSTASALGKLQDVVNQNAQALNTLVKQLSSNFGAISSVLNDILSRLDKVEAEVQIDRLITGRLQSLQTYVTQQLIRAAEIRASANLAATKMSECVLGQSKRVDFCGKGYHLMSFPQSAPHGVVFLHVTYVPAQEKNFTTAPAICHDGKAHFPREGVFVSNGTHWFVTQRNFCEPQIITTDNTFVSGNCDVVIGIVNNTVYDPLQPELDSGGSGYIPEAPRDGQAYVRKDGEWVLLSTFL

SEQ ID NO: 10118 - protein, 1176 aa, Artificial Sequence
  SARS-CoV-2/India/1-27/2020__EPI_ISL_413522 spike protein (1-1146)(I713C_Y1109C) Foldon construct
MFVFLVLLPLVSSQCVNLTTRTQLPPAYTNSFTRGVYYPDKVFRSSVLHSTQDLFLPFFSNVTWFHAIHVSGTNGTKRFDNPVLPFNDGVYFASTEKSNIIRGWIFGTTLDSKTQSLLIVNNATNVVIKVCEFQFCNDPFLGVYHKNNKSWMESEFRVYSSANNCTFEYVSQPFLMDLEGKQGNFKNLREFVFKNIDGYFKIYSKHTPINLVRDLPQGFSALEPLVDLPIGINITRFQTLLALHRSYLTPGDSSSGWTAGAAAYYVGYLQPRTFLLKYNENGTITDAVDCALDPLSETKCTLKSFTVEKGIYQTSNFRVQPTESIVRFPNITNLCPFGEVFNATRFASVYAWNRKRISNCVADYSVLYNSASFSTFKCYGVSPTKLNDLCFTNVYADSFVIRGDEVIQIAPGQTGKIADYNYKLPDDFTGCVIAWNSNNLDSKVGGNYNYLYRLFRKSNLKPFERDISTEIYQAGSTPCNGVEGFNCYFPLQSYGFQPTNGVGYQPYRVVVLSFELLHAPATVCGPKKSTNLVKNKCVNFNFNGLTGTGVLTESNKKFLPFQQFGRDIADTTDAVRDPQTLEILDITPCSFGGVSVITPGTNTSNQVAVLYQDVNCTEVPVAIHADQLTPTWRVYSTGSNVFQTRAGCLIGAEHVNNSYECDIPIGAGICASYQTQTNSPRRARSVASQSIIAYTMSLGAENSVAYSNNSIACPTNFTISVTTEILPVSMTKTSVDCTMYICGDSTECSNLLLQYGSFCTQLNRALTGIAVEQDKNTQEVFAQVKQIYKTPPIKDFGGFNFSQILPDPSKPSKRSFIEDLLFNKVTLADAGFIKQYGDCLGDIAARDLICAQKFNGLTVLPPLLTDEMIAQYTSALLAGTITSGWTFGAGAALQIPFAMQMAYRFNGIGVTQNVLYENQKLIANQFNSAIGKIQDSLSSTASALGKLQDVVNQNAQALNTLVKQLSSNFGAISSVLNDILSRLDKVEAEVQIDRLITGRLQSLQTYVTQQLIRAAEIRASANLAATKMSECVLGQSKRVDFCGKGYHLMSFPQSAPHGVVFLHVTYVPAQEKNFTTAPAICHDGKAHFPREGVFVSNGTHWFVTQRNFCEPQIITTDNTFVSGNCDVVIGIVNNTVYDPLQPELDSGGSGYIPEAPRDGQAYVRKDGEWVLLSTFL

SEQ ID NO: 10119 - protein, 1171 aa, Artificial Sequence
  SARS-CoV-2/pangolin/Guangxi/P4L/2017__EPI_ISL_410538 spike protein (1-1141)(I708C_Y1104C) Foldon construct
MFVFLFVLPLVSSQCVNLTTRTGIPPGYTNSSTRGVYYPDKVFRSSILHLTQDLFLPFFSNVTWFNTINYQGGFKKFDNPVLPFNDGVYFASTEKSNIIRGWIFGTTLDARTQSLLIVNNATNVVIKVCEFQFCTDPFLGVYYHNNNKTWVENEFRVYSSANNCTFEYISQPFLMDLEGKQGNFKNLREFVFKNVDGYFKIYSKHTPIDLVRDLPRGFAALEPLVDLPIGINITRFQTLLALHRSYLTPGNLESGWTTGAAAYYVGYLQQRTFLLSYNQNGTITDAVDCSLDPLSETKCTLKSLTVEKGIYQTSNFRVQPTISIVRFPNITNLCPFGEVFNASKFASVYAWNRKRISNCVADYSVLYNSTSFSTFKCYGVSPTKLNDLCFTNVYADSFVVKGDEVRQIAPGQTGVIADYNYKLPDDFTGCVIAWNSVKQDALTGGNYGYLYRLFRKSKLKPFERDISTEIYQAGSTPCNGQVGLNCYYPLERYGFHPTTGVNYQPFRVVVLSFELLNGPATVCGPKLSTTLVKDKCVNFNFNGLTGTGVLTTSKKQFLPFQQFGRDISDTTDAVRDPQTLEILDITPCSFGGVSVITPGTNTSNQVAVLYQDVNCTEVPMAIHAEQLTPAWRVYSAGANVFQTRAGCLVGAEHVNNSYECDIPVGAGICASYHSMSSLRSVNQRSIIAYTMSLGAENSVAYSNNSIACPTNFTISVTTEILPVSMTKTSVDCTMYICGDSIECSNLLLQYGSFCTQLNRALTGIAVEQDKNTQEVFAQVKQIYKTPPIKDFGGFNFSQILPDPSKPSKRSFIEDLLFNKVTLADAGFIKQYGDCLGDIAARDLICAQKFNGLTVLPPLLTDEMIAQYTSALLAGTITSGWTFGAGAALQIPFAMQMAYRFNGIGVTQNVLYENQKLIANQFNSAIGKIQDSLSSTASALGKLQDVVNQNAQALNTLVKQLSSNFGAISSVLNDILSRLDKVEAEVQIDRLITGRLQSLQTYVTQQLIRAAEIRASANLAATKMSECVLGQSKRVDFCGKGYHLMSFPQSAPHGVVFLHVTYVPAQEKNFTTAPAICHEGKAHFPREGVFVSNGTHWFITQRNFCEPQIITTDNTFVSGSCDVVIGIVNNTVYDPLQPELDSGGSGYIPEAPRDGQAYVRKDGEWVLLSTFL

SEQ ID NO: 10120 - protein, 1171 aa, Artificial Sequence
  SARS-CoV-2/pangolin/Guangxi/P5L/2017__EPI_ISL_410540 spike protein (1-1141)(I708C_Y1104C) Foldon construct
MFVFLFVLPLVSSQCVNLTTRTGIPPGYTNSSTRGVYYPDKVFRSSILHLTQDLFLPFFSNVTWFNTINYQGGFKKFDNPVLPFNDGVYFASTEKSNIIRGWIFGTTLDARTQSLLIVNNATNVVIKVCEFQFCTDPFLGVYYHNNNKTWVENEFRVYSSANNCTFEYISQPFLMDLEGKQGNFKNLREFVFKNVDGYFKIYSKHTPIDLVRDLPRGFAALEPLVDLPIGINITRFQTLLALHRSYLTPGKLESGWTTGAAAYYVGYLQQRTFLLSYNQNGTITDAVDCSLDPLSETKCTLKSLTVEKGIYQTSNFRVQPTISIVRFPNITNLCPFGEVFNASKFASVYAWNRKRISNCVADYSVLYNSTSFSTFKCYGVSPTKLNDLCFTNVYADSFVVKGDEVRQIAPGQTGVIADYNYKLPDDFTGCVIAWNSVKQDALTGGNYGYLYRLFRKSKLKPFERDISTEIYQAGSTPCNGQVGLNCYYPLERYGFHPTTGVNYQPFRVVVLSFELLNGPATVCGPKLSTTLVKDKCVNFNFNGLTGTGVLTTSKKQFLPFQQFGRDISDTTDAVRDPQTLEILDITPCSFGGVSVITPGTNTSNQVAVLYQDVNCTEVPMAIHAEQLTPAWRVYSAGANVFQTRAGCLVGAEHVNNSYECDIPVGAGICASYHSMSSFRSVNQRSIIAYTMSLGAENSVAYSNNSIACPTNFTISVTTEILPVSMTKTSVDCTMYICGDSIECSNLLLQYGSFCTQLNRALTGIAVEQDKNTQEVFAQVKQIYKTPPIKDFGGFNFSQILPDPSKPSKRSFIEDLLFNKVTLADAGFIKQYGDCLGDIAARDLICAQKFNGLTVLPPLLTDEMIAQYTSALLAGTITSGWTFGAGAALQIPFAMQMAYRFNGIGVTQNVLYENQKLIANQFNSAIGKIQDSLSSTASALGKLQDVVNQNAQALNTLVKQLSSNFGAISSVLNDILSRLDKVEAEVQIDRLITGRLQSLQTYVTQQLIRAAEIRASANLAATKMSECVLGQSKRVDFCGKGYHLMSFPQSAPHGVVFLHVTYVPAQEKNFTTAPAICHEGKAHFPREGVFVSNGTHWFITQRNFCEPQIITTDNTFVSGSCDVVIGIVNNTVYDPLQPELDSGGSGYIPEAPRDGQAYVRKDGEWVLLSTFL

SEQ ID NO: 10121 - protein, 1171 aa, Artificial Sequence
  SARS-CoV-2/pangolin/Guangxi/P5E/2017__EPI_ISL_410541 spike protein (1-1141)(I708C_Y1104C) Foldon construct
MFVFLFVLPLVSSQCVNLTTRTGIPPGYTNSSTRGVYYPDKVFRSSILHLTQDLFLPFFSNVTWFNTITYQGGSKKFDNPVLPFNDGVYFASTEKSNIIRGWIFGTTLDARTQSLLIVNNATNVVIKVCEFQFCTDPFLGVYYHNNNKTWVENEFRVYSSANNCTFEYISQPFLMDLEGKQGNFKNLREFVFKNVDGYFKIYSKHTPIDLVRDLPRGFAALEPLVDLPIGINITRFQTLLALHRSYLTPGKLESGWTTGAAAYYVGYLQQRTFLLSYNQNGTITDAVDCSLDPLSETKCTLKSLTVEKGIYQTSNFRVQPTISIVRFPNITNLCPFGEVFNASKFASVYAWNRKRISNCVADYSVLYNSTSFSTFKCYGVSPTKLNDLCFTNVYADSFVVKGDEVRQIAPGQTGVIADYNYKLPDDFTGCVIAWNSVKQDALTGDNYGYLYRLFRKSKLKPFERDISTEIYQAGSTPCNGQVGLNCYYPLERYGFHPTTGVNYQPFRVVVLSFELLNGPATVCGPKLSTTLVKDKCVNFNFNGLTGTGVLTTSKKQFLPFQQFGRDISDTTDAVRDPQTLEILDITPCSFGGVSVITPGTNTSNQVAVLYQDVNCTEVPMAIHAEQLTPAWRVYSAGANVFQTRAGCLVGAEHVNNSYECDIPVGAGICASYHSMSSFRSVNQRSIIAYTMSLGAENSVAYSNNSIACPTNFTISVTTEILPVSMTKTSVDCTMYICGDSIECSNLLLQYGSFCTQLNRALTGIAVEQDKNTQEVFAQVKQIYKTPPIKDFGGFNFSQILPDPSKPSKRSFIEDLLFNKVTLADAGFIKQYGDCLGDIAARDLICAQKFNGLTVLPPLLTDEMIAQYTSALLAGTITSGWTFGAGAALQIPFAMQMAYRFNGIGVTQNVLYENQKLIANQFNSAIGKIQDSLSSTASALGKLQDVVNQNAQALNTLVKQLSSNFGAISSVLNDILSRLDKVEAEVQIDRLITGRLQSLQTYVTQQLIRAAEIRASANLAATKMSECVLGQSKRVDFCGKGYHLMSFPQSAPHGVVFLHVTYVPAQEKNFTTAPAICHEGKAHFPREGVFVSNGTHWFITQRNFCEPQIITTDNTFVSGSCDVVIGIVNNTVYDPLQPELDSGGSGYIPEAPRDGQAYVRKDGEWVLLSTFL

SEQ ID NO: 10122 - protein, 1169 aa, Artificial Sequence
  SARS-CoV-2/pangolin/Guangxi/P1E/2017__EPI_ISL_410539 spike protein (1-1139)(I706C_Y1102C) Foldon construct
MFVFLFVLPLVSSQCVNLTTRTGIQPGYTNSSTRGVYYPDKVFRSSILHLTQDLFLPFFSNVTWFNTINYQGGFKKFDNPVLPFNDGVYFASTEKSNIIRGWIFGTTLDARTQSLLIVNNATNVVIKVCEFQFCTDPFLGVYYHNNNKTWVENEFRVYSSANNCTFEYISQPFLMDLEGKQGNFKNLREFVFKNVDGYFKIYSKHTPIDLVRDLPRGFAALEPLVDLPIGINITRFQTLLALHRSYLTPGKLESGWTTGAAAYYVGYLQQRTFLLSYNQNGTITDAVDCSLDPLSETKCTLKSLTVEKGIYQTSNFRVQPTISIVRFPNITNLCPFGEVFNASKFASVYAWNRKRISNCVADYSVLYNSTSFSTFKCYGVSPTKLNDLCFTNVYADSFVVKGDEVRQIAPGQTGVIADYNYKLPDDFTGCVIAWNSVKQDALTGGNYLYRLFRKSKLKPFERDISTEIYQAGSTPCNGQVGLNCYYPLERYGFHPTTGVNYQPFRVVVLSFELLNGPATVCGPKLSTTLVKDKCVNFNFNGLTGTGVLTTSKKQFLPFQQFGRDISDTTDAVRDPQTLEILDITPCSFGGVSVITPGTNTSNQVAVLYQDVNCTEVPMAIHAEQLTPAWRVYSAGANVFQTRAGCLVGAEHVNNSYECDIPVGAGICASYHSMSSLRSVNQRSIIAYTMSLGAENSVAYSNNSIACPTNFTISVTTEILPVSMTKTSVDCTMYICGDSIECSNLLLQYGSFCTQLNRALTGIAVEQDKNTQEVFAQVKQIYKTPPIKDFGGFNFSQILPDPSKPSKRSFIEDLLFNKVTLADAGFIKQYGDCLGDIAARDLICAQKFNGLTVLPPLLTDEMIAQYTSALLAGTITSGWTFGAGAALQIPFAMQMAYRFNGIGVTQNVLYENQKLIANQFNSAIGKIQDSLSSTASALGKLQDVVNQNAQALNTLVKQLSSNFGAISSVLNDILSRLDKVEAEVQIDRLITGRLQSLQTYVTQQLIRAAEIRASANLAATKMSECVLGQSKRVDFCGKGYHLMSFPQSAPHGVVFLHVTYVPAQEKNFTTAPAICHEGKAHFPREGVFVSNGTHWFITQRNFCEPQIITTDNTFVSGSCDVVIGIVNNTVYDPLQPELDSGGSGYIPEAPRDGQAYVRKDGEWVLLSTFL

SEQ ID NO: 10123 - protein, 1177 aa, Artificial Sequence
  SARS-CoV-2/Wuhan/WIV05/2019__EPI_ISL_402128 spike protein (1-1147)(P715C_P1069C) Foldon construct
MFVFLVLLPLVSSQCVNLTTRTQLPPAYTNSFTRGVYYPDKVFRSSVLHSTQDLFLPFFSNVTWFHAIHVSGTNGTKRFDNPVLPFNDGVYFASTEKSNIIRGWIFGTTLDSKTQSLLIVNNATNVVIKVCEFQFCNDPFLGVYYHKNNKSWMESEFRVYSSANNCTFEYVSQPFLMDLEGKQGNFKNLREFVFKNIDGYFKIYSKHTPINLVRDLPQGFSALEPLVDLPIGINITRFQTLLALHRSYLTPGDSSSGWTAGAAAYYVGYLQPRTFLLKYNENGTITDAVDCALDPLSETKCTLKSFTVEKGIYQTSNFRVQPTESIVRFPNITNLCPFGEVFNATRFASVYAWNRKRISNCVADYSVLYNSASFSTFKCYGVSPTKLNDLCFTNVYADSFVIRGDEVRQIAPGQTGKIADYNYKLPDDFTGCVIAWNSNNLDSKVGGNYNYLYRLFRKSNLKPFERDISTEIYQAGSTPCNGVEGFNCYFPLQSYGFQPTNGVGYQPYRVVVLSFELLHAPATVCGPKKSTNLVKNKCVNFNFNGLTGTGVLTESNKKFLPFQQFGRDIADTTDAVRDPQTLEILDITPCSFGGVSVITPGTNTSNQVAVLYQDVNCTEVPVAIHADQLTPTWRVYSTGSNVFQTRAGCLIGAEHVNNSYECDIPIGAGICASYQTQTNSPRRARSVASQSIIAYTMSLGAENSVAYSNNSIAICTNFTISVTTEILPVSMTKTSVDCTMYICGDSTECSNLLLQYGSFCTQLNRALTGIAVEQDKNTQEVFAQVKQIYKTPPIKDFGGFNFSQILPDPSKPSKRSFIEDLLFNKVTLADAGFIKQYGDCLGDIAARDLICAQKFNGLTVLPPLLTDEMIAQYTSALLAGTITSGWTFGAGAALQIPFAMQMAYRFNGIGVTQNVLYENQKLIANQFNSAIGKIQDSLSSTASALGKLQDVVNQNAQALNTLVKQLSSNFGAISSVLNDILSRLDKVEAEVQIDRLITGRLQSLQTYVTQQLIRAAEIRASANLAATKMSECVLGQSKRVDFCGKGYHLMSFPQSAPHGVVFLHVTYVCAQEKNFTTAPAICHDGKAHFPREGVFVSNGTHWFVTQRNFYEPQIITTDNTFVSGNCDVVIGIVNNTVYDPLQPELDSGGSGYIPEAPRDGQAYVRKDGEWVLLSTFL

SEQ ID NO: 10124 - protein, 1173 aa, Artificial Sequence
  SARS-CoV-2/bat/Yunnan/RaTG13/2013__EPI_ISL_402131 spike protein (1-1143)(P711C_P1065C) Foldon construct
MFVFLVLLPLVSSQCVNLTTRTQLPPAYTNSSTRGVYYPDKVFRSSVLHLTQDLFLPFFSNVTWFHAIHVSGTNGIKRFDNPVLPFNDGVYFASTEKSNIIRGWIFGTTLDSKTQSLLIVNNATNVVIKVCEFQFCNDPFLGVYYHKNNKSWMESEFRVYSSANNCTFEYVSQPFLMDLEGKQGNFKNLREFVFKNIDGYFKIYSKHTPINLVRDLPPGFSALEPLVDLPIGINITRFQTLLALHRSYLTPGDSSSGWTAGAAAYYVGYLQPRTFLLKYNENGTITDAVDCALDPLSETKCTLKSFTVEKGIYQTSNFRVQPTDSIVRFPNITNLCPFGEVFNATTFASVYAWNRKRISNCVADYSVLYNSTSFSTFKCYGVSPTKLNDLCFTNVYADSFVITGDEVRQIAPGQTGKIADYNYKLPDDFTGCVIAWNSKHIDAKEGGNFNYLYRLFRKANLKPFERDISTEIYQAGSKPCNGQTGLNCYYPLYRYGFYPTDGVGHQPYRVVVLSFELLNAPATVCGPKKSTNLVKNKCVNFNFNGLTGTGVLTESNKKFLPFQQFGRDIADTTDAVRDPQTLEILDITPCSFGGVSVITPGTNASNQVAVLYQDVNCTEVPVAIHADQLTPTWRVYSTGSNVFQTRAGCLIGAEHVNNSYECDIPIGAGICASYQTQTNSRSVASQSIIAYTMSLGAENSVAYSNNSIAICTNFTISVTTEILPVSMTKTSVDCTMYICGDSTECSNLLLQYGSFCTQLNRALTGIAVEQDKNTQEVFAQVKQIYKTPPIKDFGGFNFSQILPDPSKPSKRSFIEDLLFNKVTLADAGFIKQYGDCLGDIAARDLICAQKFNGLTVLPPLLTDEMIAQYTSALLAGTITSGWTFGAGAALQIPFAMQMAYRFNGIGVTQNVLYENQKLIANQFNSAIGKIQDSLSSTASALGKLQDVVNQNAQALNTLVKQLSSNFGAISSVLNDILSRLDKVEAEVQIDRLITGRLQSLQTYVTQQLIRAAEIRASANLAATKMSECVLGQSKRVDFCGKGYHLMSFPQSAPHGVVFLHVTYVCAQEKNFTTAPAICHDGKAHFPREGVFVSNGTHWFVTQRNFYEPQIITTDNTFVSGSCDVVIGIVNNTVYDPLQPELDSGGSGYIPEAPRDGQAYVRKDGEWVLLSTFL

SEQ ID NO: 10125 - protein, 1177 aa, Artificial Sequence
  SARS-CoV-2/Wuhan/HBCDC-HB-01/2019__EPI_ISL_402132 spike protein (1-1147)(P715C_P1069C) Foldon construct
MFVFLVLLPLVSSQCVNLTTRTQLPPAYTNSITRGVYYPDKVFRSSVLHSTQDLFLPFFSNVTWFHAIHVSGTNGTKRFDNPVLPFNDGVYFASTEKSNIIRGWIFGTTLDSKTQSLLIVNNATNVVIKVCEFQFCNDPFLGVYYHKNNKSWMESEFRVYSSANNCTFEYVSQPFLMDLEGKQGNFKNLREFVFKNIDGYFKIYSKHTPINLVRDLPQGFSALEPLVDLPIGINITRFQTLLALHRSYLTPGDSSSGWTAGAAAYYVGYLQPRTFLLKYNENGTITDAVDCALDPLSETKCTLKSFTVEKGIYQTSNFRVQPTESIVRFPNITNLCPFGEVFNATRFASVYAWNRKRISNCVADYSVLYNSASFSTFKCYGVSPTKLNDLCFTNVYADSFVIRGDEVRQIAPGQTGKIADYNYKLPDDFTGCVIAWNSNNLDSKVGGNYNYLYRLFRKSNLKPFERDISTEIYQAGSTPCNGVEGFNCYFPLQSYGFQPTNGVGYQPYRVVVLSFELLHAPATVCGPKKSTNLVKNKCVNFNFNGLTGTGVLTESNKKFLPFQQFGRDIADTTDAVRDPQTLEILDITPCSFGGVSVITPGTNTSNQVAVLYQDVNCTEVPVAIHADQLTPTWRVYSTGSNVFQTRAGCLIGAEHVNNSYECDIPIGAGICASYQTQTNSPRRARSVASQSIIAYTMSLGAENSVAYSNNSIAICTNFTISVTTEILPVSMTKTSVDCTMYICGDSTECSNLLLQYGSFCTQLNRALTGIAVEQDKNTQEVFAQVKQIYKTPPIKDFGGFNFSQILPDPSKPSKRSFIEDLLFNKVTLADAGFIKQYGDCLGDIAARDLICAQKFNGLTVLPPLLTDEMIAQYTSALLAGTITSGWTFGAGAALQIPFAMQMAYRFNGIGVTQNVLYENQKLIANQFNSAIGKIQDSLSSTASALGKLQDVVNQNAQALNTLVKQLSSNFGAISSVLNDILSRLDKVEAEVQIDRLITGRLQSLQTYVTQQLIRAAEIRASANLAATKMSECVLGQSKRVDFCGKGYHLMSFPQSAPHGVVFLHVTYVCAQEKNFTTAPAICHDGKAHFPREGVFVSNGTHWFVTQRNFYEPQIITTDNTFVSGNCDVVIGIVNNTVYDPLQPELDSGGSGYIPEAPRDGQAYVRKDGEWVLLSTFL

SEQ ID NO: 10126 - protein, 1177 aa, Artificial Sequence
  SARS-CoV-2/Guangdong/20SF028/2020__EPI_ISL_403936 spike protein (1-1147)(P715C_P1069C) Foldon construct
MFVFLVLLPLVSSQCVNLTTRTQLPPAYTNSFTRGVYYPDKVFRSSVLYSTQDLFLPFFSNVTWFHAIHVSGTNGTKRFDNPVLPFNDGVYFASTEKSNIIRGWIFGTTLDSKTQSLLIVNNATNVVIKVCEFQFCNDPFLGVYYHKNNKSWMESEFRVYSSANNCTFEYVSQPFLMDLEGKQGNFKNLREFVFKNIDGYFKIYSKHTPINLVRDLPQGFSALEPLVDLPIGINITRFQTLLALHRSYLTPGDSSSGWTAGAAAYYVGYLQPRTFLLKYNENGTITDAVDCALDPLSETKCTLKSFTVEKGIYQTSNFRVQPTESIVRFPNITNLCPFGEVFNATRFASVYAWNRKRISNCVADYSVLYNSASFSTFKCYGVSPTKLNDLCFTNVYADSFVIRGDEVRQIAPGQTGKIADYNYKLPDDFTGCVIAWNSNNLDSKVGGNYNYLYRLFRKSNLKPFERDISTEIYQAGSTPCNGVEGFNCYFPLQSYGFQPTNGVGYQPYRVVVLSFELLHAPATVCGPKKSTNLVKNKCVNFNFNGLTGTGVLTESNKKFLPFQQFGRDIADTTDAVRDPQTLEILDITPCSFGGVSVITPGTNTSNQVAVLYQDVNCTEVPVAIHADQLTPTWRVYSTGSNVFQTRAGCLIGAEHVNNSYECDIPIGAGICASYQTQTNSPRRARSVASQSIIAYTMSLGAENSVAYSNNSIAICTNFTISVTTEILPVSMTKTSVDCTMYICGDSTECSNLLLQYGSFCTQLNRALTGIAVEQDKNTQEVFAQVKQIYKTPPIKDFGGFNFSQILPDPSKPSKRSFIEDLLFNKVTLADAGFIKQYGDCLGDIAARDLICAQKFNGLTVLPPLLTDEMIAQYTSALLAGTITSGWTFGAGAALQIPFAMQMAYRFNGIGVTQNVLYENQKLIANQFNSAIGKIQDSLSSTASALGKLQDVVNQNAQALNTLVKQLSSNFGAISSVLNDILSRLDKVEAEVQIDRLITGRLQSLQTYVTQQLIRAAEIRASANLAATKMSECVLGQSKRVDFCGKGYHLMSFPQSAPHGVVFLHVTYVCAQEKNFTTAPAICHDGKAHFPREGVFVSNGTHWFVTQRNFYEPQIITTDNTFVSGNCDVVIGIVNNTVYDPLQPELDSGGSGYIPEAPRDGQAYVRKDGEWVLLSTFL

SEQ ID NO: 10127 - protein, 1177 aa, Artificial Sequence
  SARS-CoV-2/Shenzhen/SZTH-001/2020__EPI_ISL_406592 spike protein (1-1147)(P715C_P1069C) Foldon construct
MFVFLVLLPLVSSQCVNLTTRTQLPPAYTNSFTRGVYYPDKVFRSSVLHSTQDLFLPFFSNVTWFHAIHVSGTNGTKRFDNPVLPFNDGVYFASTEKSNIIRGWIFGTTLDSKTQSLLIVNNATNVVIKVCEFQFCNDPFLGVYYHKNNKSWMESEFRVYSSANNCTFEYVSQPFLMDLEGKQGNFKNLREFVFKNIDGYFKIYSKHTPINLVRDLPQGFSALEPLVDLPIGINITRFQTLLALHRSYLTPGDSSSGWTAGAAAYYVGYLQPRTFLLKYNENGTITDAVDCALDPLSETKCTLKSFTVEKGIYQTSNFRVQPTESIVRFPNITNLCPFGEVFNATRFASVYAWNRKRISNCVADYSVLYNSASFSTFKCYGVSPTKLNDLCFTNVYADSFVIRGDEVRQIAPGQTGKIADYNYKLPDDFTGCVIAWNSNNLDSKVGGNYNYLYRLFRKSNLKPFERDISTEIYQAGSTPCNGVEGFNCYFPLQSYGFQPTNGVGYQPYRVVVLSFELLHAPATVCGPKKSTNLVKNKCVNFNFNGLTGTGVLTESNKKFLPFQQFGRDIADTTDAVRDPQTLEILDITPCSFGGVSVITPGTNTSNQVAVLYQDVNCTEVPVAIHADQLTPTWRVYSTGSNVFQTRAGCLIGAEHVNNSYECDIPIGAGICASYQTQTNSPRRARSVASQSIIAYTMSLGAENSVAYSNNSIAICTNFTISVTTEILPVSMTKTSVDCTMYICGDSTECSNLLLQYGSFCTQLNRALTGIAVEQDKNTQEVFAQVKQIYKTPPIKDFGGFNFSQILPDPSKPSKRSFIEDLLFNKVTLADAGFIKQYGDCLGDIAARDLICAQKFNGLTVLPPLLTDEMIAQYTSALLAGTITSGWTFGAGAALQIPFAMQMAYRFNGIGVTQNVLYENQKLIANQFNSAIGKIQDSLSSTASALGKLQDVVNQNAQALNTLVKQLSSNFGAISSVLNDILSRLDKVEAEVQIDRLITGRLQSLQTYVTQQLIRAAEIRASANLAATKMSECVLGQSKRVDFCGKGYHLMSFPQSAPHGVVFLHVTYVCAQEKNFTTAPAICHDGKAHFPREGVFVSNGTHWFVTQRNFYEPQIITTDNTFVSGNCDVLIGIVNNTVYDPLQPELDSGGSGYIPEAPRDGQAYVRKDGEWVLLSTFL

SEQ ID NO: 10128 - protein, 1177 aa, Artificial Sequence
  SARS-CoV-2/Shenzhen/SZTH-004/2020__EPI_ISL_406595 spike protein (1-1147)(P715C_P1069C) Foldon construct
MFVFLVLLPLVSSQCVNLTTRTQLPPAYTNSFTRGVYYPDKVFRSSVLHSTQDLFLPFFSNVTWFHAIHVSGTNGTKRFDNPVLPFNDGVYFASTEKSNIIRGWIFGTTLDSKTQSLLIVNNATNVVIKVCEFQFCNDPFLGVYYHKNNKSWMESEFRVYSSANNCTFEYVSQPFLMDLEGKQGNFKNLREFVFKNIDGYFKIYSKHTPINLVRDLPQGFSALEPLVDLPIGINITRFQTLLALHRSYLTPGDSSSGWTAGAAAYYVGYLQPRTFLLKYNENGTITDAVDCALDPLSETKCTLKSFTVEKGIYQTSNFRVQPTESIVRFPNITNLCPFGEVFNATRFASVYAWDRKRISNCVAYYSVLYNSASFSTFKCYGVSPTKLNDLCFTNVYADSFVIRGDEVRQIAPGQTGKIADYNYKLPDDFTGCVIAWNSNNLDSKVGGNYNYLYRLFRKSNLKPFERDISTEIYQAGSTPCNGVEGFNCYFPLQSYGFQPTNGVGYQPYRVVVLSFELLHAPATVCGPKKSTNLVKNKCVNFNFNGLTGTGVLTESNKKFLPFQQFGRDIADTTDAVRDPQTLEILDITPCSFGGVSVITPGTNTSNQVAVLYQDVNCTEVPVAIHADQLTPTWRVYSTGSNVFQTRAGCLIGAEHVNNSYECDIPIGAGICASYQTQTNSPRRARSVASQSIIAYTMSLGAENSVAYSNNSIAICTNFTISVTTEILPVSMTKTSVDCTMYICGDSTECSNLLLQYGSFCTQLNRALTGIAVEQDKNTQEVFAQVKQIYKTPPIKDFGGFNFSQILPDPSKPSKRSFIEDLLFNKVTLADAGFIKQYGDCLGDIAARDLICAQKFNGLTVLPPLLTDEMIAQYTSALLAGTITSGWTFGAGAALQIPFAMQMAYRFNGIGVTQNVLYENQKLIANQFNSAIGKIQDSLSSTASALGKLQDVVNQNAQALNTLVKQLSSNFGAISSVLNDILSRLDKVEAEVQIDRLITGRLQSLQTYVTQQLIRAAEIRASANLAATKMSECVLGQSKRVDFCGKGYHLMSFPQSAPHGVVFLHVTYVCAQEKNFTTAPAICHDGKAHFPREGVFVSNGTHWFVTQRNFYEPQIITTDNTFVSGNCDVVIGIVNNTVYDPLQPELDSGGSGYIPEAPRDGQAYVRKDGEWVLLSTFL

SEQ ID NO: 10129 - protein, 1177 aa, Artificial Sequence
  SARS-CoV-2/France/IDF0372/2020__EPI_ISL_406596 spike protein (1-1147)(P715C_P1069C) Foldon construct
MFVFLVLLPLVSSQCVNLTTRTQLPPAYTNSFTRGVYYPDKVFRSSVLHSTQDLFLPFFSNVTWFHAIHVSGTNGTKRFDNPVLPFNDGVYFASTEKSNIIRGWIFGTTLDSKTQSLLIVNNATNVVIKVCEFQFCNDPFLGVYYHKNNKSWMESEFRVYSSANNCTFEYVSQPFLMDLEGKQGNFKNLREFVFKNIDGYFKIYSKHTPINLVRDLPQGFSALEPLVDLPIGINITRFQTLLALHRSYLTPGDSSSGWTAGAAAYYVGYLQPRTFLLKYNENGTITDAVDCALDPLSETKCTLKSFTVEKGIYQTSNFRVQPTESIVRFPNITNLCPFGEVFNATRFASVYAWNRKRISNCVADYSFLYNSASFSTFKCYGVSPTKLNDLCFTNVYADSFVIRGDEVRQIAPGQTGKIADYNYKLPDDFTGCVIAWNSNNLDSKVGGNYNYLYRLFRKSNLKPFERDISTEIYQAGSTPCNGVEGFNCYFPLQSYGFQPTNGVGYQPYRVVVLSFELLHAPATVCGPKKSTNLVKNKCVNFNFNGLTGTGVLTESNKKFLPFQQFGRDIADTTDAVRDPQTLEILDITPCSFGGVSVITPGTNTSNQVAVLYQDVNCTEVPVAIHADQLTPTWRVYSTGSNVFQTRAGCLIGAEHVNNSYECDIPIGAGICASYQTQTNSPRRARSVASQSIIAYTMSLGAENSVAYSNNSIAICTNFTISVTTEILPVSMTKTSVDCTMYICGDSTECSNLLLQYGSFCTQLNRALTGIAVEQDKNTQEVFAQVKQIYKTPPIKDFGGFNFSQILPDPSKPSKRSFIEDLLFNKVTLADAGFIKQYGDCLGDIAARDLICAQKFNGLTVLPPLLTDEMIAQYTSALLAGTITSGWTFGAGAALQIPFAMQMAYRFNGIGVTQNVLYENQKLIANQFNSAIGKIQDSLSSTASALGKLQDVVNQNAQALNTLVKQLSSNFGAISSVLNDILSRLDKVEAEVQIDRLITGRLQSLQTYVTQQLIRAAEIRASANLAATKMSECVLGQSKRVDFCGKGYHLMSFPQSAPHGVVFLHVTYVCAQEKNFTTAPAICHDGKAHFPREGVFVSNGTHWFVTQRNFYEPQIITTDNTFVSGNCDVVIGIVNNTVYDPLQPELDSGGSGYIPEAPRDGQAYVRKDGEWVLLSTFL

SEQ ID NO: 10130 - protein, 1177 aa, Artificial Sequence
  SARS-CoV-2/Australia/VIC01/2020__EPI_ISL_406844 spike protein (1-1147)(P715C_P1069C) Foldon construct
MFVFLVLLPLVSSQCVNLTTRTQLPPAYTNSFTRGVYYPDKVFRSSVLHSTQDLFLPFFSNVTWFHAIHVSGTNGTKRFDNPVLPFNDGVYFASTEKSNIIRGWIFGTTLDSKTQSLLIVNNATNVVIKVCEFQFCNDPFLGVYYHKNNKSWMESEFRVYSSANNCTFEYVSQPFLMDLEGKQGNFKNLREFVFKNIDGYFKIYSKHTPINLVRDLPQGFSALEPLVDLPIGINITRFQTLLALHRRYLTPGDSSSGWTAGAAAYYVGYLQPRTFLLKYNENGTITDAVDCALDPLSETKCTLKSFTVEKGIYQTSNFRVQPTESIVRFPNITNLCPFGEVFNATRFASVYAWNRKRISNCVADYSVLYNSASFSTFKCYGVSPTKLNDLCFTNVYADSFVIRGDEVRQIAPGQTGKIADYNYKLPDDFTGCVIAWNSNNLDSKVGGNYNYLYRLFRKSNLKPFERDISTEIYQAGSTPCNGVEGFNCYFPLQSYGFQPTNGVGYQPYRVVVLSFELLHAPATVCGPKKSTNLVKNKCVNFNFNGLTGTGVLTESNKKFLPFQQFGRDIADTTDAVRDPQTLEILDITPCSFGGVSVITPGTNTSNQVAVLYQDVNCTEVPVAIHADQLTPTWRVYSTGSNVFQTRAGCLIGAEHVNNSYECDIPIGAGICASYQTQTNSPRRARSVASQSIIAYTMSLGAENSVAYSNNSIAICTNFTISVTTEILPVSMTKTSVDCTMYICGDSTECSNLLLQYGSFCTQLNRALTGIAVEQDKNTQEVFAQVKQIYKTPPIKDFGGFNFSQILPDPSKPSKRSFIEDLLFNKVTLADAGFIKQYGDCLGDIAARDLICAQKFNGLTVLPPLLTDEMIAQYTSALLAGTITSGWTFGAGAALQIPFAMQMAYRFNGIGVTQNVLYENQKLIANQFNSAIGKIQDSLSSTASALGKLQDVVNQNAQALNTLVKQLSSNFGAISSVLNDILSRLDKVEAEVQIDRLITGRLQSLQTYVTQQLIRAAEIRASANLAATKMSECVLGQSKRVDFCGKGYHLMSFPQSAPHGVVFLHVTYVCAQEKNFTTAPAICHDGKAHFPREGVFVSNGTHWFVTQRNFYEPQIITTDNTFVSGNCDVVIGIVNNTVYDPLQPELDSGGSGYIPEAPRDGQAYVRKDGEWVLLSTFL

SEQ ID NO: 10131 - protein, 1177 aa, Artificial Sequence
  SARS-CoV-2/Germany/BavPat1/2020__EPI_ISL_406862 spike protein (1-1147)(P715C_P1069C) Foldon construct
MFVFLVLLPLVSSQCVNLTTRTQLPPAYTNSFTRGVYYPDKVFRSSVLHSTQDLFLPFFSNVTWFHAIHVSGTNGTKRFDNPVLPFNDGVYFASTEKSNIIRGWIFGTTLDSKTQSLLIVNNATNVVIKVCEFQFCNDPFLGVYYHKNNKSWMESEFRVYSSANNCTFEYVSQPFLMDLEGKQGNFKNLREFVFKNIDGYFKIYSKHTPINLVRDLPQGFSALEPLVDLPIGINITRFQTLLALHRSYLTPGDSSSGWTAGAAAYYVGYLQPRTFLLKYNENGTITDAVDCALDPLSETKCTLKSFTVEKGIYQTSNFRVQPTESIVRFPNITNLCPFGEVFNATRFASVYAWNRKRISNCVADYSVLYNSASFSTFKCYGVSPTKLNDLCFTNVYADSFVIRGDEVRQIAPGQTGKIADYNYKLPDDFTGCVIAWNSNNLDSKVGGNYNYLYRLFRKSNLKPFERDISTEIYQAGSTPCNGVEGFNCYFPLQSYGFQPTNGVGYQPYRVVVLSFELLHAPATVCGPKKSTNLVKNKCVNFNFNGLTGTGVLTESNKKFLPFQQFGRDIADTTDAVRDPQTLEILDITPCSFGGVSVITPGTNTSNQVAVLYQGVNCTEVPVAIHADQLTPTWRVYSTGSNVFQTRAGCLIGAEHVNNSYECDIPIGAGICASYQTQTNSPRRARSVASQSIIAYTMSLGAENSVAYSNNSIAICTNFTISVTTEILPVSMTKTSVDCTMYICGDSTECSNLLLQYGSFCTQLNRALTGIAVEQDKNTQEVFAQVKQIYKTPPIKDFGGFNFSQILPDPSKPSKRSFIEDLLFNKVTLADAGFIKQYGDCLGDIAARDLICAQKFNGLTVLPPLLTDEMIAQYTSALLAGTITSGWTFGAGAALQIPFAMQMAYRFNGIGVTQNVLYENQKLIANQFNSAIGKIQDSLSSTASALGKLQDVVNQNAQALNTLVKQLSSNFGAISSVLNDILSRLDKVEAEVQIDRLITGRLQSLQTYVTQQLIRAAEIRASANLAATKMSECVLGQSKRVDFCGKGYHLMSFPQSAPHGVVFLHVTYVCAQEKNFTTAPAICHDGKAHFPREGVFVSNGTHWFVTQRNFYEPQIITTDNTFVSGNCDVVIGIVNNTVYDPLQPELDSGGSGYIPEAPRDGQAYVRKDGEWVLLSTFL

SEQ ID NO: 10132 - protein, 1177 aa, Artificial Sequence
  SARS-CoV-2/Wuhan/HBCDC-HB-02/2020__EPI_ISL_412978 spike protein (1-1147)(P715C_P1069C) Foldon construct
MFVFLVLLPLVSSQCVNLTTRTQLPPAYTNSFTRGVYYPDKVFRSSVLHSTQDLFLPFFSNVTWFHAIHVSGTNGTKRFDNPVLPFNDGVYFASTEKSNIIRGWIFGTTLDSKTQSLLIVNNATNVVIKVCEFQFCNDPFLGVYYHKNNKSWMESEFRVYSSANNCTFEYVSQPFLMDLEGKQGNFKNLREFVFKNIDGYFKIYSKHTPINLVRDLPQGFSALEPLVDLPIGINITRFQTLLALHRSYLTPGDSSSGWTAGAAAYYVGYLQPRTFLLKYNENGTITDAVDCALDPLSETKCTLKSFTVEKGIYQTSNFRVQPTESIVRFPNITNLCPFGEVFNATRFASVYAWNRKRISNCVADYSVLYNSASFSTFKCYGVSPTKLNDLCFTNVYADSFVIRGDEVRQIAPGQTGKIADYNYKLPDDFTGCVIAWNSNNLDSKVGGNYNYLYRLFRKSNLKPFERDISTEIYQAGSTPCNGVEGFNCYFPLQSYGFQPTNGVGYQPYRVVVLSFELLHAPATVCGPKKSTNLVKNKCVNFNFNGLTGTGVLTESNKKFLPFQQFGRDIADTTDAVRDPQTLEILDITPCSFGGVSVITPGTNTSNQVAVLYQDVNCTEVPVAIHADQLTPTWRVYSTGSNVFQTRAGCLIGAEHVNNSYECDIPIGAGICASYQTQTNSPRRARSVASQSIIAYTMSLGAENSVAYSNNSIAICTNFTISVTTEILPVSMTKTSVDCTMYICGDSTECSNFLLQYGSFCTQLNRALTGIAVEQDKNTQEVFAQVKQIYKTPPIKDFGGFNFSQILPDPSKPSKRSFIEDLLFNKVTLADAGFIKQYGDCLGDIAARDLICAQKFNGLTVLPPLLTDEMIAQYTSALLAGTITSGWTFGAGAALQIPFAMQMAYRFNGIGVTQNVLYENQKLIANQFNSAIGKIQDSLSSTASALGKLQDVVNQNAQALNTLVKQLSSNFGAISSVLNDILSRLDKVEAEVQIDRLITGRLQSLQTYVTQQLIRAAEIRASANLAATKMSECVLGQSKRVDFCGKGYHLMSFPQSAPHGVVFLHVTYVCAQEKNFTTAPAICHDGKAHFPREGVFVSNGTHWFVTQRNFYEPQIITTDNTFVSGNCDVVIGIVNNTVYDPLQPELDSGGSGYIPEAPRDGQAYVRKDGEWVLLSTFL

SEQ ID NO: 10133 - protein, 1177 aa, Artificial Sequence
  SARS-CoV-2/Australia/QLD02/2020__EPI_ISL_407896 spike protein (1-1147)(P715C_P1069C) Foldon construct
MFVFLVLLPLVSSQCVNLTTRTQLPPAYTNSFTRGVYYPDKVFRSSVLHSTQDLFLPFFSNVTWFHAIHVSGTNGTKRFDNPVLPFNDGVYFASTEKSNIIRGWIFGTTLDSKTQSLLIVNNATNVVIKVCEFQFCNDPFLGVYYHKNNKSWMESEFRVYSSANNCTFEYVSQPFLMDLEGKQGNFKNLREFVFKNIDGYFKIYSKHTPINLVRDLPQGFSALEPLVDLPIGINITRFQTLLALHRSYLTPGDSSSGWTAGAAAYYVGYLQPRTFLLKYNENGTITDAVDCALDPLSETKCTLKSFTVEKGIYQTSNFRVQPTESIVRFPNITNLCPFGEVFNATRFASVYAWNRKRISNCVADYSVLYNSASFSTFKCYGVSPTKLNDLCFTNVYADSFVIRGDEVRQIAPGQTGKIADYNYKLPDDFTGCVIAWNSNNLDSKVGGNYNYLYRLFRKSNLKPFERDISTEIYQAGSTPCNGVEGFNCYFPLQSYGFQPTNGVGYQPYRVVVLSFELLHAPATVCGPKKSTNLVKNKCVNFNFNGLTGTGVLTESNKKFLPFQQFGRDIADTTDAVRDPQTLEILDITPCSFGGVSVITPGTNTSNQVAVLYQDVNCTEVPVAIHADQLTPTWRVYSTGSNVFQTRAGCLIGAEHVNNSYECDIPIGAGICASYQTQTNSPRRARSVASQSIIAYTMSLGAENSVAYSNNSIAICTNFTISVTTEILPVSMTKTSVDCTMYICGDSTECSNLLLQYGSFCTQLNRALTGIAVEQDKNTQEVFAQVKQIYKTPPIKDFGGFNFSQILPDPSKPSKRSFIEDLLFNKVTLADAGFIKQYGDCLGDIAARDLICAQKFNGLTVLPPLLTDEMIAQYTSALLAGTITSGWTFGAGAALQIPFAMQMAYRFNGIGVTQNVLYENQKLIANQFNSAIGKIQDSLSSTASALGKLQDVVNQNAQALNTLVKQLSSNFGAISSVLNDILSRLDKVEAEVQIDRLITGRLQSLQTYVTQQLIRAAEIRASANLAATKMSECVLGQSKRVDFCGKGYHLMSFPQSAPHGVVFLHVTYVCAQEKNFTTAPAICHDGKAHFPREGVFVSNGTHWFVTQRNFYEPQIITTDNTFVSGNCDVVIGIVNNTVYDPLQLELDSGGSGYIPEAPRDGQAYVRKDGEWVLLSTFL

SEQ ID NO: 10134 - protein, 1177 aa, Artificial Sequence
  SARS-CoV-2/India/1-31/2020__EPI_ISL_413523 spike protein (1-1147)(P715C_P1069C) Foldon construct
MFVFLVLLPLVSSQCVNLTTRTQLPPAYTNSFTRGVYYPDKVFRSSVLHSTQDLFLPFFSNVTWFHAIHVSGTNGTKRFDNPVLPFNDGVYFASTEKSNIIRGWIFGTTLDSKTQSLLIVNNATNVVIKVCEFQFCNDPFLGVYYHKNNKSWMESEFRVYSSANNCTFEYVSQPFLMDLEGKQGNFKNLREFVFKNIDGYFKIYSKHTPINLVRDLPQGFSALEPLVDLPIGINITRFQTLLALHRSYLTPGDSSSGWTAGAAAYYVGYLQPRTFLLKYNENGTITDAVDCALDPLSETKCTLKSFTVEKGIYQTSNFRVQPTESIVRFPNITNLCPFGEVFNATRFASVYAWNRKRISNCVADYSVLYNSASFSTFKCYGVSPTKLNDLCFTNVYADSFVIRGDEVRQIAPGQTGKIADYNYKLPDDFTGCVIAWNSNNLDSKVGGNYNYLYRLFRKSNLKPFERDISTEIYQAGSTPCNGVEGFNCYFPLQSYGFQPTNGVGYQPYRVVVLSFELLHAPATVCGPKKSTNLVKNKCVNFNFNGLTGTGVLTESNKKFLPFQQFGRDIADTTDAVRDPQTLEILDITPCSFGGVSVITPGTNTSNQVAVLYQDVNCTEVPVAIHADQLTPTWRVYSTGSNVFQTRAGCLIGAEHVNNSYECDIPIGAGICASYQTQTNSPRRARSVASQSIIAYTMSLGAENSVAYSNNSIAICTNFTISVTTEILPVSMTKTSVDCTMYICGDSTECSNLLLQYGSFCTQLNRALTGIAVEQDKNTQEVFAQVKQIYKTPPIKDFGGFNFSQILPDPSKPSKRSFIEDLLFNKVTLADAGFIKQYGDCLGDIAARDLICAQKFNGLTVLPPLLTDEMIAQYTSALLAGTITSGWTFGAGAALQIPFAMQMAYRFNGIGVTQNVLYENQKLIANQFNSVIGKIQDSLSSTASALGKLQDVVNQNAQALNTLVKQLSSNFGAISSVLNDILSRLDKVEAEVQIDRLITGRLQSLQTYVTQQLIRAAEIRASANLAATKMSECVLGQSKRVDFCGKGYHLMSFPQSAPHGVVFLHVTYVCAQEKNFTTAPAICHDGKAHFPREGVFVSNGTHWFVTQRNFYEPQIITTDNTFVSGNCDVVIGIVNNTVYDPLQPELDSGGSGYIPEAPRDGQAYVRKDGEWVLLSTFL

SEQ ID NO: 10135 - protein, 1177 aa, Artificial Sequence
  SARS-CoV-2/Guangdong/GD2020087-P0008/2020__EPI_ISL_413863 spike protein (1-1147)(P715C_P1069C) Foldon construct
MFVFLVLLPLVSSQCVNLTTRTQLPPAYTNSFTRGVYYPDKVFRSSVLHSTQDLFLPFFSNVTWFHAIHVSGTNGTKRFDNPVLPFNDGVYFASTEKSNIIRGWIFGTTLDSKTQSLLIVNNATNVVIKVCEFQFCNDPFLGVYYHKNNKSWMESEFRVYSSANNCTFEYVSQPFLMDLEGKQGNFKNLREFVFKNIDGYFKIYSKHTPINLVRDLPQGFSALEPLVDLPIGINITRFQTLLALHRSYLTPGDSSSGWTAGAAAYYVGYLQPRTFLLKYNENGTITDAVDCALDPLSETKCTLKSFTVEKGIYQTSNFRVQPTESIVRFPNITNLCPFGEVFNATRFASVYAWNRKRISNCVADYSVLYNSASFSTFKCYGVSPTKLNDLCFTNVYADSFVIRGDEVREIAPGQTGKIADYNYKLPDDFTGCVIAWNSNNLDSKVGGNYNYLYRLFRKSNLKPFERDISTEIYQAGSTPCNGVEGFNCYFPLQSYGFQPTNGVGYQPYRVVVLSFELLHAPATVCGPKKSTNLVKNKCVNFNFNGLTGTGVLTESNKKFLPFQQFGRDIADTTDAVRDPQTLEILDITPCSFGGVSVITPGTNTSNQVAVLYQDVNCTEVPVAIHADQLTPTWRVYSTGSNVFQTRAGCLIGAEHVNNSYECDIPIGAGICASYQTQTNSPRRARSVASQSIIAYTMSLGAENSVAYSNNSIAICTNFTISVTTEILPVSMTKTSVDCTMYICGDSTECSNLLLQYGSFCTQLNRALTGIAVEQDKNTQEVFAQVKQIYKTPPIKDFGGFNFSQILPDPSKPSKRSFIEDLLFNKVTLADAGFIKQYGDCLGDIAARDLICAQKFNGLTVLPPLLTDEMIAQYTSALLAGTITSGWTFGAGAALQIPFAMQMAYRFNGIGVTQNVLYENQKLIANQFNSAIGKIQDSLSSTASALGKLQDVVNQNAQALNTLVKQLSSNFGAISSVLNDILSRLDKVEAEVQIDRLITGRLQSLQTYVTQQLIRAAEIRASANLAATKMSECVLGQSKRVDFCGKGYHLMSFPQSAPHGVVFLHVTYVCAQEKNFTTAPAICHDGKAHFPREGVFVSNGTHWFVTQRNFYEPQIITTDNTFVSGNCDVVIGIVNNTVYDPLQPELDSGGSGYIPEAPRDGQAYVRKDGEWVLLSTFL

SEQ ID NO: 10136 - protein, 1177 aa, Artificial Sequence
  SARS-CoV-2/Sweden/01/2020__EPI_ISL_411951 spike protein (1-1147)(P715C_P1069C) Foldon construct
MFVFLVLLPLVSSQCVNLTTRTQLPPAYTNSFTRGVYYPDKVFRSSVLHSTQDLFLPFFSNVTWFHAIHVSGTNGTKRFDNPVLPFNDGVYFASTEKSNIIRGWIFGTTLDSKTQSLLIVNNATNVVIKVCEFQFCNDPFLGVYYHKNNKSWMESEFRVYSSANNCTFEYVSQPFLMDLEGKQGNFKNLREFVFKNIDGYFKIYSKHTPINLVRDLPQGFSALEPLVDLPIGINITRFQTLLALHRSYLTPGDSSSGWTAGAAAYYVGYLQPRTFLLKYNENGTITDAVDCALDPLSETKCTLKSFTVEKGIYQTSNFRVQPTESIVRFPNITNLCPFGEVFNATRFASVYAWNRKRISNCVADYSVLYNSASFSTFKCYGVSPTKLNDLCFTNVYADSFVIRGDEVRQIAPGQTGKIADYNYKLPDDFTGCVIAWNSNNLDSKVGGNYNYLYRLFRKSNLKPFERDISTEIYQAGSTPCNGVEGFNCYFPLQSYGFQPTNGVGYQPYRVVVLSFELLHAPATVCGPKKSTNLVKNKCVNFNFNGLTGTGVLTESNKKFLPFQQFGRDIADTTDAVRDPQTLEILDITPCSFGGVSVITPGTNTSNQVAVLYQDVNCTEVPVAIHADQLTPTWRVYSTGSNVFQTRAGCLIGAEHVNNSYECDIPIGAGICASYQTQTNSPRRARSVASQSIIAYTMSLGAENSVAYSNNSIAICTNFTISVTTEILPVSMTKTSVDCTMYICGDSTECSNLLLQYGSFCTQLNRALTGIAVEQDKNTQEVFAQVKQIYKTPPIKDCGGFNFSQILPDPSKPSKRSFIEDLLFNKVTLADAGFIKQYGDCLGDIAARDLICAQKFNGLTVLPPLLTDEMIAQYTSALLAGTITSGWTFGAGAALQIPFAMQMAYRFNGIGVTQNVLYENQKLIANQFNSAIGKIQDSLSSTASALGKLQDVVNQNAQALNTLVKQLSSNFGAISSVLNDILSRLDKVEAEVQIDRLITGRLQSLQTYVTQQLIRAAEIRASANLAATKMSECVLGQSKRVDFCGKGYHLMSFPQSAPHGVVFLHVTYVCAQEKNFTTAPAICHDGKAHFPREGVFVSNGTHWFVTQRNFYEPQIITTDNTFVSGNCDVVIGIVNNTVYDPLQPELDSGGSGYIPEAPRDGQAYVRKDGEWVLLSTFL

SEQ ID NO: 10137 - protein, 1177 aa, Artificial Sequence
  SARS-CoV-2/Tianmen/HBCDC-HB-07/2020__EPI_ISL_412983 spike protein (1-1147)(P715C_P1069C) Foldon construct
MFVFLVLLPLVSSQCVNLTTRTQLPPAYTNSFTRGVYYPDKVFRSSVLHSTQDLFLPFFSNVTWFHAIHVSGTNGTKRFDNPVLPFNDGVYFASTEKSNIIRGWIFGTTLDSKTQSLLIVNNATNVVIKVCEFQFCNDPFLGVYYHKNNKSWMESEFRVYSSANNCTFEYVSQPFLMDLEGKQGNFKNLREFVFKNIDGYFKIYSKHTPINLVRDLPQGFSALEPLVDLPIGINITRFQTLLALHRSYLTPGDSSSGWTAGAAAYYVGYLQPRTFLLKYNENGTITDAVDCALDPLSETKCTLKSFTVEKGIYQTSNFRVQPTESIVRFPNITNLCPFGEVFNATRFASVYAWNRKRISNCVADYSVLYNSASFSTFKCYGVSPTKLNDLCFTNVYADSFVIRGDEVRQIAPGQTGKIADYNYKLPDDFTGCVIAWNSNNLDSKVGGNYNYLYRLFRKSNLKPFERDISTEIYQAGSTPCNGVEGFNCYFPLQSYGFQPTNGVGYQPYRVVVLSFELLHAPATVCGPKKSTNLVKNKCVNFNFNGLTGTGVLTESNKKFLPFQQFGRDIADTTDAVRDPQTLEILDITPCSFGGVSVITPGTNTSNQVAVLYQDLNCTEVPVAIHADQLTPTWRVYSTGSNVFQTRAGCLIGAEHVNNSYECDIPIGAGICASYQTQTNSPRRARSVASQSIIAYTMSLGAENSVAYSNNSIAICTNFTISVTTEILPVSMTKTSVDCTMYICGDSTECSNLLLQYGSFCTQLNRALTGIAVEQDKNTQEVFAQVKQIYKTPPIKDFGGFNFSQILPDPSKPSKRSFIEDLLFNKVTLADAGFIKQYGDCLGDIAARDLICAQKFNGLTVLPPLLTDEMIAQYTSALLAGTITSGWTFGAGAALQIPFAMQMAYRFNGIGVTQNVLYENQKLIANQFNSAIGKIQDSLSSTASALGKLQDVVNQNAQALNTLVKQLSSNFGAISSVLNDILSRLDKVEAEVQIDRLITGRLQSLQTYVTQQLIRAAEIRASANLAATKMSECVLGQSKRVDFCGKGYHLMSFPQSAPHGVVFLHVTYVCAQEKNFTTAPAICHDGKAHFPREGVFVSNGTHWFVTQRNFYEPQIITTDNTFVSGNCDVVIGIVNNTVYDPLQPELDSGGSGYIPEAPRDGQAYVRKDGEWVLLSTFL

SEQ ID NO: 10138 - protein, 1177 aa, Artificial Sequence
  SARS-CoV-2/Hong Kong/case42_VM20002493/2020__EPI_ISL_414527 spike protein (1-1147)(P715C_P1069C) Foldon construct
MFVFLVLLPLVSSQCVNLTTRTQLPPAYTNSFTRGVYYPDKVFRSSVLHSTQDLFLPFFSNVTWFHAIHVSGTNGTKRFDNPVLPFNDGVYFASTEKSNIIRGWIFGTTLDSKTQSLLIVNNATNVVIKVCEFQFCNDPFLGVYYHKNNKSWMESEFRVYSSANNCTFEYVSQPFLMDLEGKQGNFKNLREFVFKNIDGYFKIYSKHTPINLVRDLPQGFSALEPLVDLPIGINITRFQTLLALHRSYLTPGDSSSGWTAGAAAYYVGYLQPRTFLLKYNENGTITDAVDCALDPLSETKCTLKSFTVEKGIYQTSNFRVQPTESIVRFPNITNLCPFGEVFNATRFASVYAWNRKRISNCVADYSVLYNSASFSTFKCYGVSPTKLNDLCFTNVYADSFVIRGDEVRQIAPGQTGKIADYNYKLPDDFTGCVIAWNSNNLDSKVGGNYNYLYRLFRKSNLKPFERDISTEIYQAGSTPCNGVEGFNCYFPLQSYGFQPTNGVGYQPYRVVVLSFELLHAPATVCGPKKSTNLVKNKCVNFNFNGLTGTGVLTESNKKFLPFQQFGRDIADTTDAVRDPQTLEILDITPCSFGGVSVITPGTNTSNQVAVLYQDVNCTEVPVAIHADQLTPTWRVYSTGSNVFQTRAGCLIGAEHVNNSYECDIPIGAGICASYQTQTNSPRRARSVASQSIIAYTMSLGAENSVAYSNNSIAICTNFAISVTTEILPVSMTKTSVDCTMYICGDSTECSNLLLQYGSFCTQLNRALTGIAVEQDKNTQEVFAQVKQIYKTPPIKDFGGFNFSQILPDPSKPSKRSFIEDLLFNKVTLADAGFIKQYGDCLGDIAARDLICAQKFNGLTVLPPLLTDEMIAQYTSALLAGTITSGWTFGAGAALQIPFAMQMAYRFNGIGVTQNVLYENQKLIANQFNSAIGKIQDSLSSTASALGKLQDVVNQNAQALNTLVKQLSSNFGAISSVLNDILSRLDKVEAEVQIDRLITGRLQSLQTYVTQQLIRAAEIRASANLAATKMSECVLGQSKRVDFCGKGYHLMSFPQSAPHGVVFLHVTYVCAQEKNFTTAPAICHDGKAHFPREGVFVSNGTHWFVTQRNFYEPQIITTDNTFVSGNCDVVIGIVNNTVYDPLQPELDSGGSGYIPEAPRDGQAYVRKDGEWVLLSTFL

SEQ ID NO: 10139 - protein, 1177 aa, Artificial Sequence
  SARS-CoV-2/USA/CruiseA-23/2020__EPI_ISL_414482 spike protein (1-1147)(P715C_P1069C) Foldon construct
MFVFLVLLPLVSSQCVNLTTRTQLPPAYTNSFTRGVYYPDKVFRSSVLHSTQDLFLPFFSNVTWFHAIHVSGTNGTKRFDNPVLPFNDGVYFASTEKSNIIRGWIFGTTLDSKTQSLLIVNNATNVVIKVCEFQFCNDPFLGVYYHKNNKSWMESEFRVYSSANNCTFEYVSQPFLMDLEVKQGNFKNLREFVFKNIDGYFKIYSKHTPINLVRDLPQGFSALEPLVDLPIGINITRFQTLLALHRSYLTPGDSSSGWTAGAAAYYVGYLQPRTFLLKYNENGTITDAVDCALDPLSETKCTLKSFTVEKGIYQTSNFRVQPTESIVRFPNITNLCPFGEVFNATRFASVYAWNRKRISNCVADYSVLYNSASFSTFKCYGVSPTKLNDLCFTNVYADSFVIRGDEVRQIAPGQTGKIADYNYKLPDDFTGCVIAWNSNNLDSKVGGNYNYLYRLFRKSNLKPFERDISTEIYQAGSTPCNGVEGFNCYFPLQSYGFQPTNGVGYQPYRVVVLSFELLHAPATVCGPKKSTNLVKNKCVNFNFNGLTGTGVLTESNKKFLPFQQFGRDIADTTDAVRDPQTLEILDITPCSFGGVSVITPGTNTSNQVAVLYQDVNCTEVPVAIHADQLTPTWRVYSTGSNVFQTRAGCLIGAEHVNNSYECDIPIGAGICASYQTQTNSPRRARSVASQSIIAYTMSLGAENSVAYSNNSIAICTNFTISVTTEILPVSMTKTSVDCTMYICGDSTECSNLLLQYGSFCTQLNRALTGIAVEQDKNTQEVFAQVKQIYKTPPIKDFGGFNFSQILPDPSKPSKRSFIEDLLFNKVTLADAGFIKQYGDCLGDIAARDLICAQKFNGLTVLPPLLTDEMIAQYTSALLAGTITSGWTFGAGAALQIPFAMQMAYRFNGIGVTQNVLYENQKLIANQFNSAIGKIQDSLSSTASALGKLQDVVNQNAQALNTLVKQLSSNFGAISSVLNDILSRLDKVEAEVQIDRLITGRLQSLQTYVTQQLIRAAEIRASANLAATKMSECVLGQSKRVDFCGKGYHLMSFPQSAPHGVVFLHVTYVCAQEKNFTTAPAICHDGKAHFPREGVFVSNGTHWFVTQRNFYEPQIITTDNTFVSGNCDVVIGIVNNTVYDPLQPELDSGGSGYIPEAPRDGQAYVRKDGEWVLLSTFL

SEQ ID NO: 10140 - protein, 1177 aa, Artificial Sequence
  SARS-CoV-2/Hong Kong/case85_VM20002868/2020__EPI_ISL_414519 spike protein (1-1147)(P715C_P1069C) Foldon construct
MFVFLVLVPLVSSQCVNLTTRTQLPPAYTNSFTRGVYYPDKVFRSSVLHSTQDLFLPFFSNVTWFHAIHVSGTNGTKRFDNPVLPFNDGVYFASTEKSNIIRGWIFGTTLDSKTQSLLIVNNATNVVIKVCEFQFCNDPFLGVYYHKNNKSWMESEFRVYSSANNCTFEYVSQPFLMDLEGKQGNFKNLREFVFKNIDGYFKIYSKHTPINLVRDLPQGFSALEPLVDLPIGINITRFQTLLALHRSYLTPGDSSSGWTAGAAAYYVGYLQPRTFLLKYNENGTITDAVDCALDPLSETKCTLKSFTVEKGIYQTSNFRVQPTESIVRFPNITNLCPFGEVFNATRFASVYAWNRKRISNCVADYSVLYNSASFSTFKCYGVSPTKLNDLCFTNVYADSFVIRGDEVRQIAPGQTGKIADYNYKLPDDFTGCVIAWNSNNLDSKVGGNYNYLYRLFRKSNLKPFERDISTEIYQAGSTPCNGVEGFNCYFPLQSYGFQPTNGVGYQPYRVVVLSFELLHAPATVCGPKKSTNLVKNKCVNFNFNGLTGTGVLTESNKKFLPFQQFGRDIADTTDAVRDPQTLEILDITPCSFGGVSVITPGTNTSNQVAVLYQDVNCTEVPVAIHADQLTPTWRVYSTGSNVFQTRAGCLIGAEHVNNSYECDIPIGAGICASYQTQTNSPRRARSVASQSIIAYTMSLGAENSVAYSNNSIAICTNFTISVTTEILPVSMTKTSVDCTMYICGDSTECSNLLLQYGSFCTQLNRALTGIAVEQDKNTQEVFAQVKQIYKTPPIKDFGGFNFSQILPDPSKPSKRSFIEDLLFNKVTLADAGFIKQYGDCLGDIAARDLICAQKFNGLTVLPPLLTDEMIAQYTSALLAGTITSGWTFGAGAALQIPFAMQMAYRFNGIGVTQNVLYENQKLIANQFNSAIGKIQDSLSSTASALGKLQDVVNQNAQALNTLVKQLSSNFGAISSVLNDILSRLDKVEAEVQIDRLITGRLQSLQTYVTQQLIRAAEIRASANLAATKMSECVLGQSKRVDFCGKGYHLMSFPQSAPHGVVFLHVTYVCAQEKNFTTAPAICHDGKAHFPREGVFVSNGTHWFVTQRNFYEPQIITTDNTFVSGNCDVVIGIVNNTVYDPLQPELDSGGSGYIPEAPRDGQAYVRKDGEWVLLSTFL

SEQ ID NO: 10141 - protein, 1177 aa, Artificial Sequence; identical to SEQ ID NO: 10131
  SARS-CoV-2/England/200990660/2020__EPI_ISL_414523 spike protein (1-1147)(P715C_P1069C) Foldon construct

SEQ ID NO: 10142 - protein, 1177 aa, Artificial Sequence
  SARS-CoV-2/Australia/NSW09/2020__EPI_ISL_413595 spike protein (1-1147)(P715C_P1069C) Foldon construct
MFVFLVLLPLVSSQCVNLTTRTQLPPAYTNSFTRGVYYPDKVFRSSVLHSTQDLFLPFFSNVTWFHAIHVSGTNGTKRFDNPVLPFNDGVYFASTEKSNIIRGWIFGTTLDSKTQSLLIVNNATNVVIKVCEFQFCNDPFLGVYYHKNNKSWMESEFRVYSSANNCTFEYVSQPFLMDLEGKQGNFKNLREFVFKNIDGYFKIYSKHTPINLVRDLPQGFSALEPLVDLPIGINITRFQTLLALHRSYLTPGDSSSGWTAGAAAYYVGYLQPRTFLLKYNENGTITDAVDCALDPLSETKCTLKSFTVEKGIYQTSNFRVQPTESIVRFPNITNLCPFGEVFNATRFASVYAWNRKRISNCVADYSVLYNSASFSTFKCYGVSPTKLNDLCFTNVYADSFVIRGDEVRQIAPGQTGKIADYNYKLPDDFTGCVIAWNSNNLDSKVGGNYNYLYRLFRKSNLKPFERDISTEIYQAGSTPCNGVEGFNCYFPLQSYGFQPTNGVGYQPYRVVVLSFELLHAPATVCGPKKSTNLVKNKCVNFNFNGLTGTGVLTESNKKFLPFQQFGRDIADTTDAVRDPQTLEILDITPCSFGGVSVITPGTNTSNQVAVLYQDVNCTEVPVAIHADQLTPTWRVYSTGSNVFQTRAGCLIGAEHVNNSYECDIPIGAGICASYQTQTNSPRRARSVASQSIIAYTMSLGAENSVAYSNNSIAICTNFTISVTTEILPVSMTKTSVDCTMYICGDSTECSNLLLQYGSFCTQLNRALTGIAVEQDKNTQEVFAQVKQIYKTPPIKDFGGFNFSQILPDPSKPSKRSFIEDLLFNKVTLADAGFIKQYGDCLGDIAARDLICAQKFNGLTVLPPLLTDEMIAQYTSALLAGTITSGWTFGAGAALQIPFAMQMAYRFNGIGVTQNVLYENQKLIANQFNSAIGKIQDSLSFTASALGKLQDVVNQNAQALNTLVKQLSSNFGAISSVLNDILSRLDKVEAEVQIDRLITGRLQSLQTYVTQQLIRAAEIRASANLAATKMSECVLGQSKRVDFCGKGYHLMSFPQSAPHGVVFLHVTYVCAQEKNFTTAPAICHDGKAHFPREGVFVSNGTHWFVTQRNFYEPQIITTDNTFVSGNCDVVIGIVNNTVYDPLQPELDSGGSGYIPEAPRDGQAYVRKDGEWVLLSTFL

SEQ ID NO: 10143 - protein, 1177 aa, Artificial Sequence; identical to SEQ ID NO: 10123
  SARS-CoV-2/Australia/NSW10/2020__EPI_ISL_413596 spike protein (1-1147)(P715C_P1069C) Foldon construct

SEQ ID NO: 10144 - protein, 1177 aa, Artificial Sequence
  SARS-CoV-2/Switzerland/1000477797/2020__EPI_ISL_413023 spike protein (1-1147)(P715C_P1069C) Foldon construct
MFVFLVLLPLVSSQCVNLTTRTQLPPAYTNSFTRGVYYPDKVFRSSVLHSTQDLFLPFFSNVTWFHAIHVSGTNGTKRFDNPVLPFNDGVYFASTEKSNIIRGWIFGTTLDSKTQSLLIVNNATNVVIKVCEFQFCNDPFLGVYYHKNNKSWMESEFRVYSSANNCTFEYVSQPFLMDLEGKQGNFKNLREFVFKNIDGYFNIYSKHTPINLVRDLPQGFSALEPLVDLPIGINITRFQTLLALHRSYLTPGDSSSGWTAGAAAYYVGYLQPRTFLLKYNENGTITDAVDCALDPLSETKCTLKSFTVEKGIYQTSNFRVQPTESIVRFPNITNLCPFGEVFNATRFASVYAWNRKRISNCVADYSVLYNSASFSTFKCYGVSPTKLNDLCFTNVYADSFVIRGDEVRQIAPGQTGKIADYNYKLPDDFTGCVIAWNSNNLDSKVGGNYNYLYRLFRKSNLKPFERDISTEIYQAGSTPCNGVEGFNCYFPLQSYGFQPTNGVGYQPYRVVVLSFELLHAPATVCGPKKSTNLVKNKCVNFNFNGLTGTGVLTESNKKFLPFQQFGRDIADTTDAVRDPQTLEILDITPCSFGGVSVITPGTNTSNQVAVLYQGVNCTEVPVAIHADQLTPTWRVYSTGSNVFQTRAGCLIGAEHVNNSYECDIPIGAGICASYQTQTNSPRRARSVASQSIIAYTMSLGAENSVAYSNNSIAICTNFTISVTTEILPVSMTKTSVDCTMYICGDSTECSNLLLQYGSFCTQLNRALTGIAVEQDKNTQEVFAQVKQIYKTPPIKDFGGFNFSQILPDPSKPSKRSFIEDLLFNKVTLADAGFIKQYGDCLGDIAARDLICAQKFNGLTVLPPLLTDEMIAQYTSALLAGTITSGWTFGAGAALQIPFAMQMAYRFNGIGVTQNVLYENQKLIANQFNSAIGKIQDSLSSTASALGKLQDVVNQNAQALNTLVKQLSSNFGAISSVLNDILSRLDKVEAEVQIDRLITGRLQSLQTYVTQQLIRAAEIRASANLAATKMSECVLGQSKRVDFCGKGYHLMSFPQSAPHGVVFLHVTYVCAQEKNFTTAPAICHDGKAHFPREGVFVSNGTHWFVTQRNFYEPQIITTDNTFVSGNCDVVIGIVNNTVYDPLQPELDSGGSGYIPEAPRDGQAYVRKDGEWVLLSTFL

SEQ ID NO: 10145 - protein, 1177 aa, Artificial Sequence
  SARS-CoV-2/Belgium/BA-02291/2020__EPI_ISL_415159 spike protein (1-1147)(P715C_P1069C) Foldon construct
MFVFLVLLPLVSSQCVNLTTRTQLPPAYTNSFTRGVYYPDKVFRSSVLHSTQDLFLPFFSNVTWFHAIHVSGTNGTKRFDNPVLPFNDGVYFASTEKSNIIRGWIFGTTLDSKTQSLLIVNNATNVVIKVCEFQFCNDPFLGVYYHKNNKSWMESEFRVYSSANNCTFEYVSQPFLMDLEGKQGNFKNLREFVFKNIDGYFKIYSKHTPINLVRDLPQGFSALEPLVDLPIGINITRFQTLLALHRSYLTPGDSSSGWTAGAAAYYVGYLQPRTFLLKYNENGTITDAVDCALDPLSETKCTLKSFTVEKGIYQTSNFRVQPTESIVRFPNITNLCPFGEVFNATRFASVYAWNRKRISNCVADYSVLYNSASFSTFKCYGVSPTKLNDLCFTNVYADSFVIRGDEVRQIAPGQTGKIADYNYKLPDDFTGCVIAWNSNNLDSKVGGNYNYLYRLFRRSNLKPFERDISTEIYQAGSTPCNGVEGFNCYFPLQSYGFQPTNGVGYQPYRVVVLSFELLPAPATVCGPKKSTNLVKNKCVNFNFNGLTGTGVLTESNKKFLPFQQFGRDIADTTDAVRDPQTLEILDITPCSFGGVSVITPGTNTSNQVAVLYQGVNCTEVPVAIHADQLTPTWRVYSTGSNVFQTRAGCLIGAEHVNNSYECDIPIGAGICASYQTQTNSPRRARSVASQSIIAYTMSLGAENSVAYSNNSIAICTNFTISVTTEILPVSMTKTSVDCTMYICGDSTECSNLLLQYGSFCTQLNRALTGIAVEQDKNTQEVFAQVKQIYKTPPIKDFGGFNFSQILPDPSKPSKRSFIEDLLFNKVTLADAGFIKQYGDCLGDIAARDLICAQKFNGLTVLPPLLTDEMIAQYTSALLAGTITSGWTFGAGAALQIPFAMQMAYRFNGIGVTQNVLYENQKLIANQFNSAIGKIQDSLSSAAPALGKLQDVVNQNAQALNTLVKQLSSNFGAISSVLNDILSRLDKVEAEVQIDRLITGRLQSLQTYVTQQLIRAAEIRASANLAATKMSECVLGQSKRVDFCGKGYHLMSFPQSAPHGVVFLHVTYVCAQEKNFTTAPAICHDGKAHFPREGVFVSNGTHWFVTQRNFYEPQIITTDNTFVSGNCDVVIGIVNNTVYDPLQPELDSGGSGYIPEAPRDGQAYVRKDGEWVLLSTFL

SEQ ID NO: 10146 - protein, 1177 aa, Artificial Sequence
  SARS-CoV-2/USA/WA8-UW5/2020__EPI_ISL_413486 spike protein (1-1147)(P715C_P1069C) Foldon construct
MFVFLVLLPLVSSQCVNLTTRTQLPPAYTNSFTRGVYYPDKVFRSSVLHSTQDLFLPFFSNVTWFHAIHVSGTNGTKRFDNPVLPFNDGVYFASTEKSNIIRGWIFGTTLDSKTQSLLIVNNATNVVIKVCEFQFCNDPFLGVYYHKNNKSWMESEFRVYSSANNCTFEYVSQPFLMDLEGKQGNFKNLREFVFKNIDGYFKIYSKHTPINLVRDLPQGFSALEPLVDLPIGINITRFQTLLALHRSYLTPGDSSSGWTAGAAAYYVGYLQPRTFLLKYNENGTITDAVDCALDPLSETKCTLKSFTVEKGIYQTSNFRVQPTESIVRFPNITNLCPFGEVFNATRFASVYAWNRKRISNCVADYSVLYNSASFSTFKCYGVSPTKLNDLCFTNVYADSFVIRGDEVRQIAPGQTGKIADYNYKLPDDFTGCVIAWNSNNLDSKVGGNYNYLYRLFRKSNLKPFERDISTEIYQAGSTPCNGVEGFNCYFPLQSYGFQPTNGVGYQPYRVVVLSFELLHAPATVCGPKKSTNLVKNKCVNFNFNGLTGTGVLTESNKKFLPFQQFGRDIADTTDAVRDPQTLEILDITPCSFGGVSVITPGTNTSNQVAVLYQDVNCTEVPVAIHADQLTPTWRVYSTGSNVFQTRAGCLIGAEYVNNSYECDIPIGAGICASYQTQTNSPRRARSVASQSIIAYTMSLGAENSVAYSNNSIAICTNFTISVTTEILPVSMTKTSVDCTMYICGDSTECSNLLLQYGSFCTQLNRALTGIAVEQDKNTQEVFAQVKQIYKTPPIKDFGGFNFSQILPDPSKPSKRSFIEDLLFNKVTLADAGFIKQYGDCLGDIAARDLICAQKFNGLTVLPPLLTDEMIAQYTSALLAGTITSGWTFGAGAALQIPFAMQMAYRFNGIGVTQNVLYENQKLIANQFNSAIGKIQDSLSSTASALGKLQDVVNQNAQALNTLVKQLSSNFGAISSVLNDILSRLDKVEAEVQIDRLITGRLQSLQTYVTQQLIRAAEIRASANLAATKMSECVLGQSKRVDFCGKGYHLMSFPQSAPHGVVFLHVTYVCAQEKNFTTAPAICHDGKAHFPREGVFVSNGTHWFVTQRNFYEPQIITTDNTFVSGNCDVVIGIVNNTVYDPLQPELDSGGSGYIPEAPRDGQAYVRKDGEWVLLSTFL

SEQ ID NO: 10147 - protein, 1177 aa, Artificial Sequence
  SARS-CoV-2/England/20102000506/2020__EPI_ISL_415147 spike protein (1-1147)(P715C_P1069C) Foldon construct
MFVFLVLLPLVSSQCVNLTTRTQLPPAYTNSFTRGVYYPDKVFRSSVLHSTQDLFLPFFSNVTWFHAIHVSGTNGTKRFDNPVLPFNDGVYFASTEKSNIIRGWIFGTTLDSKTQSLLIVNNATNVVIKVCEFQFCNDPFLGVYYHKNNKSWMESEFRVYSSANNCTFEYVSQPFLMDLEGKQGNFKNLREFVFKNIDGYFKIYSKHTPINLVRDLPQGFSALEPLVDLPIGINITRFQTLLALHRSYLTPGDSSSGWTAGAAAYYVGYLQPRTFLLKYNENGTITDAVDCALDPLSETKCTLKSFTVEKGIYQTSNFRVQPTESIVRFPNITNLCPFGEVFNATRFASVYAWNRKRISNCVADYSVLYNSASFSTFKCYGVSPTKLNDLCFTNVYADSFVIRGDEVRQIAPGQTGKIADYNYKLPDDFTGCVIAWNSNNLDSKVGGNYNYLYRLFRKSNLKPFERDISTEIYQAGSTPCNGVEGFNCYFPLQSYGFQPTNGVGYQPYRVVVLSFELLHAPATVCGPKKSTNLVKNKCVNFNFNGLTGTGVLTESNKKFLPFQQFGRDIADTTDAVRDPQTLEILDITPCSFGGVSVITPGTNTSNQVAVLYQGVNCTEVPVAIHADQLTPTWRVYSTGSNVFQTRAGCLIGAEHVNNSYECDIPIGAGICASYQTQTNSPRRARSVASQSIIAYTMSLGAENSVAYSNNSIAICTNFTISVTTEILPVSMTKTSVDCTMYICGDSTECSNLLLQYGSFCTQLNRALTGIAVEQDKNTQEVFAQVKQIYKTPPIKDFGGFNFSQILPDPSKPSKRSFIEDLLFNKVTLADAGFIKQYGYCLGDIAARDLICAQKFNGLTVLPPLLTDEMIAQYTSALLAGTITSGWTFGAGAALQIPFAMQMAYRFNGIGVTQNVLYENQKLIANQFNSAIGKIQDSLSSTASALGKLQDVVNQNAQALNTLVKQLSSNFGAISSVLNDILSRLDKVEAEVQIDRLITGRLQSLQTYVTQQLIRAAEIRASANLAATKMSECVLGQSKRVDFCGKGYHLMSFPQSAPHGVVFLHVTYVCAQEKNFTTAPAICHDGKAHFPREGVFVSNGTHWFVTQRNFYEPQIITTDNTFVSGNCDVVIGIVNNTVYDPLQPELDSGGSGYIPEAPRDGQAYVRKDGEWVLLSTFL

SEQ ID NO: 10148 - protein, 1177 aa, Artificial Sequence
  SARS-CoV-2/Belgium/VAG-03013/2020__EPI_ISL_415155 spike protein (1-1147)(P715C_P1069C) Foldon construct
MFVFLVLLPLVSSQCVNLTTRTQLPPAYTNSFTRGVYYPDKVFRSSVLHSTQDLFLPFFSNVTWFHAIHVSGTNGTKRFDNPVLPFNDGVYFASTEKSNIIRGWIFGTTLDSKTQSLLIVNNATNVVIKVCEFQFCNDPFLGVYYHKNNKSWMESEFRVYSSANNCTFEYVSQPFLMDLEGKQGNFKNLREFVFKNIDGYFKIYSKHTPINLVRDLPQGFSALEPLVDLPIGINITRFQTLLALHRSYLTPGDSSSGWTAGAAAYYVGYLQPRTFLLKYNENGTITDAVDCALDPLSETKCTLKSFTVEKGIYQTSNFRVQPTESIVRFPNITNLCPFGEVFNATRFASVYAWNRKRISNCVADYSVLYNSASFSTFKCYGVSPTKLNDLCFTNVYADSFVIRGDEVRQIAPGQTGKIADYNYKLPDDFTGCVIAWNSNNLDSKVGGNYNYLYRLFRKSNLKPFERDISTEIYQAGSTPCNGVEGFNCYFPLQSYGFQPTNGVGYQPYRVVVLSFELLHAPATVCGPKKSTNLVKNKCVNFNFNGLTGTGVLTESNKKFLPFQQFGRDIADTTDAVRDPQTLEILDITPCSFGGVSVITPGTNTSNQVAVLYQGVNCTEVPVAIHADQLTPTWRVYSTGSNVFQTRAGCLIGAEHVNNSYECDIPIGAGICASYQTQTNSPRRARSVASQSIIAYTMSLGAENSVAYSNNSIAICTNFTISVTTEILPVSMTKTSVDCTMYICGDSTECSNLLLQYGSFCTQLNRALTGIAVEQDKNTQEVFAQVKQIYKTPPIKDFGGFNFSQILPDPSKPSKRSFIEDLLFNKVTLADAGFIKQYGDCLGDIAARDLICAQKFNGLTVLPPLLTDEMIAQYTSALLAGTITSGWTFGAGAALQIPFAMQMAYRFNGIGVTQNVLYENQKLIANQFNSAIGKIQDSLSSTATALGKLQDVVNQNAQALNTLVKQLSSNFGAISSVLNDILSRLDKVEAEVQIDRLITGRLQSLQTYVTQQLIRAAEIRASANLAATKMSECVLGQSKRVDFCGKGYHLMSFPQSAPHGVVFLHVTYVCAQEKNFTTAPAICHDGKAHFPREGVFVSNGTHWFVTQRNFYEPQIITTDNTFVSGNCDVVIGIVNNTVYDPLQPELDSGGSGYIPEAPRDGQAYVRKDGEWVLLSTFL

SEQ ID NO: 10149 - protein, 1177 aa, Artificial Sequence
  SARS-CoV-2/Belgium/BC-03016/2020__EPI_ISL_415157 spike protein (1-1147)(P715C_P1069C) Foldon construct
MFVFLVLLPLVSSQCVNLTTRTQLPPAYTNSFTRGVYYPDKVFRSSVLHSTQDLFLPFFSNVTWFHAIHVSGTNGTKRFDNPVLPFNDGVYFASTEKSNIIRGWIFGTTLDSKTQSLLIVNNATNVVIKVCEFQFCNDPFLGVYYHKNNKSWMESEFRVYSSANNCTFEYVSQPFLMDLEGKQGNFKNLREFVFKNIDGYFKIYSKHTPINLVRDLPQGFSALEPLVDLPIGINITRFQTLLALHRSYLTPGDSSSGWTAGAAAYYVGYLQPRTFLLKYNENGTITDAVDCALDPLSETKCTLKSFTVEKGIYQTSNFRVQPTESIVRFPNITNLCPFGEVFNATRFASVYAWNRKRISNCVADYSVLYNSASFSTFKCYGVSPTKLNDLCFTNVYADSFVIRGDEVRQIAPGQTGKIADYNYKLPDDFTGCVIAWNSNNLDSKVGGNYNYLYRLFRKSNLKPFERDISTEIYQAGSTPCNGVEGFNCYFPLQSYGFQPTNGVGYQPYRVVVLSFELLHAPATVCGPKKSTNLVKNKCVNFNFNGLTGTGVLTESNKKFLPFQQFGRDIADTTDAVRDPQTLEILDITPCSFGGVSVITPGTNTSNQVAVLYQGVNCTEVPVAIHADQLTPTWRVYSTGSNVFQTRAGCLIGAEHVNNSYECDIPIGAGICASYQTQTNSPRRARSVASQSIIAYTMSLGAENSVAYSNNSIAICTNFTISVTTEILPVSMTKTSVDCTMYICGDSTECSNLLLQYGSFCTQLNRALTGIAVEQDKNTQEVFAQVKQIYKTPPIKDFGGFNFSQILPDPSKPSKRSFIEDLLFNKVTLADAGFIKQYGDCLGDIAARDLICAQKFNGLTVLPPLLTDEMIAQYTSALLAGTITSGWTFGAGAALQIPFAMQMAYRFNGIGVTQNVLYENQKLIANQFNSAIGKIQDSLSSTAPALGKLQDVVNQNAQALNTLVKQLSSNFGAISSVLNDILSRLDKVEAEVQIDRLITGRLQSLQTYVTQQLIRAAEIRASANLAATKMSECVLGQSKRVDFCGKGYHLMSFPQSAPHGVVFLHVTYVCAQEKNFTTAPAICHDGKAHFPREGVFVSNGTHWFVTQRNFYEPQIITTDNTFVSGNCDVVIGIVNNTVYDPLQPELDSGGSGYIPEAPRDGQAYVRKDGEWVLLSTFL

SEQ ID NO: 10150 - protein, 1177 aa, Artificial Sequence
  SARS-CoV-2/Germany/BavPat3/2020__EPI_ISL_414521 spike protein (1-1147)(P715C_P1069C) Foldon construct
MFVFLVLLPLVSSQCVNLTTRTQLPPAYTNSFTRGVYYPDKVFRSSVLHSTQDLFLPFFSNVTWFHAIHVSGTNGTKRFDNPVLPFNDGVYFASTEKSNIIRGWIFGTTLDSKTQSLLIVNNATNVVIKVCEFQFCNDPFLGVYYHKNNKSWMESEFRVYSSANNCTFEYVSQPFLMDLEGKQGNFKNLREFVFKNIDGYFKIYSKHTPINLVRDLPQGFSALEPLVDLPIGINITRFQTLLALHRSYLTPGDSSSGWTAGAAAYYVGYLQPRTFLLKYNENGTITDAVDCALDPLSETKCTLKSFTVEKGIYQTSNFRVQPTESIVRFPNITNLCPFGEVFNATRFASVYAWNRKRISNCVADYSVLYNSASFSTFKCYGVSPTKLNDLCFTNVYADSFVIRGDEVRQIAPGQTGKIADYNYKLPDDFTGCVIAWNSNNLDSKVGGNYNYLYRLFRKSNLKPFERDISTEIYQAGSTPCNGVEGFNCYFPLQSYGFQPTNGVGYQPYRVVVLSFELLHAPATVCGPKKSTNLVKNKCVNFNFNGLTGTGVLTESNKKFLPFQQFGRDIADTTDAVRDPQTLEILDITPCSFGGVSVITPGTNTSNQVAVLYQDVNCTEVPVAIHADQLTPTWRVYSTGSNVFQTRAGCLIGAEHVNNSYECDIPIGAGICASYQTQTNSPRRARSVASQSIIAYTMSLGAENSVAYSNNSIAICTNFTISVTTEILPVSMTKTSVDCTMYICGDSTECSNLLLQYGSFCTQLNRALTGIAVEQDKNTQQVFAQVKQIYKTPPIKDFGGFNFSQILPDPSKPSKRSFIEDLLFNKVTLADAGFIKQYGDCLGDIAARDLICAQKFNGLTVLPPLLTDEMIAQYTSALLAGTITSGWTFGAGAALQIPFAMQMAYRFNGIGVTQNVLYENQKLIANQFNSAIGKIQDSLSSTASALGKLQDVVNQNAQALNTLVKQLSSNFGAISSVLNDILSRLDKVEAEVQIDRLITGRLQSLQTYVTQQLIRAAEIRASANLAATKMSECVLGQSKRVDFCGKGYHLMSFPQSAPHGVVFLHVTYVCAQEKNFTTAPAICHDGKAHFPREGVFVSNGTHWFVTQRNFYEPQIITTDNTFVSGNCDVVIGIVNNTVYDPLQPELDSGGSGYIPEAPRDGQAYVRKDGEWVLLSTFL

SEQ ID NO: 10151 - protein, 1177 aa, Artificial Sequence
  SARS-CoV-2/France/HF1805/2020__EPI_ISL_414628 spike protein (1-1147)(P715C_P1069C) Foldon construct
MFVFLVLLPLVSSQCVNLTTRTQLPPAYTNSFTRGVYYPDKVFRSSVLHSTQDLFLPFFSNVTWFHAIHVSGTNGTKRFDNPVLPFNDGVYFASTEKSNIIRGWIFGTTLDSKTQSLLIVNNATNVVIKVCEFQFCNDPFLGVYYHKNNKSWMESEFRVYSSANNCTFEYVSQPFLMDLEGKQGNFKNLREFVFKNIDGYFKIYSKHTPINLVRDLPQGFSALEPLVDLPIGINITRFQTLLALHRSYLTPGDSSSGWTAGAAAYYVGYLQPRTFLLKYNENGTITDAVDCALDPLSETKCTLKSFTVEKGIYQTSNFRVQPTESIVRFPNITNLCPFGEVFNATRFASVYAWNRKRISNCVADYSVLYNSASFSTFKCYGVSPTKLNDLCFTNVYADSFVIRGDEVRQIAPGQTGKIADYNYKLPDDFTGCVIAWNSNNLDSKVGGNYNYLYRLFRKSNLKPFERDISTEIYQAGSTPCNGVEGFNCYFPLQSYGFQPTNGVGYQPYRVVVLSFELLHAPATVCGPKKSTNLVKNKCVNFNFNGLTGTGVLTESNKKFLPFQQFGRDIADTTDAVRDPQTLEILDITPCSFGGVSVITPGTNTSNQVAVLYQGVNCTEVPVAIHADQLTPTWRVYSTGSNVFQTRAGCLIGAEHVNNSYECDIPIGAGICASYQTQTNSPRRARSVASQSIIAYTMSLGAENSVAYSNNSIAICTNFTISVTTEILPVSMTKTSVDCTMYICGDSTECSNLLLQYGSFCTQLNRALTGIAVEQDKNTQEVFAQVKQIYKTPPIKDFGGFNFSQILPDPSKPSKRSFIEDLLFNKVTLADAGFIKQYGDCLGDIAARDLICAQKFNGLTVLPPLLTDEMIAQYTSALLAGTITSGWTFGAGAALQIPFAMQMAYRFNGIGVTQNVLYENQKLIANQFNSAIGKIQDSLSSTASALGKLQDVVNQNAQALNTLVKQLSSNFGAISSVLNDILSRLDKVEAEVQIDRLITGRLQSLQTYVTQQLIRAAEIRASANLAATKMSECVLGQSKRVDFCGKGYHLMSFPQSAPHGVVFLHVTYVCAQEKNFTTAPAICHDGKAHFPREGVFVSNGTHWFVTQRNFYEPQIITTDNTFVSGNCDVVIGVVNNTVYDPLQPELDSGGSGYIPEAPRDGQAYVRKDGEWVLLSTFL

SEQ ID NO: 10152 - protein, 1177 aa, Artificial Sequence
  SARS-CoV-2/Netherlands/ZuidHolland_9/2020__EPI_ISL_414445 spike protein (1-1147)(P715C_P1069C) Foldon construct
MFVFLVLLPLVSSQCVNLTTRTQLPPAYTNSFTRGVYYPDKVFRSSVLHSTQDLFLPFFSNVTWFHAIHVSGTNGTKRFDNPVLPFNDGVYFASTEKSNIIRGWIFGTTLDSKTQSLLIVNNATNVVIKVCEFQFCNDPFLGVYYHKNNKSWMESEFRVYSSANNCTFEYVSQPFLMDLEGKQGNFKNLREFVFKNIDGYFKIYSKHTPINLVRDLPQGFSALEPLVDLPIGINITRFQTLLALHRSYLTPGDSSSGWTAGAAAYYVGYLQPRTFLLKYNENGTITDAVDCALDPLSETKCTLKSFTVEKGIYQTSNFRVQPTESIVRFPNITNLCPFGEVFNATRFASVYAWNRKRISNCVADYSVLYNSASFSTFKCYGVSPTKLNDLCFTNVYADSFVIRGDEVRQIAPGQTGKIADYNYKLPDDFTGCVIAWNSNNLDSKVGGNYNYLYRLFRKSNLKPFERDISTEIYQAGSTPCNGVEGFNCYFPLQSYGFQPTNGVGYQPYRVVVLSFELLHAPATVCGPKKSTNLVKNKCVNFNFNGLTGTGVLTESNKKFLPFQQFGRDIADTTDAVRDPQTLEILDITPCSFGGVSVITPGTNTSNQVAVLYQGVNCTEVPVAIHADQLTPTWRVYSTGSNVFQTRAGCLIGAEHVNNSYECDIPIGAGICASYQTQTNSPRRARSVASQSIIAYTMSLGAENSVAYSNNSIAICTNFTISVTTEILPVSMTKTSVDCTMYICGDSTECSNLLLQYGSFCTQLNRALTGIAVEQDKNTQEVFAQVKQIYKTPPIKDFGGFNFSQILPDPSKPSKRSFIEDLLFNKVTLADAGFIKQYGDCLGDIAARDLICVQKFNGLTVLPPLLTDEMIAQYTSALLAGTITSGWTFGAGAALQIPFAMQMAYRFNGIGVTQNVLYENQKLIANQFNSAIGKIQDSLSSTASALGKLQDVVNQNAQALNTLVKQLSSNFGAISSVLNDILSRLDKVEAEVQIDRLITGRLQSLQTYVTQQLIRAAEIRASANLAATKMSECVLGQSKRVDFCGKGYHLMSFPQSAPHGVVFLHVTYVCAQEKNFTTAPAICHDGKAHFPREGVFVSNGTHWFVTQRNFYEPQIITTDNTFVSGNCDVVIGIVNNTVYDPLQPELDSGGSGYIPEAPRDGQAYVRKDGEWVLLSTFL

SEQ ID NO: 10153 - protein, 1177 aa, Artificial Sequence
  SARS-CoV-2/Finland/FIN03032020A/2020__EPI_ISL_413602 spike protein (1-1147)(P715C_P1069C) Foldon construct
MFVFLVLLPLVSSQCVNLTTRTQLPPAYTNSFTRGVYYPDKVFRSSVLHSTQDLFLPFFSNVTWFHAIHVSGTNGTKRFDNPVLPFNDGVYFASTEKSNIIRGWIFGTTLDSKTQSLLIVNNATNVVIKVCEFQFCNDPFLGVYYHKNNKSWMESEFRVYSSANNCTFEYVSQPFLMDLEGKQGNFKNLREFVFKNIDGYFKIYSKHTPINLVRDLPQGFSALEPLVDLPIGINITRFQTLLALHRSYLTPGDSSSGWTAGAAAYYVGYLQPRTFLLKYNENGTITDAVDCALDPLSETKCTLKSFTVEKGIYQTSNFRVQPTESIVRFPNITNLCPFGEVFNATRFASVYAWNRKRISNCVADYSVLYNSASFSTFKCYGVSPTKLNDLCFTNVYADSFVIRGDEVRQIAPGQTGKIADYNYKLPDDFTGCVISWNSNNLDSKVGGNYNYLYRLFRKSNLKPFERDISTEIYQAGSTPCNGVEGFNCYFPLQSYGFQPTNGVGYQPYRVVVLSFELLHAPATVCGPKKSTNLVKNKCVNFNFNGLTGTGVLTESNKKFLPFQQFGRDIADTTDAVRDPQTLEILDITPCSFGGVSVITPGTNTSNQVAVLYQGVNCTEVPVAIHADQLTPTWRVYSTGSNVFQTRAGCLIGAEHVNNSYECDIPIGAGICASYQTQTNSPRRARSVASQSIIAYTMSLGAENSVAYSNNSIAICTNFTISVTTEILPVSMTKTSVDCTMYICGDSTECSNLLLQYGSFCTQLNRALTGIAVEQDKNTQEVFAQVKQIYKTPPIKDFGGFNFSQILPDPSKPSKRSFIEDLLFNKVTLADAGFIKQYGDCLGDIAARDLICAQKFNGLTVLPPLLTDEMIAQYTSALLAGTITSGWTFGAGAALQIPFAMQMAYRFNGIGVTQNVLYENQKLIANQFNSAIGKIQDSLSSTASALGKLQDVVNQNAQALNTLVKQLSSNFGAISSVLNDILSRLDKVEAEVQIDRLITGRLQSLQTYVTQQLIRAAEIRASANLAATKMSECVLGQSKRVDFCGKGYHLMSFPQSAPHGVVFLHVTYVCAQEKNFTTAPAICHDGKAHFPREGVFVSNGTHWFVTQRNFYEPQIITTDNTFVSGNCDVVIGIVNNTVYDPLQPELDSGGSGYIPEAPRDGQAYVRKDGEWVLLSTFL

SEQ ID NO: 10154 - protein, 1177 aa, Artificial Sequence
  SARS-CoV-2/France/GE1977/2020__EPI_ISL_414632 spike protein (1-1147)(P715C_P1069C) Foldon construct
MFVFLVLLPLVSSQCVNLTTRTQLPPAYTNSFTRGVYYPDKVFRSSVLHSTQDLFLPFFSNVTWFHAIHVSGTNGTKRFDNPVLPFNDGVYFASTEKSNIIRGWIFGTTLDSKTQSLLIVNNATNVVIKVCEFQFCNDPFLGVYYHKNNKSWMESEFRVYSSANNCTFEYVSQPFLMDLEGKQGNFKNLREFVFKNIDGYFKIYSKHTPINLVRDLPQGFSALEPLVDLPIGINITRFQTLLALHRSYLTPGDSSSGWTAGAAAYYVGYLQPRTFLLKYNENGTITDAVDCALDPLSETKCTLKSFTVEKGIYQTSNFRVQPTESIVRFPNITNLCPFGEVFNATRFASVYAWNRKRISNCVADYSVLYNSASFSTFKCYGVSPTKLNDLCFTNVYADSFVIRGDEVRQIAPGQTGKIADYNYKLPDDFTGCVIAWNSNNLDSKVGGNYNYLYRLFRKSNLKPFERDISTEIYQAGSTPCNGVEGFNCYFPLQSYGFQPTNGVGYQPYRVVVLSFELLHAPATVCGPKKSTNLVKNKCVNFNFNGLTGTGVLTESNKKFLPFQQFGRDIADTTDAVRDPQTLEILDITPCSFGGVSVITPGTNTSNQVAVLYQGVNCTEVPVAIHADQLTPTWRVYSTGSNVFQTRAGCLIGAEHVNNSYECDIPIGAGICASYQTQTNSPRRARSVASQSIIAYTMSLGAENSVAYSNNSIAICTNFTISVTTEILPVSMTKTSVDCTMYICGDSTECSNLLLQYGSFCTQLNRALTGIAVEQDKNTQEVFAQVKQIYKTPPIKDFGGFNFSQILPDPSKPSKRSFIEDLLFNKVTLADAGFIKQYGDCLGDIAARDLICAQKFNGLTVLPPLLTDEMIAQYTSALLAGTITSGWTFGAGAALQIPFAMQMAYRFNGIGVTQNVLYENQKLIANQFNSAIGKIQDSLFSTASALGKLQDVVNQNAQALNTLVKQLSSNFGAISSVLNDILSRLDKVEAEVQIDRLITGRLQSLQTYVTQQLIRAAEIRASANLAATKMSECVLGQSKRVDFCGKGYHLMSFPQSAPHGVVFLHVTYVCAQEKNFTTAPAICHDGKAHFPREGVFVSNGTHWFVTQRNFYEPQIITTDNTFVSGNCDVVIGIVNNTVYDPLQPELDSGGSGYIPEAPRDGQAYVRKDGEWVLLSTFL

SEQ ID NO: 10155 - protein, 1177 aa, Artificial Sequence
  SARS-CoV-2/Finland/FIN-313/2020__EPI_ISL_414641 spike protein (1-1147)(P715C_P1069C) Foldon construct
MFVFLVLLPLVSSQCVNLTTRTQLPPAYTNSFTRGVYYPDKVFRSSVLHSTQDLFLPFFSNVTWFHAIHVSGTNGTKRFDNPVLPFNDGVYFASTEKSNIIRGWIFGTTLDSKTQSLLIVNNATNVVIKVCEFQFCNDPFLGVYYHKNNKSWMESEFRVYSSANNCTFEYVSQPFLMDLEGKQGNFKNLREFVFKNIDGYFKIYSKHTPINLVRDLPQGFSALEPLVDLPIGINITRFKTLLALHRSYLTPGDSSSGWTAGAAAYYVGYLQPRTFLLKYNENGTITDAVDCALDPLSETKCTLKSFTVEKGIYQTSNFRVQPTESIVRFPNITNLCPFGEVFNATRFASVYAWNRKRISNCVADYSVLYNSASFSTFKCYGVSPTKLNDLCFTNVYADSFVIRGDEVRQIAPGQTGKIADYNYKLPDDFTGCVIAWNSNNLDSKVGGNYNYLYRLFRKSNLKPFERDISTEIYQAGSTPCNGVEGFNCYFPLQSYGFQPTNGVGYQPYRVVVLSFELLHAPATVCGPKKSTNLVKNKCVNFNFNGLTGTGVLTESNKKFLPFQQFGRDIADTTDAVRDPQTLEILDITPCSFGGVSVITPGTNTSNQVAVLYQGVNCTEVPVAIHADQLTPTWRVYSTGSNVFQTRAGCLIGAEHVNNSYECDIPIGAGICASYQTQTNSPRRARSVASQSIIAYTMSLGAENSVAYSNNSIAICTNFTISVTTEILPVSMTKTSVDCTMYICGDSTECSNLLLQYGSFCTQLNRALTGIAVEQDKNTQEVFAQVKQIYKTPPIKDFGGFNFSQILPDPSKPSKRSFIEDLLFNKVTLADAGFIKQYGDCLGDIAARDLICAQKFNGLTVLPPLLTDEMIAQYTSALLAGTITSGWTFGAGAALQIPFAMQMAYRFNGIGVTQNVLYENQKLIANQFNSAIGKIQDSLSSTASALGKLQDVVNQNAQALNTLVKQLSSNFGAISSVLNDILSRLDKVEAEVQIDRLITGRLQSLQTYVTQQLIRAAEIRASANLAATKMSECVLGQSKRVDFCGKGYHLMSFPQSAPHGVVFLHVTYVCAQEKNFTTAPAICHDGKAHFPREGVFVSNGTHWFVTQRNFYEPQIITTDNTFVSGNCDVVIGIVNNTVYDPLQPELDSGGSGYIPEAPRDGQAYVRKDGEWVLLSTFL

SEQ ID NO: 10156 - protein, 1177 aa, Artificial Sequence
  SARS-CoV-2/Netherlands/ZuidHolland_2/2020__EPI_ISL_414556 spike protein (1-1147)(P715C_P1069C) Foldon construct
MFVFLVLLPLVSSQCVNLTTRTQLPPAYTNSFTRGVYYPDKVFRSSVLHSTQDLFLPFFSNVTWFHAIHVSGTNGTKRFDNPVLPFNDGVYFASTEKSNIIRGWIFGTTLDSKTQSLLIVNNATNVVIKVCEFQFCNDPFLGVYYHKNNKSWMESEFRVYSSANNCTFEYVSQPFLMDLEGKQGNFKNLREFVFKNIDGYFKIYSKHTPINLVRDLPQGFSALEPLVDLPIGINITRFQTLLALHRSYLTPGDSSSGWTAGAAAYYVGYLQPRTFLLKYNENGTITDAVDCALDPLSETKCTLKSFTVEKGIYQTSNFRVQPTESIVRFPNITNLCPFGEVFNATRFASVYAWNRKRISNCVADYSVLYNSASFSTFKCYGVSPTKLNDLCFTNVYADSFVIRGDEVRQIAPGQTGKIADYNYKLPDDFTGCVIAWNSNNLDSKVGGNYNYLYRLFRKSNLKPFERDISTEIYQAGSTPCNGVEGFNCYFPLQSYGFQPTNGVGYQPYRVVVLSFELLHAPATVCGPKKSTNLVKNKCVNFNFNGLTGTGVLTESNKKFLPFQQFGRDIADTTDAVRDPQTLEILDITPCSFGGVSVITPGTNTSNQVAVLYQGVNCTEVPVAIHADQLTPTWRVYSTGSNVFQTRAGCLIGAEHVNNSYECDIPIGAGICASYQTQTNSPRRARSVASQSIIAYTMSLGAENSVAYSNNSIAICTNFTISVTTEILPVSMTKTSVDCTMYICGDSTECSNLLLQYGSFCTQLNRALTGIALEQDKNTQEVFAQVKQIYKTPPIKDFGGFNFSQILPDPSKPSKRSFIEDLLFNKVTLADAGFIKQYGDCLGDIAARDLICAQKFNGLTVLPPLLTDEMIAQYTSALLAGTITSGWTFGAGAALQIPFAMQMAYRFNGIGVTQNVLYENQKLIANQFNSAIGKIQDSLSSTASALGKLQDVVNQNAQALNTLVKQLSSNFGAISSVLNDILSRLDKVEAEVQIDRLITGRLQSLQTYVTQQLIRAAEIRASANLAATKMSECVLGQSKRVDFCGKGYHLMSFPQSAPHGVVFLHVTYVCAQEKNFTTAPAICHDGKAHFPREGVFVSNGTHWFVTQRNFYEPQIITTDNTFVSGNCDVVIGIVNNTVYDPLQPELDSGGSGYIPEAPRDGQAYVRKDGEWVLLSTFL

SEQ ID NO: 10157 - protein, 1177 aa, Artificial Sequence
  SARS-CoV-2/USA/WA-UW31/2020__EPI_ISL_414618 spike protein (1-1147)(P715C_P1069C) Foldon construct
MFVFLVLLPLVSSQCVNLTTRTQLPPAYTNSFTRGVYYPDKVFRSSVLHSTQDLFLPFFSNVTWFHAIHVSGTNGTKRFDNPVLPFNDGVYFASTEKSNIIRGWIFGTTLDSKTQSLLIVNNATNVVIKVCEFQFCNDPFLGVYYHKNNKSWMESEFRVYSSANNCTFEYVSQPFLMDLEGKQGNFKNLREFVFKNIDGYFKIYSKHTPINLVRDLPQGFSALEPLVDLPIGINITRFQTLLALHRSYLTPGDSSSGWTAGAAAYYVGYLQPRTFLLKYNENGTITDAVDCALDPLSETKCTLKSFTVEKGIYQTSNFRVQPTESIVRFPNITNLCPFGEVFNATRFASVYAWNRKRISNCVADYSVLYNSASFSTFKCYGVSPTKLNDLCFTNVYADSFVIRGDEVRQIAPGQTGKIADYNYKLPDDFTGCVIAWNSNNLDSKVGGNYNYLYRLFRKSNLKPFERDISTEIYQAGSTPCNGAEGFNCYFPLQSYGFQPTNGVGYQPYRVVVLSFELLHAPATVCGPKKSTNLVKNKCVNFNFNGLTGTGVLTESNKKFLPFQQFGRDIADTTDAVRDPQTLEILDITPCSFGGVSVITPGTNTSNQVAVLYQDVNCTEVPVAIHADQLTPTWRVYSTGSNVFQTRAGCLIGAEHVNNSYECDIPIGAGICASYQTQTNSPRRARSVASQSIIAYTMSLGAENSVAYSNNSIAICTNFTISVTTEILPVSMTKTSVDCTMYICGDSTECSNLLLQYGSFCTQLNRALTGIAVEQDKNTQEVFAQVKQIYKTPPIKDFGGFNFSQILPDPSKPSKRSFIEDLLFNKVTLADAGFIKQYGDCLGDIAARDLICAQKFNGLTVLPPLLTDEMIAQYTSALLAGTITSGWTFGAGAALQIPFAMQMAYRFNGIGVTQNVLYENQKLIANQFNSAIGKIQDSLSSTASALGKLQDVVNQNAQALNTLVKQLSSNFGAISSVLNDILSRLDKVEAEVQIDRLITGRLQSLQTYVTQQLIRAAEIRASANLAATKMSECVLGQSKRVDFCGKGYHLMSFPQSAPHGVVFLHVTYVCAQEKNFTTAPAICHDGKAHFPREGVFVSNGTHWFVTQRNFYEPQIITTDNTFVSGNCDVVIGIVNNTVYDPLQPELDSGGSGYIPEAPRDGQAYVRKDGEWVLLSTFL

SEQ ID NO: 10158 - protein, 1177 aa, Artificial Sequence
  SARS-CoV-2/South Korea/SNU01/2020__EPI_ISL_411929 spike protein (1-1147)(P715C_P1069C) Foldon construct
MFVFLVLLPLVSSQCVNLTTRTQLPPAYTNSFTRGVYYPDKVFRSSVLHSTQDLFLPFFSNVTWFHAIHVSGTNGTKRFDNPVLPFNDGVYFASTEKSNIIRGWIFGTTLDSKTQSLLIVNNATNVVIKVCEFQFCNDPFLGVYYHKNNKSWMESEFRVYSSANNCTFEYVSQPFLMDLEGKQGNFKNLREFVFKNIDGYFKIYSKHTPINLVRDLPQGFWALEPLVDLPIGINITRFQTLLALHRSYLTPGDSSSGWTAGAAAYYVGYLQPRTFLLKYNENGTITDAVDCALDPLSETKCTLKSFTVEKGIYQTSNFRVQPTESIVRFPNITNLCPFGEVFNATRFASVYAWNRKRISNCVADYSVLYNSASFSTFKCYGVSPTKLNDLCFTNVYADSFVIRGDEVRQIAPGQTGKIADYNYKLPDDFTGCVIAWNSNNLDSKVGGNYNYLYRLFRKSNLKPFERDISTEIYQAGSTPCNGVEGFNCYFPLQSYGFQPTNGVGYQPYRVVVLSFELLHAPATVCGPKKSTNLVKNKCVNFNFNGLTGTGVLTESNKKFLPFQQFGRDIADTTDAVRDPQTLEILDITPCSFGGVSVITPGTNTSNQVAVLYQDVNCTEVPVAIHADQLTPTWRVYSTGSNVFQTRAGCLIGAEHVNNSYECDIPIGAGICASYQTQTNSPRRARSVASQSIIAYTMSLGAENSVAYSNNSIAICTNFTISVTTEILPVSMTKTSVDCTMYICGDSTECSNLLLQYGSFCTQLNRALTGIAVEQDKNTQEVFAQVKQIYKTPPIKDFGGFNFSQILPDPSKPSKRSFIEDLLFNKVTLADAGFIKQYGDCLGDIAARDLICAQKFNGLTVLPPLLTDEMIAQYTSALLAGTITSGWTFGAGAALQIPFAMQMAYRFNGIGVTQNVLYENQKLIANQFNSAIGKIQDSLSSTASALGKLQDVVNQNAQALNTLVKQLSSNFGAISSVLNDILSRLDKVEAEVQIDRLITGRLQSLQTYVTQQLIRAAEIRASANLAATKMSECVLGQSKRVDFCGKGYHLMSFPQSAPHGVVFLHVTYVCAQEKNFTTAPAICHDGKAHFPREGVFVSNGTHWFVTQRNFYEPQIITTDNTFVSGNCDVVIGIVNNTVYDPLQPELDSGGSGYIPEAPRDGQAYVRKDGEWVLLSTFL

SEQ ID NO: 10159 - protein, 1177 aa, Artificial Sequence
  SARS-CoV-2/China/WF0004/2020__EPI_ISL_413694 spike protein (1-1147)(P715C_P1069C) Foldon construct
MFVFLVLLPLVSSQCVNLTTRTQLPPAYTNSFTRGVYYPDKVFRSSVLHSTQDLFLPFFSNVTWFHAIHVSGTNGTKRFDNPVLPFNDGVYFASTEKSNIIRGWIFGTTLDSKTQSLLIVNNATNVVIKVCEFQFCNDPFLGVYYHKNNKSWTESEFRVYSSANNCTFEYVSQPFLMDLEGKQGNFKNLREFVFKNIDGYFKIYSKHTPINLVRDLPQGFSALEPLVDLPIGINITRFQTLLALHRSYLTPGDSSSGWTAGAAAYYVGYLQPRTFLLKYNENGTITDAVDCALDPLSETKCTLKSFTVEKGIYQTSNFRVQPTESIVRFPNITNLCPFGEVFNATRFASVYAWNRKRISNCVADYSVLYNSASFSTFKCYGVSPTKLNDLCFTNVYADSFVIRGDEVRQIAPGQTGKIADYNYKLPDDFTGCVIAWNSNNLDSKVGGNYNYLYRLFRKSNLKPFERDISTEIYQAGSTPCNGVEGFNCYFPLQSYGFQPTNGVGYQPYRVVVLSFELLHAPATVCGPKKSTNLVKNKCVNFNFNGLTGTGVLTESNKKFLPFQQFGRDIADTTDAVRDPQTLEILDITPCSFGGVSVITPGTNTSNQVAVLYQDVNCTEVPVAIHADQLTPTWRVYSTGSNVFQTRAGCLIGAEHVNNSYECDIPIGAGICASYQTQTNSPRRARSVASQSIIAYTMSLGAENSVAYSNNSIAICTNFTISVTTEILPVSMTKTSVDCTMYICGDSTECSNLLLQYGSFCTQLNRALTGIAVEQDKNTQEVFAQVKQIYKTPPIKDFGGFNFSQILPDPSKPSKRSFIEDLLFNKVTLADAGFIKQYGDCLGDIAARDLICAQKFNGLTVLPPLLTDEMIAQYTSALLAGTITSGWTFGAGAALQIPFAMQMAYRFNGIGVTQNVLYENQKLIANQFNSAIGKIQDSLSSTASALGKLQDVVNQNAQALNTLVKQLSSNFGAISSVLNDILSRLDKVEAEVQIDRLITGRLQSLQTYVTQQLIRAAEIRASANLAATKMSECVLGQSKRFDFCGKGYHLMSFPQSAPHGVVFLHVTYVCAQEKNFTTAPAICHDGKAHFPREGVFVSNGTHWFVTQRNFYEPQIITTDNTFVSGNCDVVIGIVNNTVYDPLQPELDSGGSGYIPEAPRDGQAYVRKDGEWVLLSTFL

SEQ ID NO: 10160 - protein, 1177 aa, Artificial Sequence
  SARS-CoV-2/China/WF0028/2020__EPI_ISL_413791 spike protein (1-1147)(P715C_P1069C) Foldon construct
MFVFLVLLPLVSSQCVNLTTRTQLPPAYTNSFTRGVYYPDKVFRSSVLHSTQDLFLPFFSNVTWFHAIHVSGTNGTKRFDNPVLPFNDGVYFASTEKSNIIRGWIFGTTLDSKTQSLLIVNNATNVVIKVCEFQFCNDPFLGVYYHKNNKSWMESEFRVYSSANNCTFEYVSQPFLMDLEGKQGNFKNLREFVFKNIDGYFKIYSKHTPINLVRDLPQGFSALEPLVDLPIGINITRFQTLLALHRSYLTPGDSSSGWTAGAAAYYVGYLQPRTFLLKYNENGTITDAVDCALDPLSETKCTLKSFTVEKGIYQTSNFRVQPTESIVRFPNITNLCPFGEVFNATRFASVYAWNRKRISNCVADYSVLYNSASFSTFKCYGVSPTKLNDLCFTNVYADSFVIRGDEVRQIAPGQTGKIADYNYKLPDDFTGCVIAWNSNNLDSKVGGNYNYLYRLFRKSNLKPFERDISTEIYQAGSTPCNGVEGFNCYFPLQSYGFQPTNGVGYQPYRVVVLSFELLHAPATVCGPKKSTNLVKNKCVNFNFNGLTGTGVLTESNKKFLPFQQFGRDIADTTDAVRDPQTLEILDITPCSFGGVSVITPGTNTSNQVAVLYQDVNCTEVPVAIHADQLTPTWRVYSTGSNVFQTRAGCLIGAEHVNNSYECDIPIGAGICASYQTQTNSPRRARSVASQSIIAYTMSLGAENSVAYSNNSIAICTNFTISVTTEILPVSMTKTSVDCTMYICGDSTECSNLLLQYGSFCTQLNRALTGIAVEQDKNTQEVFAQVKQIYKTPPIKDFGGFNFSQILPDPSKPSKRSFIEDLLFNKVTLADAGFIKQYGDCLGDIAARDLICAQKFNGLTVLPPLLTDEMIAQYTSALLAGTITSGWTFGAGAALQIPFAMQMAYRFNGIGVTQNVLYENQKLIANQFNSAIGKIQDSLSSTASALGKLQDVVNQNAQALNTLVKQLSSNFGAISSVLNDILSRLDKVEAEVQIDRLITGRLQSLQTYVTQQLIRAAEIRASANLAATKMSECVLGQSKRVDFCGKGYHLMSFPQSAPHGVVFLHVTYVCAQEKNFTTAPAICHDGKAHFPREGVFVSNGTHWFVTQRNFYEPQIITTDNTFVSGNCDVVIGIVNNTVYDPLQPELESGGSGYIPEAPRDGQAYVRKDGEWVLLSTFL

SEQ ID NO: 10161 - protein, 1177 aa, Artificial Sequence
  SARS-CoV-2/2019-nCoV/USA-CruiseA-18/2020__MT159716.1 spike protein (1-1147)(P715C_P1069C) Foldon construct
MFVFLVLLPLVSSQCVNLTTRTQLPPAYTNSFTRGVYYPDKVFRSSVLHSTQDLFLPFFSNVTWFHAIHVSGTNGTKRFDNPVLPFNDGVYFASTEKSNIIRGWIFGTTLDSKTQSLLIVNNATNVVIKVCEFQFCNDPFLGVYYHKNNKSWMESELRVYSSANNCTFEYVSQPFLMDLEGKQGNFKNLREFVFKNIDGYFKIYSKHTPINLVRDLPQGFSALEPLVDLPIGINITRFQTLLALHRSYLTPGDSSSGWTAGAAAYYVGYLQPRTFLLKYNENGTITDAVDCALDPLSETKCTLKSFTVEKGIYQTSNFRVQPTESIVRFPNITNLCPFGEVFNATRFASVYAWNRKRISNCVADYSVLYNSASFSTFKCYGVSPTKLNDLCFTNVYADSFVIRGDEVRQIAPGQTGKIADYNYKLPDDFTGCVIAWNSNNLDSKVGGNYNYLYRLFRKSNLKPFERDISTEIYQAGSTPCNGVEGFNCYFPLQSYGFQPTNGVGYQPYRVVVLSFELLHAPATVCGPKKSTNLVKNKCVNFNFNGLTGTGVLTESNKKFLPFQQFGRDIADTTDAVRDPQTLEILDITPCSFGGVSVITPGTNTSNQVAVLYQDVNCTEVPVAIHADQLTPTWRVYSTGSNVFQTRAGCLIGAEHVNNSYECDIPIGAGICASYQTQTNSPRRARSVASQSIIAYTMSLGAENSVAYSNNSIAICTNFTISVTTEILPVSMTKTSVDCTMYICGDSTECSNLLLQYGSFCTQLNRALTGIAVEQDKNTQEVFAQVKQIYKTPPIKDFGGFNFSQILPDPSKPSKRSFIEDLLFNKVTLADAGFIKQYGDCLGDIAARDLICAQKFNGLTVLPPLLTDEMIAQYTSALLAGTITSGWTFGAGAALQIPFAMQMAYRFNGIGVTQNVLYENQKLIANQFNSAIGKIQDSLSSTASALGKLQDVVNQNAQALNTLVKQLSSNFGAISSVLNDILSRLDKVEAEVQIDRLITGRLQSLQTYVTQQLIRAAEIRASANLAATKMSECVLGQSKRVDFCGKGYHLMSFPQSAPHGVVFLHVTYVCAQEKNFTTAPAICHDGKAHFPREGVFVSNGTHWFVTQRNFYEPQIITTDNTFVSGNCDVVIGIVNNTVYDPLQPELDSGGSGYIPEAPRDGQAYVRKDGEWVLLSTFL

SEQ ID NO: 10162 - protein, 1177 aa, Artificial Sequence
  SARS-CoV-2/SARS-CoV-2/Yunnan-01/human/2020/CHN__MT049951.1 spike protein (1-1147)(P715C_P1069C) Foldon construct
MFVFLVLLPLVSSQCVNLTTRTQLPPANTNSFTRGVYYPDKVFRSSVLHSTQDLFLPFFSNVTWFHAIHVSGTNGTKRFDNPVLPFNDGVYFASTEKSNIIRGWIFGTTLDSKTQSLLIVNNATNVVIKVCEFQFCNDPFLGVYYHKNNKSWMESEFRVYSSANNCTFEYVSQPFLMDLEGKQGNFKNLREFVFKNIDGYFKIYSKHTPINLVRDLPQGFSALEPLVDLPIGINITRFQTLLALHRSYLTPGDSSSGWTAGAAAYYVGYLQPRTFLLKYNENGTITDAVDCALDPLSETKCTLKSFTVEKGIYQTSNFRVQPTESIVRFPNITNLCPFGEVFNATRFASVYAWNRKRISNCVADYSVLYNSASFSTFKCYGVSPTKLNDLCFTNVYADSFVIRGDEVRQIAPGQTGKIADYNYKLPDDFTGCVIAWNSNNLDSKVGGNYNYLYRLFRKSNLKPFERDISTEIYQAGSTPCNGVEGFNCYFPLQSYGFQPTNGVGYQPYRVVVLSFELLHAPATVCGPKKSTNLVKNKCVNFNFNGLTGTGVLTESNKKFLPFQQFGRDIADTTDAVRDPQTLEILDITPCSFGGVSVITPGTNTSNQVAVLYQDVNCTEVPVAIHADQLTPTWRVYSTGSNVFQTRAGCLIGAEHVNNSYECDIPIGAGICASYQTQTNSPRRARSVASQSIIAYTMSLGAENSVAYSNNSIAICTNFTISVTTEILPVSMTKTSVDCTMYICGDSTECSNLLLQYGSFCTQLNRALTGIAVEQDKNTQEVFAQVKQIYKTPPIKDFGGFNFSQILPDPSKPSKRSFIEDLLFNKVTLADAGFIKQYGDCLGDIAARDLICAQKFNGLTVLPPLLTDEMIAQYTSALLAGTITSGWTFGAGAALQIPFAMQMAYRFNGIGVTQNVLYENQKLIANQFNSAIGKIQDSLSSTASALGKLQDVVNQNAQALNTLVKQLSSNFGAISSVLNDILSRLDKVEAEVQIDRLITGRLQSLQTYVTQQLIRAAEIRASANLAATKMSECVLGQSKRVDFCGKGYHLMSFPQSAPHGVVFLHVTYVCAQEKNFTTAPAICHDGKAHFPREGVFVSNGTHWFVTQRNFYEPQIITTDNTFVSGNCDVVIGIVNNTVYDPLQPELDSGGSGYIPEAPRDGQAYVRKDGEWVLLSTFL

SEQ ID NO: 10163 - protein, 1177 aa, Artificial Sequence
  SARS-CoV-2/USA/WA-UW292/2020__EPI_ISL_418077 spike protein (1-1147)(P715C_P1069C) Foldon construct
MFVFLVLLPLVSSQCVNLTTRTQLPPAYTNSFTRGVYYPDKVFRSSVLHSTQDLFLPFFSNVTWFHAIHVSGTNGTKRFDNPVLPFNDGVYFASTEKSNIIRGWIFGTTLDSKTQSLLIVNNATNVVIKVCEFQFCNDPFLGVYYHKNNKSWMESEFRVYSSANNCTFEYVSQPFLMDLEGKQGNFKNLREFVFKNIDGYFKIYSKHTPINLVRDLPQGFSALEPLVDLPIGINITRFQTLLALHRSYLTPGDSSSGWTAGAAAYYVGYLQPRTFLLKYNENGTITDAVDCALDPLSETKCTLKSFTVEKGIYQTSNFRVQPTESIVRFPNITNLCPFGEVFNATRFASVYAWNRKRISNCVADYSVLYNSASFSTFKCYGVSPTKLNDLCFTNVYADSFVIRGDEVRQIAPGQTGKIADYNYKLPDDFTGCVIAWNSNNLDSKVGGNYNYLYRLFRKSNLKPFERDISTEIYQASSTPCNGVEGFNCYFPLQSYGFQPTNGVGYQPYRVVVLSFELLHAPATVCGPKKSTNLVKNKCVNFNFNGLTGTGVLTESNKKFLPFQQFGRDIADTTDAVRDPQTLEILDITPCSFGGVSVITPGTNTSNQVAVLYQDVNCTEVPVAIHADQLTPTWRVYSTGSNVFQTRAGCLIGAEHVNNSYECDIPIGAGICASYQTQTNSPRRARSVASQSIIAYTMSLGAENSVAYSNNSIAICTNFTISVTTEILPVSMTKTSVDCTMYICGDSTECSNLLLQYGSFCTQLNRALTGIAVEQDKNTQEVFAQVKQIYKTPPIKDFGGFNFSQILPDPSKPSKRSFIEDLLFNKVTLADAGFIKQYGDCLGDIAARDLICAQKFNGLTVLPPLLTDEMIAQYTSALLAGTITSGWTFGAGAALQIPFAMQMAYRFNGIGVTQNVLYENQKLIANQFNSAIGKIQDSLSSTASALGKLQDVVNQNAQALNTLVKQLSSNFGAISSVLNDILSRLDKVEAEVQIDRLITGRLQSLQTYVTQQLIRAAEIRASANLAATKMSECVLGQSKRVDFCGKGYHLMSFPQSAPHGVVFLHVTYVCAQEKNFTTAPAICHDGKAHFPREGVFVSNGTHWFVTQRNFYEPQIITTDNTFVSGNCDVVIGIVNNTVYDPLQPELDSGGSGYIPEAPRDGQAYVRKDGEWVLLSTFL

SEQ ID NO: 10164 - protein, 1177 aa, Artificial Sequence
  SARS-CoV-2/Iceland/192/2020__EPI_ISL_417819 spike protein (1-1147)(P715C_P1069C) Foldon construct
MFVFFVLLPLVSSQCVNLTTRTQLPPAYTNSFTRGVYYPDKVFRSSVLHSTQDLFLPFFSNVTWFHAIHVSGTNGTKRFDNPVLPFNDGVYFASTEKSNIIRGWIFGTTLDSKTQSLLIVNNATNVVIKVCEFQFCNDPFLGVYYHKNNKSWMESEFRVYSSANNCTFEYVSQPFLMDLEGKQGNFKNLREFVFKNIDGYFKIYSKHTPINLVRDLPQGFSALEPLVDLPIGINITRFQTLLALHRSYLTPGDSSSGWTAGAAAYYVGYLQPRTFLLKYNENGTITDAVDCALDPLSETKCTLKSFTVEKGIYQTSNFRVQPTESIVRFPNITNLCPFGEVFNATRFASVYAWNRKRISNCVADYSVLYNSASFSTFKCYGVSPTKLNDLCFTNVYADSFVIRGDEVRQIAPGQTGKIADYNYKLPDDFTGCVIAWNSNNLDSKVGGNYNYLYRLFRKSNLKPFERDISTEIYQAGSTPCNGVEGFNCYFPLQSYGFQPTNGVGYQPYRVVVLSFELLHAPATVCGPKKSTNLVKNKCVNFNFNGLTGTGVLTESNKKFLPFQQFGRDIADTTDAVRDPQTLEILDITPCSFGGVSVITPGTNTSNQVAVLYQGVNCTEVPVAIHADQLTPTWRVYSTGSNVFQTRAGCLIGAEHVNNSYECDIPIGAGICASYQTQTNSPRRARSVASQSIIAYTMSLGAENSVAYSNNSIAICTNFTISVTTEILPVSMTKTSVDCTMYICGDSTECSNLLLQYGSFCTQLNRALTGIAVEQDKNTQEVFAQVKQIYKTPPIKDFGGFNFSQILPDPSKPSKRSFIEDLLFNKVTLADAGFIKQYGDCLGDIAARDLICAQKFNGLTVLPPLLTDEMIAQYTSALLAGTITSGWTFGAGAALQIPFAMQMAYRFNGIGVTQNVLYENQKLIANQFNSAIGKIQDSLSSTASALGKLQDVVNQNAQALNTLVKQLSSNFGAISSVLNDILSRLDKVEAEVQIDRLITGRLQSLQTYVTQQLIRAAEIRASANLAATKMSECVLGQSKRVDFCGKGYHLMSFPQSAPHGVVFLHVTYVCAQEKNFTTAPAICHDGKAHFPREGVFVSNGTHWFVTQRNFYEPQIITTDNTFVSGNCDVVIGIVNNTVYDPLQPELDSGGSGYIPEAPRDGQAYVRKDGEWVLLSTFL

SEQ ID NO: 10165 - protein, 1177 aa, Artificial Sequence
  SARS-CoV-2/Belgium/ULG-6939/2020__EPI_ISL_417020 spike protein (1-1147)(P715C_P1069C) Foldon construct
MFVFLVLLPLVSSQCVNLTTRTQLPPAYTNSFTRGVYYPDKVFRSSVLHSTQDLFLPFFSNVTWFHAIHVSGTNGTKRFDNPVLPFNDGVYFASTEKSNIIRGWIFGTTLDSKTQSLLIVNNATNVVIKVCEFQFCNDPFLGVYYHKNNKSWMESEFRVYSSANNCTFEYVSQPFLMDLEGKQGNFKNLREFVFKNIDGYFKIYSKHTPINLVRDLPQGFSALEPLVDLPIGINITRFQTLLALHRSYLTPGDSSSGWTAGAAAYYVGYLQPRTFLLKYNENGTITDAVDCALDPLSETKCTLKSFTVEKGIYQTSNFRVQPTESIVRFPNITNLCPFGEVFNATRFASVYAWNRKRISNCVADYSVLYNSASFSTFKCYGVSPTKLNDLCFTNVYADSFVIRGDEVRQIAPGQTGKIADYNYKLPDDFTGCVIAWNSNNLDSKVGGNYNYLYRLFRKSNLKPFERDISTEIYQAGSTPCNGVEGFNCYFPLQSYGFQPTNGVGYQPYRVVVLSFELLHAPATVCGPKKSTNLVKNKCVNFNFNGLTGTGVLTESNKKFLPFQQFGRDIADTTDAVRDPQTLEILDITPCSFGGVSVITPGTNTSNQVAVLYQGVNCTEVPVAIHADQLTPTWRVYSTGSNVFQTRAGCLIGAEHVNNSYECDIPIGAGICASYQTQTNSPRRARSVASQSIIAYTMSLGAENSVVYSNNSIAICTNFTISVTTEILPVSMTKTSVDCTMYICGDSTECSNLLLQYGSFCTQLNRALTGIAVEQDKNTQEVFAQVKQIYKTPPIKDFGGFNFSQILPDPSKPSKRSFIEDLLFNKVTLADAGFIKQYGDCLGDIAARDLICAQKFNGLTVLPPLLTDEMIAQYTSALLAGTITSGWTFGAGAALQIPFAMQMAYRFNGIGVTQNVLYENQKLIANQFNSAIGKIQDSLSSTASALGKLQDVVNQNAQALNTLVKQLSSNFGAISSVLNDILSRLDKVEAEVQIDRLITGRLQSLQTYVTQQLIRAAEIRASANLAATKMSECVLGQSKRVDFCGKGYHLMSFPQSAPHGVVFLHVTYVCAQEKNFTTAPAICHDGKAHFPREGVFVSNGTHWFVTQRNFYEPQIITTDNTFVSGNCDVVIGIVNNTVYDPLQPELDSGGSGYIPEAPRDGQAYVRKDGEWVLLSTFL

SEQ ID NO: 10166 - protein, 1177 aa, Artificial Sequence
  SARS-CoV-2/France/HF2496/2020__EPI_ISL_418231 spike protein (1-1147)(P715C_P1069C) Foldon construct
MFVFLVLLPLVSSQCVNLTTRTQLPPAYTNSFTRGVYYPDKVFRSSVLHSTQDLFLPFFSNVTWFHAIHVSGTNGTKRFDNPVLPFNDGVYFASTEKSNIIRGWIFGTTLDSKTQSLLIVNNATNVVIKVCEFQFCNDPFLGVYYHKNNKSWMESEFRVYSSANNCTFEYVSQPFLMDLEGKQGNFKNLREFVFKNIDGYFKIYSKHTPINLVRDLPQGFSALEPLVDLPIGINITRFQTLLALHRSYLTPGDSSSGWTAGAAAYYVGYLQPRTFLLKYNENGTITDAVDCALDPLSETKCTLKSFTVEKGIYQTSNFRVQPTESIVRFPNITNLCPFGEVFNATRFASVYAWNRKRISNCVADYSVLYNSASFSTFKCYGVSPTKLNDLCFTNVYADSFVIRGDEVRQIAPGQTGKIADYNYKLPDDFTGCVIAWNSNNLDSKVGGNYNYLYRLFRKSNLKPFERDISTEIYQAGSTPCNGVEGFNCYFPLQSYGFQPTNGVGYQPYRVVVLSFELLHAPATVCGPKKSTNLVKNKCVNFNFNGLTGTGVLTESNKKFLPFQQFGRDIADTTDAVRDPQTLEILDITPCSFGGVSVITPGTNTSNQVAVLYQGVNCTEVPVAIHADQLTPTWRVYSTGSNVFQTRAGCLIGAEHVNNSYECDIPIGAGICASYQTQTNSPRRARSVASQSIIAYTMSLGAENSVAYSNNSIAICTNFTISVTTEILPVSMTKTSVDCTMYICGDSTECSNLLLQYGSFCTQLNRALTGIAVEQDKNTQEVFAQVKQIYKTPPIKDFGGFNFSQILPDPSKPSKRSFIEDLLFNKVTLADAGFIKQYGDCLGDIVARDLICAQKFNGLTVLPPLLTDEMIAQYTSALLAGTITSGWTFGAGAALQIPFAMQMAYRFNGIGVTQNVLYENQKLIANQFNSAIGKIQDSLSSTASALGKLQDVVNQNAQALNTLVKQLSSNFGAISSVLNDILSRLDKVEAEVQIDRLITGRLQSLQTYVTQQLIRAAEIRASANLAATKMSECVLGQSKRVDFCGKGYHLMSFPQSAPHGVVFLHVTYVCAQEKNFTTAPAICHDGKAHFPREGVFVSNGTHWFVTQRNFYEPQIITTDNTFVSGNCDVVIGIVNNTVYDPLQPELDSGGSGYIPEAPRDGQAYVRKDGEWVLLSTFL

SEQ ID NO: 10167 - protein, 1177 aa, Artificial Sequence
  SARS-CoV-2/USA/WA-UW291/2020__EPI_ISL_418076 spike protein (1-1147)(P715C_P1069C) Foldon construct
MFVFLVLLPLVSSQCVNLTTRTQLPPAYTNSFTRGVYYPDKVFRSSVLHSTQDLFLPFFSNVTWFHAIHVSGTNGTKRFDNPVLPFNDGVYFASTEKSNIIRGWIFGTTLDSKTQSLLIVNNATNVVIKVCEFQFCNDPFLGVYYHKNNKSWMESEFRVYSSANNCTFEYVSQPFLMDLEGKQGNFKNLREFVFKNIDGYFKIYSKHTPINLVRDLPQGFSALEPLVDLPIGINITRFQTLLALHRSYLTPGDSSSGWTAGAAAYYVGYLQPRTFLLKYNENGTITDAVDCALDPLSETKCTLKSFTVEKGIYQTSNFRVQPTESIVRFPNITNLCPFGEVFNATRFASVYAWNRKRISNCVADYSVLYNSASFSTFKCYGVSPTKLNDLCFTNVYADSFVIRGDEVRQIAPGQTGKIADYNYKLPDDFTGCVIAWNSNNLDSKVGGNYNYLYRLFRKSNLKPFERDISTEIYQAGSTPCNGVEGFNCYFPLQSYGFQPTNGVGYQPYRVVVLSFELLHAPATVCGPKKSTNLVKNKCVNFNFNGLTGTGVLTESNKKFLPFQQFGRDIADTTDAVRDPQTLEILDITPCSFGGVSVITPGTNTSNQVAVLYQGVNCTEVPVAIHADQLTPTWRVYSTGSNVFQTRAGCLIGAEHVNNSYECDIPIGAGICASYQTQTNSPRRARSVASQSIIAYTMSLGAENSVAYSNNSIAICTNFTISVTTEILPVSMTKTSVDCTMYICGDSTECSNLLLQYGSFCTQLNRALTGIAVEQDKNTQEVFAQVKQIYKTPPIKDFGGFNFSQILPDPSKPSKRSFIEDLLFNKVTLADAGFIKQYGDCLGDIAARDLICAQKFNGLTVLPPLLTDEMIAQYTSALLAGTITSGWTFGAGAALQIPFAMQMAYRFNGIGVTQNVLYENQKLIANQFNSAIGKIQYSLSSTASALGKLQDVVNQNAQALNTLVKQLSSNFGAISSVLNDILSRLDKVEAEVQIDRLITGRLQSLQTYVTQQLIRAAEIRASANLAATKMSECVLGQSKRVDFCGKGYHLMSFPQSAPHGVVFLHVTYVCAQEKNFTTAPAICHDGKAHFPREGVFVSNGTHWFVTQRNFYEPQIITTDNTFVSGNCDVVIGIVNNTVYDPLQPELDSGGSGYIPEAPRDGQAYVRKDGEWVLLSTFL

SEQ ID NO: 10168 - protein, 1177 aa, Artificial Sequence; identical to SEQ ID NO: 10131
  SARS-CoV-2/Portugal/PT0034/2020__EPI_ISL_418019 spike protein (1-1147)(P715C_P1069C) Foldon construct

SEQ ID NO: 10169 - protein, 1177 aa, Artificial Sequence; identical to SEQ ID NO: 10123
  SARS-CoV-2/Iceland/202/2020__EPI_ISL_417750 spike protein (1-1147)(P715C_P1069C) Foldon construct

SEQ ID NO: 10170 - protein, 1177 aa, Artificial Sequence
  SARS-CoV-2/USA/WA-UW261/2020__EPI_ISL_418046 spike protein (1-1147)(P715C_P1069C) Foldon construct
MFVFLVLLPLVSSQCVNLTTRTQLPPAYTNSFTRGVYYPDKVFRSSVLHSTQDLFLPFFSNVTWFHAIHVSGTNGTKRFDNPVLPFNDGVYFASTEKSNIIRGWIFGTTLDSKTQSLLIVNNATNVVIKVCEFQFCNDPFLGVYYHKNNKSWMESEFRVYSSANNCTFEYVSQPFLMDLEGKQGNFKNLREFVFKNIDGYFKIYSKHTPINLVRDLPQGFSALEPLVDLPIGINITRFQTLLALHRSYLTPGDSSSGWTAGAAAYYVGYLQPRTFLLKYNENGTITDAVDCALDPLSETKCTLKSFTVEKGIYQTSNFRVQPTESIVRFPNITNLCPFGEVFNATRFTSVYAWNRKRISNCVADYSVLYNSASFSTFKCYGVSPTKLNDLCFTNVYADSFVIRGDEVRQIAPGQTGKIADYNYKLPDDFTGCVIAWNSNNLDSKVGGNYNYLYRLFRKSNLKPFERDISTEIYQAGSTPCNGVEGFNCYFPLQSYGFQPTNGVGYQPYRVVVLSFELLHAPATVCGPKKSTNLVKNKCVNFNFNGLTGTGVLTESNKKFLPFQQFGRDIADTTDAVRDPQTLEILDITPCSFGGVSVITPGTNTSNQVAVLYQDVNCTEVPVAIHADQLTPTWRVYSTGSNVFQTRAGCLIGAEHVNNSYECDIPIGAGICASYQTQTNSPRRARSVASQSIIAYTMSLGAENSVAYSNNSIAICTNFTISVTTEILPVSMTKTSVDCTMYICGDSTECSNLLLQYGSFCTQLNRALTGIAVEQDKNTQEVFAQVKQIYKTPPIKDFGGFNFSQILPDPSKPSKRSFIEDLLFNKVTLADAGFIKQYGDCLGDIAARDLICAQKFNGLTVLPPLLTDEMIAQYTSALLAGTITSGWTFGAGAALQIPFAMQMAYRFNGIGVTQNVLYENQKLIANQFNSAIGKIQDSLSSTASALGKLQDVVNQNAQALNTLVKQLSSNFGAISSVLNDILSRLDKVEAEVQIDRLITGRLQSLQTYVTQQLIRAAEIRASANLAATKMSECVLGQSKRVDFCGKGYHLMSFPQSAPHGVVFLHVTYVCAQEKNFTTAPAICHDGKAHFPREGVFVSNGTHWFVTQRNFYEPQIITTDNTFVSGNCDVVIGIVNNTVYDPLQPELDSGGSGYIPEAPRDGQAYVRKDGEWVLLSTFL

SEQ ID NO: 10171 - protein, 1177 aa, Artificial Sequence
  SARS-CoV-2/Portugal/PT0035/2020__EPI_ISL_418020 spike protein (1-1147)(P715C_P1069C) Foldon construct
MFVFLVLLPLVSSQCVNLTTRTQLPPAYTNSFTRGVYYPDKVFRSSVLHSTQDLFLPFFSNVTWFHAIHVSGTNGTKRFDNPVLPFNDGVYFASTEKSNIIRGWIFGTTLDSKTQSLLIVNNATNVVIKVCEFQFCNDPFLGVYYHKNNKSWMESEFRVYSSANNCTFEYVSQPFLMDLEGKQGNFKNLREFVFKNIDGYFKIYSKHTPINLVRDLPQGFSALEPLVDLPIGINITRFQTLLALHRSYLTPGDSSSGWTAGAAAYYVGYLQPRTFLLKYNENGTITDAVDCALDPLSETKCTLKSFTVEKGIYQTSNFRVQPTESIVRFPNITNLCPFGEVFNATRFASVYAWNRKRISNCVADYSVLYNSASFSTFKCYGVSPTKLNDLCFTNVYADSFVIRGDEVRQIAPGQTGKIADYNYKLPDDFTGCVIAWNSNNLDSKVGGNYNYLYRLFRKSNLKPFERDISTEIYQAGSTPCNGVEGFNCYFPLQSYGFQPTNGVGYQPYRVVVLSFELLHAPATVCGPKKSTNLVKNKCVNFNFNGLTGTGVLTESNKKFLPFQQFGRDIADTTDAVRDPQTLEILDITPCSFGGVSVITPGTNTSNQVAVLYQDVNCTEVPVAIHADQLTPTWRVYSTGSNVFQTRAGCLIGAEHVNNSYECDIPIGAGICASYQTQTNSPRRARSVASQSIIAYTMSLGAENSVAYSNNSIAICTNFTISVTTEILPVSMTKTSVDCTMYICGDSTECSNLLLQYGSFCTQLNRALTGIAVEQDKNTQEVFAQVKQIYKTPPIKDFGGFNFSQILPDPSKPSKRSFIEDLLFNKVTLADAGFIKQYGDCLGDISARDLICAQKFNGLTVLPPLLTDEMIAQYTSALLAGTITSGWTFGAGAALQIPFAMQMAYRFNGIGVTQNVLYENQKLIANQFNSAIGKIQDSLSSTASALGKLQDVVNQNAQALNTLVKQLSSNFGAISSVLNDILSRLDKVEAEVQIDRLITGRLQSLQTYVTQQLIRAAEIRASANLAATKMSECVLGQSKRVDFCGKGYHLMSFPQSAPHGVVFLHVTYVCAQEKNFTTAPAICHDGKAHFPREGVFVSNGTHWFVTQRNFYEPQIITTDNTFVSGNCDVVIGIVNNTVYDPLQPELDSGGSGYIPEAPRDGQAYVRKDGEWVLLSTFL

SEQ ID NO: 10172 - protein, 1177 aa, Artificial Sequence
  SARS-CoV-2/USA/NY-NYUMC7/2020__EPI_ISL_418192 spike protein (1-1147)(P715C_P1069C) Foldon construct
MFVFLVLLPLVSSQCVNLTTRTQLPPAYTNSFTRGVYYPDKVFRSSVLHSTQDLFLPFFSNVTWFHAIHVSGTNGTKRFDNPVLPFNDGVYFASTEKSNIIRGWIFGTTLDSKTQSLLIVNNATNVVIKVCEFQFCNDPFLGVYHHKNNKSWMESEFRVYSSANNCTFEYVSQPFLMDLEGKQGNFKNLREFVFKNIDGYFKIYSKHTPINLVRDLPQGFSALEPLVDLPIGINITRFQTLLALHRSYLTPGDSSSGWTAGAAAYYVGYLQPRTFLLKYNENGTITDAVDCALDPLSETKCTLKSFTVEKGIYQTSNFRVQPTESIVRFPNITNLCPFGEVFNATRFASVYAWNRKRISNCVADYSVLYNSASFSTFKCYGVSPTKLNDLCFTNVYADSFVIRGDEVRQIAPGQTGKIADYNYKLPDDFTGCVIAWNSNNLDSKVGGNYNYLYRLFRKSNLKPFERDISTEIYQAGSTPCNGVEGFNCYFPLQSYGFQPTNGVGYQPYRVVVLSFELLHAPATVCGPKKSTNLVKNKCVNFNFNGLTGTGVLTESNKKFLPFQQFGRDIADTTDAVRDPQTLEILDITPCSFGGVSVITPGTNTSNQVAVLYQGVNCTEVPVAIHADQLTPTWRVYSTGSNVFQTRAGCLIGAEHVNNSYECDIPIGAGICASYQTQTNSPRRARSVASQSIIAYTMSLGAENSVAYSNNSIAICTNFTISVTTEILPVSMTKTSVDCTMYICGDSTECSNLLLQYGSFCTQLNRALTGIAVEQDKNTQEVFAQVKQIYKTPPIKDFGGFNFSQILPDPSKPSKRSFIEDLLFNKVTLADAGFIKQYGDCLGDIAARDLICAQKFNGLTVLPPLLTDEMIAQYTSALLAGTITSGWTFGAGAALQIPFAMQMAYRFNGIGVTQNVLYENQKLIANQFNSAIGKIQDSLSSTASALGKLQDVVNQNAQALNTLVKQLSSNFGAISSVLNDILSRLDKVEAEVQIDRLITGRLQSLQTYVTQQLIRAAEIRASANLAATKMSECVLGQSKRVDFCGKGYHLMSFPQSAPHGVVFLHVTYVCAQEKNFTTAPAICHDGKAHFPREGVFVSNGTHWFVTQRNFYEPQIITTDNTFVSGNCDVVIGIVNNTVYDPLQPELDSGGSGYIPEAPRDGQAYVRKDGEWVLLSTFL

SEQ ID NO: 10173 - protein, 1177 aa, Artificial Sequence
  SARS-CoV-2/Iceland/189/2020__EPI_ISL_417709 spike protein (1-1147)(P715C_P1069C) Foldon construct
MFVFLVLLPLVSSQCVNLTTRTQLPPAYTNSFTRGVYYPDKVFRSSVLHSTQDLFLPFFSNVTWFHAIHVSGTNGTKRFDNPVLPFNDGVYFASTEKSNIIRGWIFGTTLDSKTQSLLIVNNATNVVIKVCEFQFCNDPFLGVYYHKNNKSWMESEFRVYSSANNCTFEYVSQPFLMDLEGKQGNFKNLREFVFKNIDGYFKIYSKHTPINLVRDLPQGFSALEPLVDLPIGINITRFQTLLALHRSYLTPGDSSSGWTAGAAAYYVGYLQPRTFLLKYNENGTITDAVDCALDPLSETKCTLKSFTVEKGIYQTSNFRVQPTESIVRFPNITNLCPFGEVFNATRFASVYAWNRKRISNCVADYSVLYNSASFSTFKCYGVSPTKLNDLCFTNVYADSFVIRGDEVRQIAPGQTGKIADYNYKLPDDFTGCVIAWNSNNLDSKVGGNYNYLYRLFRKSNLKPFERDISTEIYQAGSTPCNGVEGFNCYFPLQSYGFQPTNGVGYQPYRVVVLSFELLHAPATVCGPKKSTNLVKNKCVNFNFNGLTGTGVLTESNKKFLPFQQFGRDIADTTDAVRDPQTLEILDITPCSFGGVSVITPGTNTSNQVAVLYQGVNCTEVPVAIHADQLTPTWRVYSTGSNVFQTRAGCLIGAEHVNNSYECDIPIGAGICASYQTQTNSPRRARSVASQSIIAYTMSLGAENSVAYSNNSIAICTNFTISVTTEILPVSMTKTSVDCTMYICGDSTECSNLLLQYGSFCTQLNRALTGIAVEQDKNTQEVFAQVKQIYKTPPIKDFGGFNFSQILPDPSKPSKRSFIEDLLFNKVTLADAGFTKQYGDCLGDIAARDLICAQKFNGLTVLPPLLTDEMIAQYTSALLAGTITSGWTFGAGAALQIPFAMQMAYRFNGIGVTQNVLYENQKLIANQFNSAIGKIQDSLSSTASALGKLQDVVNQNAQALNTLVKQLSSNFGAISSVLNDILSRLDKVEAEVQIDRLITGRLQSLQTYVTQQLIRAAEIRASANLAATKMSECVLGQSKRVDFCGKGYHLMSFPQSAPHGVVFLHVTYVCAQEKNFTTAPAICHDGKAHFPREGVFVSNGTHWFVTQRNFYEPQIITTDNTFVSGNCDVVIGIVNNTVYDPLQPELDSGGSGYIPEAPRDGQAYVRKDGEWVLLSTFL

SEQ ID NO: 10174 - protein, 1177 aa, Artificial Sequence
  SARS-CoV-2/Australia/NSW56/2020__EPI_ISL_417408 spike protein (1-1147)(P715C_P1069C) Foldon construct
MFVFLVLLPLVSSQCVNLTTRTQLPPAYTNSFTRGVYYPDKVFRSSVLHSTQDLFLPFFSNVTWFHAIHVSGTNGTKRFDNPVLPFNDGVYFASTEKSNIIRGWIFGTTLDSKTQSLLIVNNATNVVIKVCEFQFCNDPFLGVYYHKNNKSWMESEFRVYSSANNCTFEYVSQPFLMDLEGKQGNFKNLREFVFKNIDGYFKIYSKHTPINLVRDLPQGFSALEPLVDLPIGINITRFQTLLALHRSYLTPGDSSSGWTAGAAAYYVGYLQPRTFLLKYNENGTITDAVDCALDPLSETKCTLKSFTVEKGIYQTSNFRVQPTESIVRFPNITNLCPFGEVFNATRFASVYAWNRKRISNCVADYSVLYNSASFSTFKCYGVSPTKLNDLCFTNVYADSFVIRGDEVRQIAPGQTGKIADYNYKLPDDFTGCVIAWNSNNLDSKVGGNYNYLYRLFRKSNLKPFERDISTEIYQAGSTPCNGVEGFNCYFPLQSYGFQPTNGVGYQPYRVVVLSFELLHAPATVCGPKKSTNLVKNKCVNFNFNGLTGTGVLTESNKKFLPFQQFGRDIADTTDAVRDPQTLEILDITPCSFGGVSVITPGTNTSNQVAVLYQDVNCTEVPVAIHADQLTPTWRVYSTGSNVFQTRAGCLIGAEHVNNSYECDIPIGAGICASYQTQTNSPRRARSVASQSIIAYTMSLGAENSVAYSNNSIAICTNFTISVTTEILPVSMTKTSVDCTMYICGDSTECSNLLLQYGSFCTQLNRALTGIAVEQDKNTQEVFAQVKQIYKTPPIKDFGGFNFSQILPDSSKPSKRSFIEDLLFNKVTLADAGFIKQYGDCLGDIAARDLICAQKFNGLTVLPPLLTDEMIAQYTSALLAGTITSGWTFGAGAALQIPFAMQMAYRFNGIGVTQNVLYENQKLIANQFNSAIGKIQDSLSSTASALGKLQDVVNQNAQALNTLVKQLSSNFGAISSVLNDILSRLDKVEAEVQIDRLITGRLQSLQTYVTQQLIRAAEIRASANLAATKMSECVLGQSKRVDFCGKGYHLMSFPQSAPHGVVFLHVTYVCAQEKNFTTAPAICHDGKAHFPREGVFVSNGTHWFVTQRNFYEPQIITTDNTFVSGNCDVVIGIVNNTVYDPLQPELDSGGSGYIPEAPRDGQAYVRKDGEWVLLSTFL

SEQ ID NO: 10175 - protein, 1177 aa, Artificial Sequence
  SARS-CoV-2/Iceland/280/2020__EPI_ISL_417608 spike protein (1-1147)(P715C_P1069C) Foldon construct
MFVFLVLLPLVSSQCVNLTTRTQLPPAYTNSFTRGVYYPDKVFRSSVLHSTQDLFLPFFSNVTWFHAIHVSGTNGTKRFDNPVLPFNDGVYFASTEKSNIIRGWIFGTTLDSKTQSLLIVNNATNVVIKVCEFQFCNDPFLGVYYHKNNKSWMESEFRVYSSANNCTFEYVSQPFLMDLEGKQGNFKNLREFVFKNIDGYFKIYSKHTPINLVRDLPQGFSALEPLVDLPIGINITRFQTLLALHRSYLTPGDSSSGWTAGAAAYYVGYLQPRTFLLKYNENGTITDAVDCALDPLSETKCTLKSFTVEKGIYQTSNFRVQPTESIVRFPNITNLCPFGEVFNATRFASVYAWNRKRISNCVADYSVLYNSASFSTFKCYGVSPTKLNDLCFTNVYADSFVIRGDEVRQIAPGQTGKIADYNYKLPDDFTGCVIAWNSNNLDSKVGGNYNYLYRLFRKSNLKPFERDISTEIYQAGSTPCNGVEGFNCYFPLQSYGFQPTNGVGYQPYRVVVLSFELLHAPATVCGPKKSTNLVKNKCVNFNFNGLTGTGVLTESNKKFLPFQQFGRDIADTTDAVRDPQTLEILDITPCSFGGVSVITPGTNTSNQVAVLYQGVNCTEVPVAIHADQLTPTWRVYSTGSNVFQTRAGCLIGAEHVNNSYECDIPIGAGICASYHTQTNSPRRARSVASQSIIAYTMSLGAENSVAYSNNSIAICTNFTISVTTEILPVSMTKTSVDCTMYICGDSTECSNLLLQYGSFCTQLNRALTGIAVEQDKNTQEVFAQVKQIYKTPPIKDFGGFNFSQILPDPSKPSKRSFIEDLLFNKVTLADAGFIKQYGDCLGDIAARDLICAQKFNGLTVLPPLLTDEMIAQYTSALLAGTITSGWTFGAGAALQIPFAMQMAYRFNGIGVTQNVLYENQKLIANQFNSAIGKIQDSLSSTASALGKLQDVVNQNAQALNTLVKQLSSNFGAISSVLNDILSRLDKVEAEVQIDRLITGRLQSLQTYVTQQLIRAAEIRASANLAATKMSECVLGQSKRVDFCGKGYHLMSFPQSAPHGVVFLHVTYVCAQEKNFTTAPAICHDGKAHFPREGVFVSNGTHWFVTQRNFYEPQIITTDNTFVSGNCDVVIGIVNNTVYDPLQPELDSGGSGYIPEAPRDGQAYVRKDGEWVLLSTFL

SEQ ID NO: 10176 - protein, 1177 aa, Artificial Sequence; identical to SEQ ID NO: 10131
  SARS-CoV-2/Iceland/247/2020__EPI_ISL_417575 spike protein (1-1147)(P715C_P1069C) Foldon construct

SEQ ID NO: 10177 - protein, 1177 aa, Artificial Sequence
  SARS-CoV-2/Iceland/238/2020__EPI_ISL_417566 spike protein (1-1147)(P715C_P1069C) Foldon construct
MFVFLVLLPLVSSQCVNLTTRTQLPPAYTNSFTRGVYYPDKVFRSSVLHSTQDLFLPFFSNVTWFHAIHVSGTNGTKRFDNPVLPFNDGVYFASTEKSNIIRGWIFGTTLDSKTQSLLIVNNATNVVIKVCEFQFCNDPFLGVYYHKNNKSWMESEFRVYSSANNCTFEYVSQPFLMDLEGKQGNFKNLREFVFKNIDGYFKIYSKHTPINLVRDLPQGFSALEPLVDLPIGINITRFQTLLALHRSYLTPGDSSSGWTAGAAAYYVGYLQPRTFLLKYNENGTITDAVDCALDPLSETKCTLKSFTVEKGIYQTSNFRVQPTESIVRFPNITNLCPFGEVFNATRFASVYAWNRKRISNCVADYSVLYNSASFSTFKCYGVSPTKLNDLCFTNVYADSFVIRGDEVRQIAPGQTGKIADYNYKLPDDFTGCVIAWNSNNLDSKVGGNYNYLYRLFRKSNLKPFERDISTEIYQAGSTPCNGVEGFNCYFPLQSYGFQPTNGVGYQPYRVVVLSFELLHAPATVCGPKKSTNLVKNKCVNFNFNGLTGTGVLTESNKKFLPFQQFGRDIADTTDAVRDPQTLEILDITPCSFGGVSVITPGTNTSNQVAVLYQGVNCTEVPVAIHADQLTPTWRVYSTGSNVFQTRAGCLIGAEHVNNSYECDIPIGAGICASYQTQTNSPRRARSVASQSIIAYTMSLGAENSVAYSNNSIAICTNFTISVTTEILPVSMTKTSVDCTMYICGDSTECSNLLLQYGSFCTQLNRALTGIAVEQDKNTQEVFAQVKQIYKTPPIKDFGGFNFSQILPDPSKPSKRSFIEDLLFNKVTLADVGFIKQYGDCLGDIAARDLICAQKFNGLTVLPPLLTDEMIAQYTSALLAGTITSGWTFGAGAALQIPFAMQMAYRFNGIGVTQNVLYENQKLIANQFNSAIGKIQDSLSSTASALGKLQDVVNQNAQALNTLVKQLSSNFGAISSVLNDILSRLDKVEAEVQIDRLITGRLQSLQTYVTQQLIRAAEIRASANLAATKMSECVLGQSKRVDFCGKGYHLMSFPQSAPHGVVFLHVTYVCAQEKNFTTAPAICHDGKAHFPREGVFVSNGTHWFVTQRNFYEPQIITTDNTFVSGNCDVVIGIVNNTVYDPLQPELDSGGSGYIPEAPRDGQAYVRKDGEWVLLSTFL

SEQ ID NO: 10178 - protein, 1177 aa, Artificial Sequence
  SARS-CoV-2/Greece/16/2020__EPI_ISL_418265 spike protein (1-1147)(P715C_P1069C) Foldon construct
MFVFLVLLPLVSSQCVNLTTRTQLPPAYTNSFTRGVYYPDKVFRSSVLHSTQDLFLPFFSNVTWFHAIHVSGTNGTKRFDNPVLPFNDGVYFASTEKSNIIRGWIFGTTLDSKTQSLLIVNNATNVVIKVCEFQFCNDPFLGVYYHKNNKSWMESEFRVYSSANNCTFEYVSQPFLMDLEGKQGNFKNLREFVFKNVDGYFKIYSKHTPINLVRDLPQGFSALEPLVDLPIGINITRFQTLLALHRSYLTPGDSSSGWTAGAAAYYVGYLQPRTFLLKYNENGTITDAVDCALDPLSETKCTLKSFTVEKGIYQTSNFRVQPTESIVRFPNITNLCPFGEVFNATRFASVYAWNRKRISNCVADYSVLYNSASFSTFKCYGVSPTKLNDLCFTNVYADSFVIRGDEVRQIAPGQTGKIADYNYKLPDDFTGCVIAWNSNNLDSKVGGNYNYLYRLFRKSNLKPFERDISTEIYQAGSTPCNGVEGFNCYFPLQSYGFQPTNGVGYQPYRVVVLSFELLHAPATVCGPKKSTNLVKNKCVNFNFNGLTGTGVLTESNKKFLPFQQFGRDIADTTDAVRDPQTLEILDITPCSFGGVSVITPGTNTSNQVAVLYQDVNCTEVPVAIHADQLTPTWRVYSTGSNVFQTRAGCLIGAEHVNNSYECDIPIGAGICASYQTQTNSPRRARSVASQSIIAYTMSLGAENSVAYSNNSIAICTNFTISVTTEILPVSMTKTSVDCTMYICGDSTECSNLLLQYGSFCTQLNRALTGIAVEQDKNTQEVFAQVKQIYKTPPIKDFGGFNFSQILPDPSKPSKRSFIEDLLFNKVTLADAGFIKQYGDCLGDIAARDLICAQKFNGLTVLPPLLTDEMIAQYTSALLAGTITSGWTFGAGAALQIPFAMQMAYRFNGIGVTQNVLYENQKLIANQFNSAIGKIQDSLSSTASALGKLQDVVNQNAQALNTLVKQLSSNFGAISSVLNDILSRLDKVEAEVQIDRLITGRLQSLQTYVTQQLIRAAEIRASANLAATKMSECVLGQSKRVDFCGKGYHLMSFPQSAPHGVVFLHVTYVCAQEKNFTTAPAICHDGKAHFPREGVFVSNGTHWFVTQRNFYEPQIITTDNTFVSGNCDVVIGIVNNTVYDPLQPELDSGGSGYIPEAPRDGQAYVRKDGEWVLLSTFL

SEQ ID NO: 10179 - protein, 1177 aa, Artificial Sequence
  SARS-CoV-2/Iceland/319/2020__EPI_ISL_417648 spike protein (1-1147)(P715C_P1069C) Foldon construct
MFVFLVLLPLVSSQCVNLTTRTQLPPAYTNSFTRGVYYPDKVFRSSVLHSTQDLFLPFFSNVTWFHAIHVSGTNGTKRFDNPVLPFNDGVYFASTEKSNIIRGWIFGTTLDSKTQSLLIVNNATNVVIKVCEFQFCNDPFLGVYYHKNNKSWMESEFRVYSSANNCTFEYVSQPFLIDLEGKQGNFKNLREFVFKNIDGYFKIYSKHTPINLVRDLPQGFSALEPLVDLPIGINITRFQTLLALHRSYLTPGDSSSGWTAGAAAYYVGYLQPRTFLLKYNENGTITDAVDCALDPLSETKCTLKSFTVEKGIYQTSNFRVQPTESIVRFPNITNLCPFGEVFNATRFASVYAWNRKRISNCVADYSVLYNSASFSTFKCYGVSPTKLNDLCFTNVYADSFVIRGDEVRQIAPGQTGKIADYNYKLPDDFTGCVIAWNSNNLDSKVGGNYNYLYRLFRKSNLKPFERDISTEIYQAGSTPCNGVEGFNCYFPLQSYGFQPTNGVGYQPYRVVVLSFELLHAPATVCGPKKSTNLVKNKCVNFNFNGLTGTGVLTESNKKFLPFQQFGRDIADTTDAVRDPQTLEILDITPCSFGGVSVITPGTNTSNQVAVLYQGVNCTEVPVAIHADQLTPTWRVYSTGSNVFQTRAGCLIGAEHVNNSYECDIPIGAGICASYQTQTNSPRRARSVASQSIIAYTMSLGAENSVAYSNNSIAICTNFTISVTTEILPVSMTKTSVDCTMYICGDSTECSNLLLQYGSFCTQLNRALTGIAVEQDKNTQEVFAQVKQIYKTPPIKDFGGFNFSQILPDPSKPSKRSFIEDLLFNKVTLADAGFIKQYGDCLGDIAARDLICAQKFNGLTVLPPLLTDEMIAQYTSALLAGTITSGWTFGAGAALQIPFAMQMAYRFNGIGVTQNVLYENQKLIANQFNSAIGKIQDSLSSTASALGKLQDVVNQNAQALNTLVKQLSSNFGAISSVLNDILSRLDKVEAEVQIDRLITGRLQSLQTYVTQQLIRAAEIRASANLAATKMSECVLGQSKRVDFCGKGYHLMSFPQSAPHGVVFLHVTYVCAQEKNFTTAPAICHDGKAHFPREGVFVSNGTHWFVTQRNFYEPQIITTDNTFVSGNCDVVIGIVNNTVYDPLQPELDSGGSGYIPEAPRDGQAYVRKDGEWVLLSTFL

SEQ ID NO: 10180 - protein, 1177 aa, Artificial Sequence
  SARS-CoV-2/Congo/94/2020__EPI_ISL_417947 spike protein (1-1147)(P715C_P1069C) Foldon construct
MFVFLVLLPLVSSQCVNLTTRTQLPPAYTNSFTRGVYYPDKVFRSSVLHSTQDLFLPFFSNVTWFHAIHVSGTNGTKRFDNPVLPFNDGVYFASTEKSNIIRGWIFGTTLDSKTQSLLIVNNATNVVIKVCEFQFCNDPFLGVYYHKNNKSWMESEFRVYSSANNCTFEYVSQPFLMDLEGKQGNFKNLREFVFKNIDGYFKIYSKHTPINLVRDLPQGFSALEPLVDLPIGINITRFQTLLALHRSYLTPGDSSSGWTAGAAAYYVGYLQPRTFLLKYNENGTITDAVDCALDPLSETKCTLKSFTVEKGIYQTSNFRVQPTESIVRFPNITNLCPFGEVFNATRFASVYAWNRKRISNCVADYSVLYNSASFSTFKCYGVSPTKLNDLCFTNVYADSFVIRGDEVRQIAPGQTGKIADYNYKLPDDFTGCVIAWNSNNLDSKVGGNYNYLYRLFRKSNLKPFERDISTEIYQAGSTPCNGVEGFNCYFPLQSYGFQPTNGVGYQPYRVVVLSFELLHAPATVCGPKKSTNLVKNKCVNFNFNGLTGTGVLTESNKKFLPFQQFGRDIADTTDAVRDPQTLEILDITPCSFGGVSVITPGTNTSNQVAVLYQGVNCTEVPVAIHADQLTPTWRVYSTGSNVFQTRAGCLIGAEHVNNSYECDIPIGAGICASYQTQTNSPRRARSVASQSIIAYTMSLGAENSVAYSNNSIAICTNFTISVTTEILPVSMTKTSVDCTMYICGDSTECSNLLLQYGSFCTQLNRALTGIAVEQDKNTQEVFAQVKQIYKTPPIKDFGGFNFSQILPDPSKPSKRSFIEDILFNKVTLADAGFIKQYGDCLGDIAARDLICAQKFNGLTVLPPLLTDEMIAQYTSALLAGTITSGWTFGAGAALQIPFAMQMAYRFNGIGVTQNVLYENQKLIANQFNSAIGKIQDSLSSTASALGKLQDVVNQNAQALNTLVKQLSSNFGAISSVLNDILSRLDKVEAEVQIDRLITGRLQSLQTYVTQQLIRAAEIRASANLAATKMSECVLGQSKRVDFCGKGYHLMSFPQSAPHGVVFLHVTYVCAQEKNFTTAPAICHDGKAHFPREGVFVSNGTHWFVTQRNFYEPQIITTDNTFVSGNCDVVIGIVNNTVYDPLQPELDSGGSGYIPEAPRDGQAYVRKDGEWVLLSTFL

SEQ ID NO: 10181 - protein, 1177 aa, Artificial Sequence
  SARS-CoV-2/Congo/158/2020__EPI_ISL_417950 spike protein (1-1147)(P715C_P1069C) Foldon construct
MFVFLVLLPLVSSQCVNLTTRTQLPPAYTNSFTRGVYYPDKVFRSSVLHSTQDLFLPFFSNVTWFHAIHVSGTNGTKRFDNPVLPFNDGVYFASTEKSNIIRGWIFGTTLDSKTQSLLIVNNATNVVIKVCEFQFCNDPFLGVYYHKNNKSWMESEFRVYSSANNCTFEYVSQPFLMDLEGKQGNFKNLREFVFKNIDGYFKIYSKHTPINLVRDLPQGFSALEPLVDLPIGINITRFQTLLALHRSYLTPGDSSSGWTAGAAAYYVGYLQPRTFLLKYNENGTITDAVDCALDPLSETKCTLKSFTVEKGIYQTSNFRVQPTESIVRFPNITNLCPFGEVFNATRFASVYAWNRKRISNCVADYSVLYNSASFSTFKCYGVSPTKLNDLCFTNVYADSFVIRGDEVRQIAPGQTGKIADYNYKLPDDFTGCVIAWNSNNLDSKVGGNYNYLYRLFRKSNLKPFERDISTEIYQAGSTPCNGVEGFNCYFPLQSYGFQPTNGVGYQPYRVVVLSFELLHAPATVCGPKKSTNLVKNKCVNFNFNGLTGTGVLTESNKKFLPFQQFGRDIADTTDAVRDPQTLEILDITPCSFGGVSVITPGTNTSNQVAVLYQDVNCTEVPVAIHADQLTPTWRVYSTGSNVFQTRAGCLIGAEHVNNSYECDIPIGAGICASYQTQTNSPRRARSVASQSIIAYTMSLGAENSVAYSNNSIAICTNFTISVTTEILPVSMTKTSVDCTMYICGDSTECSNLLLQYGSFCTQLNRALTGIAVEQDKNTQEVFAQVKQIYKTPPIKDFGGFNFSQILPDPSKPSKRSFIEDLLFNKVTLADAGFIKQYGDCLGDIAARDLICAQKFNGLTVLPPLLTDEMIAQYTSALLAGTITSGWTFGAGAALQIPFAMQMAYRFNGIGVTQNVLYENQKLIANQFNSAIGKIQDSLSSTASALGKLQDVVNQNAQALNTLVKQLSSNFGAISSVLNDILSRLDKVEAEVQIDRLITGRLQSLQTYVTQQLIRAAEIRASANLAATKMSECVLGQSKRVDFCGKGYHLMSFPQSAPHGVVFLHVTYVCAQEKNFTTAPAICHDGKAHFPREGVFVSNGTHWFVTQRNFYEPQIITTDNTFLSGNCDVVIGIVNNTVYDPLQPELDSGGSGYIPEAPRDGQAYVRKDGEWVLLSTFL

SEQ ID NO: 10182 - protein, 1177 aa, Artificial Sequence
  SARS-CoV-2/USA/UT-00034/2020__EPI_ISL_417977 spike protein (1-1147)(P715C_P1069C) Foldon construct
MFVFLVLLPLVSSQCVNLTTRTQLPPAYTNSFTRGVYYPDKVFRSSVLHSTQDLFLPFFSNVTWFHAIHVSGTNGTKRFDNPVLPFNDGVYFASTEKSNIIRGWIFGTTLDSKTQSLLIVNNATNVVIKVCEFQFCNDPFLGVYYYKNNKSWMESEFRVYSSANNCTFEYVSQPFLMDLEGKQGNFKNLREFVFKNIDGYFKIYSKHTPINLVRDLPQGFSALEPLVDLPIGINITRFQTLLALHRSYLTPGDSSSGWTAGAAAYYVGYLQPRTFLLKYNENGTITDAVDCALDPLSETKCTLKSFTVEKGIYQTSNFRVQPTESIVRFPNITNLCPFGEVFNATRFASVYAWNRKRISNCVADYSVLYNSASFSTFKCYGVSPTKLNDLCFTNVYADSFVIRGDEVRQIAPGQTGKIADYNYKLPDDFTGCVIAWNSNNLDSKVGGNYNYLYRLFRKSNLKPFERDISTEIYQAGSTPCNGVEGFNCYFPLQSYGFQPTNGVGYQPYRVVVLSFELLHAPATVCGPKKSTNLVKNKCVNFNFNGLTGTGVLTESNKKFLPFQQFGRDIADTTDAVRDPQTLEILDITPCSFGGVSVITPGTNTSNQVAVLYQGVNCTEVPVAIHADQLTPTWRVYSTGSNVFQTRAGCLIGAEHVNNSYECDIPIGAGICASYQTQTNSPRRARSVASQSIIAYTMSLGAENSVAYSNNSIAICTNFTISVTTEILPVSMTKTSVDCTMYICGDSTECSNLLLQYGSFCTQLNRALTGIAVEQDKNTQEVFAQVKQIYKTPPIKDFGGFNFSQILPDPSKPSKRSFIEDLLFNKVTLADAGFIKQYGDCLGDIAARDLICAQKFNGLTVLPPLLTDEMIAQYTSALLAGTITSGWTFGAGAALQIPFAMQMAYRFNGIGVTQNVLYENQKLIANQFNSAIGKIQDSLSSTASALGKLQDVVNQNAQALNTLVKQLSSNFGAISSVLNDILSRLDKVEAEVQIDRLITGRLQSLQTYVTQQLIRAAEIRASANLAATKMSECVLGQSKRVDFCGKGYHLMSFPQSAPHGVVFLHVTYVCAQEKNFTTAPAICHDGKAHFPREGVFVSNGTHWFVTQRNFYEPQIITTDNTFVSGNCDVVIGIVNNTVYDPLQPELDSGGSGYIPEAPRDGQAYVRKDGEWVLLSTFL

SEQ ID NO: 10183 - protein, 1177 aa, Artificial Sequence
  SARS-CoV-2/USA/UT-00033/2020__EPI_ISL_417976 spike protein (1-1147)(P715C_P1069C) Foldon construct
MFVFLVLLPLVSSQCVNLTTRTQLPPAYTNSFTRGVYYPDKVFRSSVLHSTQDLFLPFFSNVTWFHAIHVSGTNGTKRFDNPVLPFNDGVYFASTEKSNIIRGWIFGTTLDSKTQSLLIVNNATNVVIKVCEFQFCNDPFLGVYYHKNNKSWMESEFRVYSSANNCTFEYVSQPFLMDLEGKQGNFKNLREFVFKNIDGYFKIYSKHTPINLVRDLPQGFSALEPLVDLPIGINITRFQTLLALHRSYLTPGDSSSGLTAGAAAYYVGYLQPRTFLLKYNENGTITDAVDCALDPLSETKCTLKSFTVEKGIYQTSNFRVQPTESIVRFPNITNLCPFGEVFNATRFASVYAWNRKRISNCVADYSVLYNSASFSTFKCYGVSPTKLNDLCFTNVYADSFVIRGDEVRQIAPGQTGKIADYNYKLPDDFTGCVIAWNSNNLDSKVGGNYNYLYRLFRKSNLKPFERDISTEIYQAGSTPCNGVEGFNCYFPLQSYGFQPTNGVGYQPYRVVVLSFELLHAPATVCGPKKSTNLVKNKCVNFNFNGLTGTGVLTESNKKFLPFQQFGRDIADTTDAVRDPQTLEILDITPCSFGGVSVITPGTNTSNQVAVLYQGVNCTEVPVAIHADQLTPTWRVYSTGSNVFQTRAGCLIGAEHVNNSYECDIPIGAGICASYQTQTNSPRRARSVASQSIIAYTMSLGAENSVAYSNNSIAICTNFTISVTTEILPVSMTKTSVDCTMYICGDSTECSNLLLQYGSFCTQLNRALTGIAVEQDKNTQEVFAQVKQIYKTPPIKDFGGFNFSQILPDPSKPSKRSFIEDLLFNKVTLADAGFIKQYGDCLGDIAARDLICAQKFNGLTVLPPLLTDEMIAQYTSALLAGTITSGWTFGAGAALQIPFAMQMAYRFNGIGVTQNVLYENQKLIANQFNSAIGKIQDSLSSTASALGKLQDVVNQNAQALNTLVKQLSSNFGAISSVLNDILSRLDKVEAEVQIDRLITGRLQSLQTYVTQQLIRAAEIRASANLAATKMSECVLGQSKRVDFCGKGYHLMSFPQSAPHGVVFLHVTYVCAQEKNFTTAPAICHDGKAHFPREGVFVSNGTHWFVTQRNFYEPQIITTDNTFVSGNCDVVIGIVNNTVYDPLQPELDSGGSGYIPEAPRDGQAYVRKDGEWVLLSTFL

SEQ ID NO: 10184 - protein, 1177 aa, Artificial Sequence
  SARS-CoV-2/USA/WI-13/2020__EPI_ISL_417516 spike protein (1-1147)(P715C_P1069C) Foldon construct
MFVFLVLLPLVSSQCVNLTTRTQLPPAYTNSFTRGVYYPDKVFRSSVLHSTQDLFLPFFSNVTWFHAIHVSGTNGTKRFDNPVLPFNDGVYFASTEKSNIIRGWIFGTTLDSKTQSLLIVNNATNVVIKVCEFQFCNDPFLGVYYHKNNKSWMESEFRVYSSANNCTFEYVSQPFLMDLEGKQGNFKNLREFVFKNIDGYFKIYSKHTPINLVRDLPQGFSALEPLVDLPIGINITRFQTLLALHRSYLTPGDSSSGWTAGAAAYYVGYLQPRTFLLKYNENGTITDAVDCALDPLSETKCTLKSFTVEKGIYQTSNFRVLPTESIVRFPNITNLCPFGEVFNATRFASVYAWNRKRISNCVADYSVLYNSASFSTFKCYGVSPTKLNDLCFTNVYADSFVIRGDEVRQIAPGQTGKIADYNYKLPDDFTGCVIAWNSNNLDSKVGGNYNYLYRLFRKSNLKPFERDISTEIYQAGSTPCNGVEGFNCYFPLQSYGFQPTNGVGYQPYRVVVLSFELLHAPATVCGPKKSTNLVKNKCVNFNFNGLTGTGVLTESNKKFLPFQQFGRDIADTTDAVRDPQTLEILDITPCSFGGVSVITPGTNTSNQVAVLYQGVNCTEVPVAIHADQLTPTWRVYSTGSNVFQTRAGCLIGAEHVNNSYECDIPIGAGICASYQTQTNSPRRARSVASQSIIAYTMSLGAENSVAYSNNSIAICTNFTISVTTEILPVSMTKTSVDCTMYICGDSTECSNLLLQYGSFCTQLNRALTGIAVEQDKNTQEVFAQVKQIYKTPPIKDFGGFNFSQILPDPSKPSKRSFIEDLLFNKVTLADAGFIKQYGDCLGDIAARDLICAQKFNGLTVLPPLLTDEMIAQYTSALLAGTITSGWTFGAGAALQIPFAMQMAYRFNGIGVTQNVLYENQKLIANQFNSAIGKIQDSLSSTASALGKLQDVVNQNAQALNTLVKQLSSNFGAISSVLNDILSRLDKVEAEVQIDRLITGRLQSLQTYVTQQLIRAAEIRASANLAATKMSECVLGQSKRVDFCGKGYHLMSFPQSAPHGVVFLHVTYVCAQEKNFTTAPAICHDGKAHFPREGVFVSNGTHWFVTQRNFYEPQIITTDNTFVSGNCDVVIGIVNNTVYDPLQPELDSGGSGYIPEAPRDGQAYVRKDGEWVLLSTFL

SEQ ID NO: 10185 - protein, 1176 aa, Artificial Sequence
  SARS-CoV-2/India/1-27/2020__EPI_ISL_413522 spike protein (1-1146)(P714C_P1068C) Foldon construct
MFVFLVLLPLVSSQCVNLTTRTQLPPAYTNSFTRGVYYPDKVFRSSVLHSTQDLFLPFFSNVTWFHAIHVSGTNGTKRFDNPVLPFNDGVYFASTEKSNIIRGWIFGTTLDSKTQSLLIVNNATNVVIKVCEFQFCNDPFLGVYHKNNKSWMESEFRVYSSANNCTFEYVSQPFLMDLEGKQGNFKNLREFVFKNIDGYFKIYSKHTPINLVRDLPQGFSALEPLVDLPIGINITRFQTLLALHRSYLTPGDSSSGWTAGAAAYYVGYLQPRTFLLKYNENGTITDAVDCALDPLSETKCTLKSFTVEKGIYQTSNFRVQPTESIVRFPNITNLCPFGEVFNATRFASVYAWNRKRISNCVADYSVLYNSASFSTFKCYGVSPTKLNDLCFTNVYADSFVIRGDEVIQIAPGQTGKIADYNYKLPDDFTGCVIAWNSNNLDSKVGGNYNYLYRLFRKSNLKPFERDISTEIYQAGSTPCNGVEGFNCYFPLQSYGFQPTNGVGYQPYRVVVLSFELLHAPATVCGPKKSTNLVKNKCVNFNFNGLTGTGVLTESNKKFLPFQQFGRDIADTTDAVRDPQTLEILDITPCSFGGVSVITPGTNTSNQVAVLYQDVNCTEVPVAIHADQLTPTWRVYSTGSNVFQTRAGCLIGAEHVNNSYECDIPIGAGICASYQTQTNSPRRARSVASQSIIAYTMSLGAENSVAYSNNSIAICTNFTISVTTEILPVSMTKTSVDCTMYICGDSTECSNLLLQYGSFCTQLNRALTGIAVEQDKNTQEVFAQVKQIYKTPPIKDFGGFNFSQILPDPSKPSKRSFIEDLLFNKVTLADAGFIKQYGDCLGDIAARDLICAQKFNGLTVLPPLLTDEMIAQYTSALLAGTITSGWTFGAGAALQIPFAMQMAYRFNGIGVTQNVLYENQKLIANQFNSAIGKIQDSLSSTASALGKLQDVVNQNAQALNTLVKQLSSNFGAISSVLNDILSRLDKVEAEVQIDRLITGRLQSLQTYVTQQLIRAAEIRASANLAATKMSECVLGQSKRVDFCGKGYHLMSFPQSAPHGVVFLHVTYVCAQEKNFTTAPAICHDGKAHFPREGVFVSNGTHWFVTQRNFYEPQIITTDNTFVSGNCDVVIGIVNNTVYDPLQPELDSGGSGYIPEAPRDGQAYVRKDGEWVLLSTFL

SEQ ID NO: 10186 - protein, 1171 aa, Artificial Sequence
  SARS-CoV-2/pangolin/Guangxi/P4L/2017__EPI_ISL_410538 spike protein (1-1141)(P709C_P1063C) Foldon construct
MFVFLFVLPLVSSQCVNLTTRTGIPPGYTNSSTRGVYYPDKVFRSSILHLTQDLFLPFFSNVTWFNTINYQGGFKKFDNPVLPFNDGVYFASTEKSNIIRGWIFGTTLDARTQSLLIVNNATNVVIKVCEFQFCTDPFLGVYYHNNNKTWVENEFRVYSSANNCTFEYISQPFLMDLEGKQGNFKNLREFVFKNVDGYFKIYSKHTPIDLVRDLPRGFAALEPLVDLPIGINITRFQTLLALHRSYLTPGNLESGWTTGAAAYYVGYLQQRTFLLSYNQNGTITDAVDCSLDPLSETKCTLKSLTVEKGIYQTSNFRVQPTISIVRFPNITNLCPFGEVFNASKFASVYAWNRKRISNCVADYSVLYNSTSFSTFKCYGVSPTKLNDLCFTNVYADSFVVKGDEVRQIAPGQTGVIADYNYKLPDDFTGCVIAWNSVKQDALTGGNYGYLYRLFRKSKLKPFERDISTEIYQAGSTPCNGQVGLNCYYPLERYGFHPTTGVNYQPFRVVVLSFELLNGPATVCGPKLSTTLVKDKCVNFNFNGLTGTGVLTTSKKQFLPFQQFGRDISDTTDAVRDPQTLEILDITPCSFGGVSVITPGTNTSNQVAVLYQDVNCTEVPMAIHAEQLTPAWRVYSAGANVFQTRAGCLVGAEHVNNSYECDIPVGAGICASYHSMSSLRSVNQRSIIAYTMSLGAENSVAYSNNSIAICTNFTISVTTEILPVSMTKTSVDCTMYICGDSIECSNLLLQYGSFCTQLNRALTGIAVEQDKNTQEVFAQVKQIYKTPPIKDFGGFNFSQILPDPSKPSKRSFIEDLLFNKVTLADAGFIKQYGDCLGDIAARDLICAQKFNGLTVLPPLLTDEMIAQYTSALLAGTITSGWTFGAGAALQIPFAMQMAYRFNGIGVTQNVLYENQKLIANQFNSAIGKIQDSLSSTASALGKLQDVVNQNAQALNTLVKQLSSNFGAISSVLNDILSRLDKVEAEVQIDRLITGRLQSLQTYVTQQLIRAAEIRASANLAATKMSECVLGQSKRVDFCGKGYHLMSFPQSAPHGVVFLHVTYVCAQEKNFTTAPAICHEGKAHFPREGVFVSNGTHWFITQRNFYEPQIITTDNTFVSGSCDVVIGIVNNTVYDPLQPELDSGGSGYIPEAPRDGQAYVRKDGEWVLLSTFL

SEQ ID NO: 10187 - protein, 1171 aa, Artificial Sequence
  SARS-CoV-2/pangolin/Guangxi/P5L/2017__EPI_ISL_410540 spike protein (1-1141)(P709C_P1063C) Foldon construct
MFVFLFVLPLVSSQCVNLTTRTGIPPGYTNSSTRGVYYPDKVFRSSILHLTQDLFLPFFSNVTWFNTINYQGGFKKFDNPVLPFNDGVYFASTEKSNIIRGWIFGTTLDARTQSLLIVNNATNVVIKVCEFQFCTDPFLGVYYHNNNKTWVENEFRVYSSANNCTFEYISQPFLMDLEGKQGNFKNLREFVFKNVDGYFKIYSKHTPIDLVRDLPRGFAALEPLVDLPIGINITRFQTLLALHRSYLTPGKLESGWTTGAAAYYVGYLQQRTFLLSYNQNGTITDAVDCSLDPLSETKCTLKSLTVEKGIYQTSNFRVQPTISIVRFPNITNLCPFGEVFNASKFASVYAWNRKRISNCVADYSVLYNSTSFSTFKCYGVSPTKLNDLCFTNVYADSFVVKGDEVRQIAPGQTGVIADYNYKLPDDFTGCVIAWNSVKQDALTGGNYGYLYRLFRKSKLKPFERDISTEIYQAGSTPCNGQVGLNCYYPLERYGFHPTTGVNYQPFRVVVLSFELLNGPATVCGPKLSTTLVKDKCVNFNFNGLTGTGVLTTSKKQFLPFQQFGRDISDTTDAVRDPQTLEILDITPCSFGGVSVITPGTNTSNQVAVLYQDVNCTEVPMAIHAEQLTPAWRVYSAGANVFQTRAGCLVGAEHVNNSYECDIPVGAGICASYHSMSSFRSVNQRSIIAYTMSLGAENSVAYSNNSIAICTNFTISVTTEILPVSMTKTSVDCTMYICGDSIECSNLLLQYGSFCTQLNRALTGIAVEQDKNTQEVFAQVKQIYKTPPIKDFGGFNFSQILPDPSKPSKRSFIEDLLFNKVTLADAGFIKQYGDCLGDIAARDLICAQKFNGLTVLPPLLTDEMIAQYTSALLAGTITSGWTFGAGAALQIPFAMQMAYRFNGIGVTQNVLYENQKLIANQFNSAIGKIQDSLSSTASALGKLQDVVNQNAQALNTLVKQLSSNFGAISSVLNDILSRLDKVEAEVQIDRLITGRLQSLQTYVTQQLIRAAEIRASANLAATKMSECVLGQSKRVDFCGKGYHLMSFPQSAPHGVVFLHVTYVCAQEKNFTTAPAICHEGKAHFPREGVFVSNGTHWFITQRNFYEPQIITTDNTFVSGSCDVVIGIVNNTVYDPLQPELDSGGSGYIPEAPRDGQAYVRKDGEWVLLSTFL

SEQ ID NO: 10188 - protein, 1171 aa, Artificial Sequence
  SARS-CoV-2/pangolin/Guangxi/P5E/2017__EPI_ISL_410541 spike protein (1-1141)(P709C_P1063C) Foldon construct
MFVFLFVLPLVSSQCVNLTTRTGIPPGYTNSSTRGVYYPDKVFRSSILHLTQDLFLPFFSNVTWFNTITYQGGSKKFDNPVLPFNDGVYFASTEKSNIIRGWIFGTTLDARTQSLLIVNNATNVVIKVCEFQFCTDPFLGVYYHNNNKTWVENEFRVYSSANNCTFEYISQPFLMDLEGKQGNFKNLREFVFKNVDGYFKIYSKHTPIDLVRDLPRGFAALEPLVDLPIGINITRFQTLLALHRSYLTPGKLESGWTTGAAAYYVGYLQQRTFLLSYNQNGTITDAVDCSLDPLSETKCTLKSLTVEKGIYQTSNFRVQPTISIVRFPNITNLCPFGEVFNASKFASVYAWNRKRISNCVADYSVLYNSTSFSTFKCYGVSPTKLNDLCFTNVYADSFVVKGDEVRQIAPGQTGVIADYNYKLPDDFTGCVIAWNSVKQDALTGDNYGYLYRLFRKSKLKPFERDISTEIYQAGSTPCNGQVGLNCYYPLERYGFHPTTGVNYQPFRVVVLSFELLNGPATVCGPKLSTTLVKDKCVNFNFNGLTGTGVLTTSKKQFLPFQQFGRDISDTTDAVRDPQTLEILDITPCSFGGVSVITPGTNTSNQVAVLYQDVNCTEVPMAIHAEQLTPAWRVYSAGANVFQTRAGCLVGAEHVNNSYECDIPVGAGICASYHSMSSFRSVNQRSIIAYTMSLGAENSVAYSNNSIAICTNFTISVTTEILPVSMTKTSVDCTMYICGDSIECSNLLLQYGSFCTQLNRALTGIAVEQDKNTQEVFAQVKQIYKTPPIKDFGGFNFSQILPDPSKPSKRSFIEDLLFNKVTLADAGFIKQYGDCLGDIAARDLICAQKFNGLTVLPPLLTDEMIAQYTSALLAGTITSGWTFGAGAALQIPFAMQMAYRFNGIGVTQNVLYENQKLIANQFNSAIGKIQDSLSSTASALGKLQDVVNQNAQALNTLVKQLSSNFGAISSVLNDILSRLDKVEAEVQIDRLITGRLQSLQTYVTQQLIRAAEIRASANLAATKMSECVLGQSKRVDFCGKGYHLMSFPQSAPHGVVFLHVTYVCAQEKNFTTAPAICHEGKAHFPREGVFVSNGTHWFITQRNFYEPQIITTDNTFVSGSCDVVIGIVNNTVYDPLQPELDSGGSGYIPEAPRDGQAYVRKDGEWVLLSTFL

SEQ ID NO: 10189 - protein, 1169 aa, Artificial Sequence
  SARS-CoV-2/pangolin/Guangxi/P1E/2017__EPI_ISL_410539 spike protein (1-1139)(P707C_P1061C) Foldon construct
MFVFLFVLPLVSSQCVNLTTRTGIQPGYTNSSTRGVYYPDKVFRSSILHLTQDLFLPFFSNVTWFNTINYQGGFKKFDNPVLPFNDGVYFASTEKSNIIRGWIFGTTLDARTQSLLIVNNATNVVIKVCEFQFCTDPFLGVYYHNNNKTWVENEFRVYSSANNCTFEYISQPFLMDLEGKQGNFKNLREFVFKNVDGYFKIYSKHTPIDLVRDLPRGFAALEPLVDLPIGINITRFQTLLALHRSYLTPGKLESGWTTGAAAYYVGYLQQRTFLLSYNQNGTITDAVDCSLDPLSETKCTLKSLTVEKGIYQTSNFRVQPTISIVRFPNITNLCPFGEVFNASKFASVYAWNRKRISNCVADYSVLYNSTSFSTFKCYGVSPTKLNDLCFTNVYADSFVVKGDEVRQIAPGQTGVIADYNYKLPDDFTGCVIAWNSVKQDALTGGNYLYRLFRKSKLKPFERDISTEIYQAGSTPCNGQVGLNCYYPLERYGFHPTTGVNYQPFRVVVLSFELLNGPATVCGPKLSTTLVKDKCVNFNFNGLTGTGVLTTSKKQFLPFQQFGRDISDTTDAVRDPQTLEILDITPCSFGGVSVITPGTNTSNQVAVLYQDVNCTEVPMAIHAEQLTPAWRVYSAGANVFQTRAGCLVGAEHVNNSYECDIPVGAGICASYHSMSSLRSVNQRSIIAYTMSLGAENSVAYSNNSIAICTNFTISVTTEILPVSMTKTSVDCTMYICGDSIECSNLLLQYGSFCTQLNRALTGIAVEQDKNTQEVFAQVKQIYKTPPIKDFGGFNFSQILPDPSKPSKRSFIEDLLFNKVTLADAGFIKQYGDCLGDIAARDLICAQKFNGLTVLPPLLTDEMIAQYTSALLAGTITSGWTFGAGAALQIPFAMQMAYRFNGIGVTQNVLYENQKLIANQFNSAIGKIQDSLSSTASALGKLQDVVNQNAQALNTLVKQLSSNFGAISSVLNDILSRLDKVEAEVQIDRLITGRLQSLQTYVTQQLIRAAEIRASANLAATKMSECVLGQSKRVDFCGKGYHLMSFPQSAPHGVVFLHVTYVCAQEKNFTTAPAICHEGKAHFPREGVFVSNGTHWFITQRNFYEPQIITTDNTFVSGSCDVVIGIVNNTVYDPLQPELDSGGSGYIPEAPRDGQAYVRKDGEWVLLSTFL

SEQ ID NO: 10190 - protein, 1177 aa, Artificial Sequence
  SARS-CoV-2/Wuhan/WIV05/2019__EPI_ISL_402128 spike protein (1-1147)(G889C_L1034C) Foldon construct
MFVFLVLLPLVSSQCVNLTTRTQLPPAYTNSFTRGVYYPDKVFRSSVLHSTQDLFLPFFSNVTWFHAIHVSGTNGTKRFDNPVLPFNDGVYFASTEKSNIIRGWIFGTTLDSKTQSLLIVNNATNVVIKVCEFQFCNDPFLGVYYHKNNKSWMESEFRVYSSANNCTFEYVSQPFLMDLEGKQGNFKNLREFVFKNIDGYFKIYSKHTPINLVRDLPQGFSALEPLVDLPIGINITRFQTLLALHRSYLTPGDSSSGWTAGAAAYYVGYLQPRTFLLKYNENGTITDAVDCALDPLSETKCTLKSFTVEKGIYQTSNFRVQPTESIVRFPNITNLCPFGEVFNATRFASVYAWNRKRISNCVADYSVLYNSASFSTFKCYGVSPTKLNDLCFTNVYADSFVIRGDEVRQIAPGQTGKIADYNYKLPDDFTGCVIAWNSNNLDSKVGGNYNYLYRLFRKSNLKPFERDISTEIYQAGSTPCNGVEGFNCYFPLQSYGFQPTNGVGYQPYRVVVLSFELLHAPATVCGPKKSTNLVKNKCVNFNFNGLTGTGVLTESNKKFLPFQQFGRDIADTTDAVRDPQTLEILDITPCSFGGVSVITPGTNTSNQVAVLYQDVNCTEVPVAIHADQLTPTWRVYSTGSNVFQTRAGCLIGAEHVNNSYECDIPIGAGICASYQTQTNSPRRARSVASQSIIAYTMSLGAENSVAYSNNSIAIPTNFTISVTTEILPVSMTKTSVDCTMYICGDSTECSNLLLQYGSFCTQLNRALTGIAVEQDKNTQEVFAQVKQIYKTPPIKDFGGFNFSQILPDPSKPSKRSFIEDLLFNKVTLADAGFIKQYGDCLGDIAARDLICAQKFNGLTVLPPLLTDEMIAQYTSALLAGTITSGWTFCAGAALQIPFAMQMAYRFNGIGVTQNVLYENQKLIANQFNSAIGKIQDSLSSTASALGKLQDVVNQNAQALNTLVKQLSSNFGAISSVLNDILSRLDKVEAEVQIDRLITGRLQSLQTYVTQQLIRAAEIRASANLAATKMSECVCGQSKRVDFCGKGYHLMSFPQSAPHGVVFLHVTYVPAQEKNFTTAPAICHDGKAHFPREGVFVSNGTHWFVTQRNFYEPQIITTDNTFVSGNCDVVIGIVNNTVYDPLQPELDSGGSGYIPEAPRDGQAYVRKDGEWVLLSTFL

SEQ ID NO: 10191 - protein, 1173 aa, Artificial Sequence
  SARS-CoV-2/bat/Yunnan/RaTG13/2013__EPI_ISL_402131 spike protein (1-1143)(G885C_L1030C) Foldon construct
MFVFLVLLPLVSSQCVNLTTRTQLPPAYTNSSTRGVYYPDKVFRSSVLHLTQDLFLPFFSNVTWFHAIHVSGTNGIKRFDNPVLPFNDGVYFASTEKSNIIRGWIFGTTLDSKTQSLLIVNNATNVVIKVCEFQFCNDPFLGVYYHKNNKSWMESEFRVYSSANNCTFEYVSQPFLMDLEGKQGNFKNLREFVFKNIDGYFKIYSKHTPINLVRDLPPGFSALEPLVDLPIGINITRFQTLLALHRSYLTPGDSSSGWTAGAAAYYVGYLQPRTFLLKYNENGTITDAVDCALDPLSETKCTLKSFTVEKGIYQTSNFRVQPTDSIVRFPNITNLCPFGEVFNATTFASVYAWNRKRISNCVADYSVLYNSTSFSTFKCYGVSPTKLNDLCFTNVYADSFVITGDEVRQIAPGQTGKIADYNYKLPDDFTGCVIAWNSKHIDAKEGGNFNYLYRLFRKANLKPFERDISTEIYQAGSKPCNGQTGLNCYYPLYRYGFYPTDGVGHQPYRVVVLSFELLNAPATVCGPKKSTNLVKNKCVNFNFNGLTGTGVLTESNKKFLPFQQFGRDIADTTDAVRDPQTLEILDITPCSFGGVSVITPGTNASNQVAVLYQDVNCTEVPVAIHADQLTPTWRVYSTGSNVFQTRAGCLIGAEHVNNSYECDIPIGAGICASYQTQTNSRSVASQSIIAYTMSLGAENSVAYSNNSIAIPTNFTISVTTEILPVSMTKTSVDCTMYICGDSTECSNLLLQYGSFCTQLNRALTGIAVEQDKNTQEVFAQVKQIYKTPPIKDFGGFNFSQILPDPSKPSKRSFIEDLLFNKVTLADAGFIKQYGDCLGDIAARDLICAQKFNGLTVLPPLLTDEMIAQYTSALLAGTITSGWTFCAGAALQIPFAMQMAYRFNGIGVTQNVLYENQKLIANQFNSAIGKIQDSLSSTASALGKLQDVVNQNAQALNTLVKQLSSNFGAISSVLNDILSRLDKVEAEVQIDRLITGRLQSLQTYVTQQLIRAAEIRASANLAATKMSECVCGQSKRVDFCGKGYHLMSFPQSAPHGVVFLHVTYVPAQEKNFTTAPAICHDGKAHFPREGVFVSNGTHWFVTQRNFYEPQIITTDNTFVSGSCDVVIGIVNNTVYDPLQPELDSGGSGYIPEAPRDGQAYVRKDGEWVLLSTFL

SEQ ID NO: 10192 - protein, 1177 aa, Artificial Sequence
  SARS-CoV-2/Wuhan/HBCDC-HB-01/2019__EPI_ISL_402132 spike protein (1-1147)(G889C_L1034C) Foldon construct
MFVFLVLLPLVSSQCVNLTTRTQLPPAYTNSITRGVYYPDKVFRSSVLHSTQDLFLPFFSNVTWFHAIHVSGTNGTKRFDNPVLPFNDGVYFASTEKSNIIRGWIFGTTLDSKTQSLLIVNNATNVVIKVCEFQFCNDPFLGVYYHKNNKSWMESEFRVYSSANNCTFEYVSQPFLMDLEGKQGNFKNLREFVFKNIDGYFKIYSKHTPINLVRDLPQGFSALEPLVDLPIGINITRFQTLLALHRSYLTPGDSSSGWTAGAAAYYVGYLQPRTFLLKYNENGTITDAVDCALDPLSETKCTLKSFTVEKGIYQTSNFRVQPTESIVRFPNITNLCPFGEVFNATRFASVYAWNRKRISNCVADYSVLYNSASFSTFKCYGVSPTKLNDLCFTNVYADSFVIRGDEVRQIAPGQTGKIADYNYKLPDDFTGCVIAWNSNNLDSKVGGNYNYLYRLFRKSNLKPFERDISTEIYQAGSTPCNGVEGFNCYFPLQSYGFQPTNGVGYQPYRVVVLSFELLHAPATVCGPKKSTNLVKNKCVNFNFNGLTGTGVLTESNKKFLPFQQFGRDIADTTDAVRDPQTLEILDITPCSFGGVSVITPGTNTSNQVAVLYQDVNCTEVPVAIHADQLTPTWRVYSTGSNVFQTRAGCLIGAEHVNNSYECDIPIGAGICASYQTQTNSPRRARSVASQSIIAYTMSLGAENSVAYSNNSIAIPTNFTISVTTEILPVSMTKTSVDCTMYICGDSTECSNLLLQYGSFCTQLNRALTGIAVEQDKNTQEVFAQVKQIYKTPPIKDFGGFNFSQILPDPSKPSKRSFIEDLLFNKVTLADAGFIKQYGDCLGDIAARDLICAQKFNGLTVLPPLLTDEMIAQYTSALLAGTITSGWTFCAGAALQIPFAMQMAYRFNGIGVTQNVLYENQKLIANQFNSAIGKIQDSLSSTASALGKLQDVVNQNAQALNTLVKQLSSNFGAISSVLNDILSRLDKVEAEVQIDRLITGRLQSLQTYVTQQLIRAAEIRASANLAATKMSECVCGQSKRVDFCGKGYHLMSFPQSAPHGVVFLHVTYVPAQEKNFTTAPAICHDGKAHFPREGVFVSNGTHWFVTQRNFYEPQIITTDNTFVSGNCDVVIGIVNNTVYDPLQPELDSGGSGYIPEAPRDGQAYVRKDGEWVLLSTFL

SEQ ID NO: 10193 - protein, 1177 aa, Artificial Sequence
  SARS-CoV-2/Guangdong/20SF028/2020__EPI_ISL_403936 spike protein (1-1147)(G889C_L1034C) Foldon construct
MFVFLVLLPLVSSQCVNLTTRTQLPPAYTNSFTRGVYYPDKVFRSSVLYSTQDLFLPFFSNVTWFHAIHVSGTNGTKRFDNPVLPFNDGVYFASTEKSNIIRGWIFGTTLDSKTQSLLIVNNATNVVIKVCEFQFCNDPFLGVYYHKNNKSWMESEFRVYSSANNCTFEYVSQPFLMDLEGKQGNFKNLREFVFKNIDGYFKIYSKHTPINLVRDLPQGFSALEPLVDLPIGINITRFQTLLALHRSYLTPGDSSSGWTAGAAAYYVGYLQPRTFLLKYNENGTITDAVDCALDPLSETKCTLKSFTVEKGIYQTSNFRVQPTESIVRFPNITNLCPFGEVFNATRFASVYAWNRKRISNCVADYSVLYNSASFSTFKCYGVSPTKLNDLCFTNVYADSFVIRGDEVRQIAPGQTGKIADYNYKLPDDFTGCVIAWNSNNLDSKVGGNYNYLYRLFRKSNLKPFERDISTEIYQAGSTPCNGVEGFNCYFPLQSYGFQPTNGVGYQPYRVVVLSFELLHAPATVCGPKKSTNLVKNKCVNFNFNGLTGTGVLTESNKKFLPFQQFGRDIADTTDAVRDPQTLEILDITPCSFGGVSVITPGTNTSNQVAVLYQDVNCTEVPVAIHADQLTPTWRVYSTGSNVFQTRAGCLIGAEHVNNSYECDIPIGAGICASYQTQTNSPRRARSVASQSIIAYTMSLGAENSVAYSNNSIAIPTNFTISVTTEILPVSMTKTSVDCTMYICGDSTECSNLLLQYGSFCTQLNRALTGIAVEQDKNTQEVFAQVKQIYKTPPIKDFGGFNFSQILPDPSKPSKRSFIEDLLFNKVTLADAGFIKQYGDCLGDIAARDLICAQKFNGLTVLPPLLTDEMIAQYTSALLAGTITSGWTFCAGAALQIPFAMQMAYRFNGIGVTQNVLYENQKLIANQFNSAIGKIQDSLSSTASALGKLQDVVNQNAQALNTLVKQLSSNFGAISSVLNDILSRLDKVEAEVQIDRLITGRLQSLQTYVTQQLIRAAEIRASANLAATKMSECVCGQSKRVDFCGKGYHLMSFPQSAPHGVVFLHVTYVPAQEKNFTTAPAICHDGKAHFPREGVFVSNGTHWFVTQRNFYEPQIITTDNTFVSGNCDVVIGIVNNTVYDPLQPELDSGGSGYIPEAPRDGQAYVRKDGEWVLLSTFL

SEQ ID NO: 10194 - protein, 1177 aa, Artificial Sequence
  SARS-CoV-2/Shenzhen/SZTH-001/2020__EPI_ISL_406592 spike protein (1-1147)(G889C_L1034C) Foldon construct
MFVFLVLLPLVSSQCVNLTTRTQLPPAYTNSFTRGVYYPDKVFRSSVLHSTQDLFLPFFSNVTWFHAIHVSGTNGTKRFDNPVLPFNDGVYFASTEKSNIIRGWIFGTTLDSKTQSLLIVNNATNVVIKVCEFQFCNDPFLGVYYHKNNKSWMESEFRVYSSANNCTFEYVSQPFLMDLEGKQGNFKNLREFVFKNIDGYFKIYSKHTPINLVRDLPQGFSALEPLVDLPIGINITRFQTLLALHRSYLTPGDSSSGWTAGAAAYYVGYLQPRTFLLKYNENGTITDAVDCALDPLSETKCTLKSFTVEKGIYQTSNFRVQPTESIVRFPNITNLCPFGEVFNATRFASVYAWNRKRISNCVADYSVLYNSASFSTFKCYGVSPTKLNDLCFTNVYADSFVIRGDEVRQIAPGQTGKIADYNYKLPDDFTGCVIAWNSNNLDSKVGGNYNYLYRLFRKSNLKPFERDISTEIYQAGSTPCNGVEGFNCYFPLQSYGFQPTNGVGYQPYRVVVLSFELLHAPATVCGPKKSTNLVKNKCVNFNFNGLTGTGVLTESNKKFLPFQQFGRDIADTTDAVRDPQTLEILDITPCSFGGVSVITPGTNTSNQVAVLYQDVNCTEVPVAIHADQLTPTWRVYSTGSNVFQTRAGCLIGAEHVNNSYECDIPIGAGICASYQTQTNSPRRARSVASQSIIAYTMSLGAENSVAYSNNSIAIPTNFTISVTTEILPVSMTKTSVDCTMYICGDSTECSNLLLQYGSFCTQLNRALTGIAVEQDKNTQEVFAQVKQIYKTPPIKDFGGFNFSQILPDPSKPSKRSFIEDLLFNKVTLADAGFIKQYGDCLGDIAARDLICAQKFNGLTVLPPLLTDEMIAQYTSALLAGTITSGWTFCAGAALQIPFAMQMAYRFNGIGVTQNVLYENQKLIANQFNSAIGKIQDSLSSTASALGKLQDVVNQNAQALNTLVKQLSSNFGAISSVLNDILSRLDKVEAEVQIDRLITGRLQSLQTYVTQQLIRAAEIRASANLAATKMSECVCGQSKRVDFCGKGYHLMSFPQSAPHGVVFLHVTYVPAQEKNFTTAPAICHDGKAHFPREGVFVSNGTHWFVTQRNFYEPQIITTDNTFVSGNCDVLIGIVNNTVYDPLQPELDSGGSGYIPEAPRDGQAYVRKDGEWVLLSTFL

SEQ ID NO: 10195 - protein, 1177 aa, Artificial Sequence
  SARS-CoV-2/Shenzhen/SZTH-004/2020__EPI_ISL_406595 spike protein (1-1147)(G889C_L1034C) Foldon construct
MFVFLVLLPLVSSQCVNLTTRTQLPPAYTNSFTRGVYYPDKVFRSSVLHSTQDLFLPFFSNVTWFHAIHVSGTNGTKRFDNPVLPFNDGVYFASTEKSNIIRGWIFGTTLDSKTQSLLIVNNATNVVIKVCEFQFCNDPFLGVYYHKNNKSWMESEFRVYSSANNCTFEYVSQPFLMDLEGKQGNFKNLREFVFKNIDGYFKIYSKHTPINLVRDLPQGFSALEPLVDLPIGINITRFQTLLALHRSYLTPGDSSSGWTAGAAAYYVGYLQPRTFLLKYNENGTITDAVDCALDPLSETKCTLKSFTVEKGIYQTSNFRVQPTESIVRFPNITNLCPFGEVFNATRFASVYAWDRKRISNCVAYYSVLYNSASFSTFKCYGVSPTKLNDLCFTNVYADSFVIRGDEVRQIAPGQTGKIADYNYKLPDDFTGCVIAWNSNNLDSKVGGNYNYLYRLFRKSNLKPFERDISTEIYQAGSTPCNGVEGFNCYFPLQSYGFQPTNGVGYQPYRVVVLSFELLHAPATVCGPKKSTNLVKNKCVNFNFNGLTGTGVLTESNKKFLPFQQFGRDIADTTDAVRDPQTLEILDITPCSFGGVSVITPGTNTSNQVAVLYQDVNCTEVPVAIHADQLTPTWRVYSTGSNVFQTRAGCLIGAEHVNNSYECDIPIGAGICASYQTQTNSPRRARSVASQSIIAYTMSLGAENSVAYSNNSIAIPTNFTISVTTEILPVSMTKTSVDCTMYICGDSTECSNLLLQYGSFCTQLNRALTGIAVEQDKNTQEVFAQVKQIYKTPPIKDFGGFNFSQILPDPSKPSKRSFIEDLLFNKVTLADAGFIKQYGDCLGDIAARDLICAQKFNGLTVLPPLLTDEMIAQYTSALLAGTITSGWTFCAGAALQIPFAMQMAYRFNGIGVTQNVLYENQKLIANQFNSAIGKIQDSLSSTASALGKLQDVVNQNAQALNTLVKQLSSNFGAISSVLNDILSRLDKVEAEVQIDRLITGRLQSLQTYVTQQLIRAAEIRASANLAATKMSECVCGQSKRVDFCGKGYHLMSFPQSAPHGVVFLHVTYVPAQEKNFTTAPAICHDGKAHFPREGVFVSNGTHWFVTQRNFYEPQIITTDNTFVSGNCDVVIGIVNNTVYDPLQPELDSGGSGYIPEAPRDGQAYVRKDGEWVLLSTFL

SEQ ID NO: 10196 - protein, 1177 aa, Artificial Sequence
  SARS-CoV-2/France/IDF0372/2020__EPI_ISL_406596 spike protein (1-1147)(G889C_L1034C) Foldon construct
MFVFLVLLPLVSSQCVNLTTRTQLPPAYTNSFTRGVYYPDKVFRSSVLHSTQDLFLPFFSNVTWFHAIHVSGTNGTKRFDNPVLPFNDGVYFASTEKSNIIRGWIFGTTLDSKTQSLLIVNNATNVVIKVCEFQFCNDPFLGVYYHKNNKSWMESEFRVYSSANNCTFEYVSQPFLMDLEGKQGNFKNLREFVFKNIDGYFKIYSKHTPINLVRDLPQGFSALEPLVDLPIGINITRFQTLLALHRSYLTPGDSSSGWTAGAAAYYVGYLQPRTFLLKYNENGTITDAVDCALDPLSETKCTLKSFTVEKGIYQTSNFRVQPTESIVRFPNITNLCPFGEVFNATRFASVYAWNRKRISNCVADYSFLYNSASFSTFKCYGVSPTKLNDLCFTNVYADSFVIRGDEVRQIAPGQTGKIADYNYKLPDDFTGCVIAWNSNNLDSKVGGNYNYLYRLFRKSNLKPFERDISTEIYQAGSTPCNGVEGFNCYFPLQSYGFQPTNGVGYQPYRVVVLSFELLHAPATVCGPKKSTNLVKNKCVNFNFNGLTGTGVLTESNKKFLPFQQFGRDIADTTDAVRDPQTLEILDITPCSFGGVSVITPGTNTSNQVAVLYQDVNCTEVPVAIHADQLTPTWRVYSTGSNVFQTRAGCLIGAEHVNNSYECDIPIGAGICASYQTQTNSPRRARSVASQSIIAYTMSLGAENSVAYSNNSIAIPTNFTISVTTEILPVSMTKTSVDCTMYICGDSTECSNLLLQYGSFCTQLNRALTGIAVEQDKNTQEVFAQVKQIYKTPPIKDFGGFNFSQILPDPSKPSKRSFIEDLLFNKVTLADAGFIKQYGDCLGDIAARDLICAQKFNGLTVLPPLLTDEMIAQYTSALLAGTITSGWTFCAGAALQIPFAMQMAYRFNGIGVTQNVLYENQKLIANQFNSAIGKIQDSLSSTASALGKLQDVVNQNAQALNTLVKQLSSNFGAISSVLNDILSRLDKVEAEVQIDRLITGRLQSLQTYVTQQLIRAAEIRASANLAATKMSECVCGQSKRVDFCGKGYHLMSFPQSAPHGVVFLHVTYVPAQEKNFTTAPAICHDGKAHFPREGVFVSNGTHWFVTQRNFYEPQIITTDNTFVSGNCDVVIGIVNNTVYDPLQPELDSGGSGYIPEAPRDGQAYVRKDGEWVLLSTFL

SEQ ID NO: 10197 - protein, 1177 aa, Artificial Sequence
  SARS-CoV-2/Australia/VIC01/2020__EPI_ISL_406844 spike protein (1-1147)(G889C_L1034C) Foldon construct
MFVFLVLLPLVSSQCVNLTTRTQLPPAYTNSFTRGVYYPDKVFRSSVLHSTQDLFLPFFSNVTWFHAIHVSGTNGTKRFDNPVLPFNDGVYFASTEKSNIIRGWIFGTTLDSKTQSLLIVNNATNVVIKVCEFQFCNDPFLGVYYHKNNKSWMESEFRVYSSANNCTFEYVSQPFLMDLEGKQGNFKNLREFVFKNIDGYFKIYSKHTPINLVRDLPQGFSALEPLVDLPIGINITRFQTLLALHRRYLTPGDSSSGWTAGAAAYYVGYLQPRTFLLKYNENGTITDAVDCALDPLSETKCTLKSFTVEKGIYQTSNFRVQPTESIVRFPNITNLCPFGEVFNATRFASVYAWNRKRISNCVADYSVLYNSASFSTFKCYGVSPTKLNDLCFTNVYADSFVIRGDEVRQIAPGQTGKIADYNYKLPDDFTGCVIAWNSNNLDSKVGGNYNYLYRLFRKSNLKPFERDISTEIYQAGSTPCNGVEGFNCYFPLQSYGFQPTNGVGYQPYRVVVLSFELLHAPATVCGPKKSTNLVKNKCVNFNFNGLTGTGVLTESNKKFLPFQQFGRDIADTTDAVRDPQTLEILDITPCSFGGVSVITPGTNTSNQVAVLYQDVNCTEVPVAIHADQLTPTWRVYSTGSNVFQTRAGCLIGAEHVNNSYECDIPIGAGICASYQTQTNSPRRARSVASQSIIAYTMSLGAENSVAYSNNSIAIPTNFTISVTTEILPVSMTKTSVDCTMYICGDSTECSNLLLQYGSFCTQLNRALTGIAVEQDKNTQEVFAQVKQIYKTPPIKDFGGFNFSQILPDPSKPSKRSFIEDLLFNKVTLADAGFIKQYGDCLGDIAARDLICAQKFNGLTVLPPLLTDEMIAQYTSALLAGTITSGWTFCAGAALQIPFAMQMAYRFNGIGVTQNVLYENQKLIANQFNSAIGKIQDSLSSTASALGKLQDVVNQNAQALNTLVKQLSSNFGAISSVLNDILSRLDKVEAEVQIDRLITGRLQSLQTYVTQQLIRAAEIRASANLAATKMSECVCGQSKRVDFCGKGYHLMSFPQSAPHGVVFLHVTYVPAQEKNFTTAPAICHDGKAHFPREGVFVSNGTHWFVTQRNFYEPQIITTDNTFVSGNCDVVIGIVNNTVYDPLQPELDSGGSGYIPEAPRDGQAYVRKDGEWVLLSTFL

SEQ ID NO: 10198 - protein, 1177 aa, Artificial Sequence
  SARS-CoV-2/Germany/BavPat1/2020__EPI_ISL_406862 spike protein (1-1147)(G889C_L1034C) Foldon construct
MFVFLVLLPLVSSQCVNLTTRTQLPPAYTNSFTRGVYYPDKVFRSSVLHSTQDLFLPFFSNVTWFHAIHVSGTNGTKRFDNPVLPFNDGVYFASTEKSNIIRGWIFGTTLDSKTQSLLIVNNATNVVIKVCEFQFCNDPFLGVYYHKNNKSWMESEFRVYSSANNCTFEYVSQPFLMDLEGKQGNFKNLREFVFKNIDGYFKIYSKHTPINLVRDLPQGFSALEPLVDLPIGINITRFQTLLALHRSYLTPGDSSSGWTAGAAAYYVGYLQPRTFLLKYNENGTITDAVDCALDPLSETKCTLKSFTVEKGIYQTSNFRVQPTESIVRFPNITNLCPFGEVFNATRFASVYAWNRKRISNCVADYSVLYNSASFSTFKCYGVSPTKLNDLCFTNVYADSFVIRGDEVRQIAPGQTGKIADYNYKLPDDFTGCVIAWNSNNLDSKVGGNYNYLYRLFRKSNLKPFERDISTEIYQAGSTPCNGVEGFNCYFPLQSYGFQPTNGVGYQPYRVVVLSFELLHAPATVCGPKKSTNLVKNKCVNFNFNGLTGTGVLTESNKKFLPFQQFGRDIADTTDAVRDPQTLEILDITPCSFGGVSVITPGTNTSNQVAVLYQGVNCTEVPVAIHADQLTPTWRVYSTGSNVFQTRAGCLIGAEHVNNSYECDIPIGAGICASYQTQTNSPRRARSVASQSIIAYTMSLGAENSVAYSNNSIAIPTNFTISVTTEILPVSMTKTSVDCTMYICGDSTECSNLLLQYGSFCTQLNRALTGIAVEQDKNTQEVFAQVKQIYKTPPIKDFGGFNFSQILPDPSKPSKRSFIEDLLFNKVTLADAGFIKQYGDCLGDIAARDLICAQKFNGLTVLPPLLTDEMIAQYTSALLAGTITSGWTFCAGAALQIPFAMQMAYRFNGIGVTQNVLYENQKLIANQFNSAIGKIQDSLSSTASALGKLQDVVNQNAQALNTLVKQLSSNFGAISSVLNDILSRLDKVEAEVQIDRLITGRLQSLQTYVTQQLIRAAEIRASANLAATKMSECVCGQSKRVDFCGKGYHLMSFPQSAPHGVVFLHVTYVPAQEKNFTTAPAICHDGKAHFPREGVFVSNGTHWFVTQRNFYEPQIITTDNTFVSGNCDVVIGIVNNTVYDPLQPELDSGGSGYIPEAPRDGQAYVRKDGEWVLLSTFL

SEQ ID NO: 10199 - protein, 1177 aa, Artificial Sequence
  SARS-CoV-2/Wuhan/HBCDC-HB-02/2020__EPI_ISL_412978 spike protein (1-1147)(G889C_L1034C) Foldon construct
MFVFLVLLPLVSSQCVNLTTRTQLPPAYTNSFTRGVYYPDKVFRSSVLHSTQDLFLPFFSNVTWFHAIHVSGTNGTKRFDNPVLPFNDGVYFASTEKSNIIRGWIFGTTLDSKTQSLLIVNNATNVVIKVCEFQFCNDPFLGVYYHKNNKSWMESEFRVYSSANNCTFEYVSQPFLMDLEGKQGNFKNLREFVFKNIDGYFKIYSKHTPINLVRDLPQGFSALEPLVDLPIGINITRFQTLLALHRSYLTPGDSSSGWTAGAAAYYVGYLQPRTFLLKYNENGTITDAVDCALDPLSETKCTLKSFTVEKGIYQTSNFRVQPTESIVRFPNITNLCPFGEVFNATRFASVYAWNRKRISNCVADYSVLYNSASFSTFKCYGVSPTKLNDLCFTNVYADSFVIRGDEVRQIAPGQTGKIADYNYKLPDDFTGCVIAWNSNNLDSKVGGNYNYLYRLFRKSNLKPFERDISTEIYQAGSTPCNGVEGFNCYFPLQSYGFQPTNGVGYQPYRVVVLSFELLHAPATVCGPKKSTNLVKNKCVNFNFNGLTGTGVLTESNKKFLPFQQFGRDIADTTDAVRDPQTLEILDITPCSFGGVSVITPGTNTSNQVAVLYQDVNCTEVPVAIHADQLTPTWRVYSTGSNVFQTRAGCLIGAEHVNNSYECDIPIGAGICASYQTQTNSPRRARSVASQSIIAYTMSLGAENSVAYSNNSIAIPTNFTISVTTEILPVSMTKTSVDCTMYICGDSTECSNFLLQYGSFCTQLNRALTGIAVEQDKNTQEVFAQVKQIYKTPPIKDFGGFNFSQILPDPSKPSKRSFIEDLLFNKVTLADAGFIKQYGDCLGDIAARDLICAQKFNGLTVLPPLLTDEMIAQYTSALLAGTITSGWTFCAGAALQIPFAMQMAYRFNGIGVTQNVLYENQKLIANQFNSAIGKIQDSLSSTASALGKLQDVVNQNAQALNTLVKQLSSNFGAISSVLNDILSRLDKVEAEVQIDRLITGRLQSLQTYVTQQLIRAAEIRASANLAATKMSECVCGQSKRVDFCGKGYHLMSFPQSAPHGVVFLHVTYVPAQEKNFTTAPAICHDGKAHFPREGVFVSNGTHWFVTQRNFYEPQIITTDNTFVSGNCDVVIGIVNNTVYDPLQPELDSGGSGYIPEAPRDGQAYVRKDGEWVLLSTFL

SEQ ID NO: 10200 - protein, 1177 aa, Artificial Sequence
  SARS-CoV-2/Australia/QLD02/2020__EPI_ISL_407896 spike protein (1-1147)(G889C_L1034C) Foldon construct
MFVFLVLLPLVSSQCVNLTTRTQLPPAYTNSFTRGVYYPDKVFRSSVLHSTQDLFLPFFSNVTWFHAIHVSGTNGTKRFDNPVLPFNDGVYFASTEKSNIIRGWIFGTTLDSKTQSLLIVNNATNVVIKVCEFQFCNDPFLGVYYHKNNKSWMESEFRVYSSANNCTFEYVSQPFLMDLEGKQGNFKNLREFVFKNIDGYFKIYSKHTPINLVRDLPQGFSALEPLVDLPIGINITRFQTLLALHRSYLTPGDSSSGWTAGAAAYYVGYLQPRTFLLKYNENGTITDAVDCALDPLSETKCTLKSFTVEKGIYQTSNFRVQPTESIVRFPNITNLCPFGEVFNATRFASVYAWNRKRISNCVADYSVLYNSASFSTFKCYGVSPTKLNDLCFTNVYADSFVIRGDEVRQIAPGQTGKIADYNYKLPDDFTGCVIAWNSNNLDSKVGGNYNYLYRLFRKSNLKPFERDISTEIYQAGSTPCNGVEGFNCYFPLQSYGFQPTNGVGYQPYRVVVLSFELLHAPATVCGPKKSTNLVKNKCVNFNFNGLTGTGVLTESNKKFLPFQQFGRDIADTTDAVRDPQTLEILDITPCSFGGVSVITPGTNTSNQVAVLYQDVNCTEVPVAIHADQLTPTWRVYSTGSNVFQTRAGCLIGAEHVNNSYECDIPIGAGICASYQTQTNSPRRARSVASQSIIAYTMSLGAENSVAYSNNSIAIPTNFTISVTTEILPVSMTKTSVDCTMYICGDSTECSNLLLQYGSFCTQLNRALTGIAVEQDKNTQEVFAQVKQIYKTPPIKDFGGFNFSQILPDPSKPSKRSFIEDLLFNKVTLADAGFIKQYGDCLGDIAARDLICAQKFNGLTVLPPLLTDEMIAQYTSALLAGTITSGWTFCAGAALQIPFAMQMAYRFNGIGVTQNVLYENQKLIANQFNSAIGKIQDSLSSTASALGKLQDVVNQNAQALNTLVKQLSSNFGAISSVLNDILSRLDKVEAEVQIDRLITGRLQSLQTYVTQQLIRAAEIRASANLAATKMSECVCGQSKRVDFCGKGYHLMSFPQSAPHGVVFLHVTYVPAQEKNFTTAPAICHDGKAHFPREGVFVSNGTHWFVTQRNFYEPQIITTDNTFVSGNCDVVIGIVNNTVYDPLQLELDSGGSGYIPEAPRDGQAYVRKDGEWVLLSTFL

SEQ ID NO: 10201 - protein, 1177 aa, Artificial Sequence
  SARS-CoV-2/India/1-31/2020__EPI_ISL_413523 spike protein (1-1147)(G889C_L1034C) Foldon construct
MFVFLVLLPLVSSQCVNLTTRTQLPPAYTNSFTRGVYYPDKVFRSSVLHSTQDLFLPFFSNVTWFHAIHVSGTNGTKRFDNPVLPFNDGVYFASTEKSNIIRGWIFGTTLDSKTQSLLIVNNATNVVIKVCEFQFCNDPFLGVYYHKNNKSWMESEFRVYSSANNCTFEYVSQPFLMDLEGKQGNFKNLREFVFKNIDGYFKIYSKHTPINLVRDLPQGFSALEPLVDLPIGINITRFQTLLALHRSYLTPGDSSSGWTAGAAAYYVGYLQPRTFLLKYNENGTITDAVDCALDPLSETKCTLKSFTVEKGIYQTSNFRVQPTESIVRFPNITNLCPFGEVFNATRFASVYAWNRKRISNCVADYSVLYNSASFSTFKCYGVSPTKLNDLCFTNVYADSFVIRGDEVRQIAPGQTGKIADYNYKLPDDFTGCVIAWNSNNLDSKVGGNYNYLYRLFRKSNLKPFERDISTEIYQAGSTPCNGVEGFNCYFPLQSYGFQPTNGVGYQPYRVVVLSFELLHAPATVCGPKKSTNLVKNKCVNFNFNGLTGTGVLTESNKKFLPFQQFGRDIADTTDAVRDPQTLEILDITPCSFGGVSVITPGTNTSNQVAVLYQDVNCTEVPVAIHADQLTPTWRVYSTGSNVFQTRAGCLIGAEHVNNSYECDIPIGAGICASYQTQTNSPRRARSVASQSIIAYTMSLGAENSVAYSNNSIAIPTNFTISVTTEILPVSMTKTSVDCTMYICGDSTECSNLLLQYGSFCTQLNRALTGIAVEQDKNTQEVFAQVKQIYKTPPIKDFGGFNFSQILPDPSKPSKRSFIEDLLFNKVTLADAGFIKQYGDCLGDIAARDLICAQKFNGLTVLPPLLTDEMIAQYTSALLAGTITSGWTFCAGAALQIPFAMQMAYRFNGIGVTQNVLYENQKLIANQFNSVIGKIQDSLSSTASALGKLQDVVNQNAQALNTLVKQLSSNFGAISSVLNDILSRLDKVEAEVQIDRLITGRLQSLQTYVTQQLIRAAEIRASANLAATKMSECVCGQSKRVDFCGKGYHLMSFPQSAPHGVVFLHVTYVPAQEKNFTTAPAICHDGKAHFPREGVFVSNGTHWFVTQRNFYEPQIITTDNTFVSGNCDVVIGIVNNTVYDPLQPELDSGGSGYIPEAPRDGQAYVRKDGEWVLLSTFL

SEQ ID NO: 10202 - protein, 1177 aa, Artificial Sequence
  SARS-CoV-2/Guangdong/GD2020087-P0008/2020__EPI_ISL_413863 spike protein (1-1147)(G889C_L1034C) Foldon construct
MFVFLVLLPLVSSQCVNLTTRTQLPPAYTNSFTRGVYYPDKVFRSSVLHSTQDLFLPFFSNVTWFHAIHVSGTNGTKRFDNPVLPFNDGVYFASTEKSNIIRGWIFGTTLDSKTQSLLIVNNATNVVIKVCEFQFCNDPFLGVYYHKNNKSWMESEFRVYSSANNCTFEYVSQPFLMDLEGKQGNFKNLREFVFKNIDGYFKIYSKHTPINLVRDLPQGFSALEPLVDLPIGINITRFQTLLALHRSYLTPGDSSSGWTAGAAAYYVGYLQPRTFLLKYNENGTITDAVDCALDPLSETKCTLKSFTVEKGIYQTSNFRVQPTESIVRFPNITNLCPFGEVFNATRFASVYAWNRKRISNCVADYSVLYNSASFSTFKCYGVSPTKLNDLCFTNVYADSFVIRGDEVREIAPGQTGKIADYNYKLPDDFTGCVIAWNSNNLDSKVGGNYNYLYRLFRKSNLKPFERDISTEIYQAGSTPCNGVEGFNCYFPLQSYGFQPTNGVGYQPYRVVVLSFELLHAPATVCGPKKSTNLVKNKCVNFNFNGLTGTGVLTESNKKFLPFQQFGRDIADTTDAVRDPQTLEILDITPCSFGGVSVITPGTNTSNQVAVLYQDVNCTEVPVAIHADQLTPTWRVYSTGSNVFQTRAGCLIGAEHVNNSYECDIPIGAGICASYQTQTNSPRRARSVASQSIIAYTMSLGAENSVAYSNNSIAIPTNFTISVTTEILPVSMTKTSVDCTMYICGDSTECSNLLLQYGSFCTQLNRALTGIAVEQDKNTQEVFAQVKQIYKTPPIKDFGGFNFSQILPDPSKPSKRSFIEDLLFNKVTLADAGFIKQYGDCLGDIAARDLICAQKFNGLTVLPPLLTDEMIAQYTSALLAGTITSGWTFCAGAALQIPFAMQMAYRFNGIGVTQNVLYENQKLIANQFNSAIGKIQDSLSSTASALGKLQDVVNQNAQALNTLVKQLSSNFGAISSVLNDILSRLDKVEAEVQIDRLITGRLQSLQTYVTQQLIRAAEIRASANLAATKMSECVCGQSKRVDFCGKGYHLMSFPQSAPHGVVFLHVTYVPAQEKNFTTAPAICHDGKAHFPREGVFVSNGTHWFVTQRNFYEPQIITTDNTFVSGNCDVVIGIVNNTVYDPLQPELDSGGSGYIPEAPRDGQAYVRKDGEWVLLSTFL

SEQ ID NO: 10203 - protein, 1177 aa, Artificial Sequence
  SARS-CoV-2/Sweden/01/2020__EPI_ISL_411951 spike protein (1-1147)(G889C_L1034C) Foldon construct
MFVFLVLLPLVSSQCVNLTTRTQLPPAYTNSFTRGVYYPDKVFRSSVLHSTQDLFLPFFSNVTWFHAIHVSGTNGTKRFDNPVLPFNDGVYFASTEKSNIIRGWIFGTTLDSKTQSLLIVNNATNVVIKVCEFQFCNDPFLGVYYHKNNKSWMESEFRVYSSANNCTFEYVSQPFLMDLEGKQGNFKNLREFVFKNIDGYFKIYSKHTPINLVRDLPQGFSALEPLVDLPIGINITRFQTLLALHRSYLTPGDSSSGWTAGAAAYYVGYLQPRTFLLKYNENGTITDAVDCALDPLSETKCTLKSFTVEKGIYQTSNFRVQPTESIVRFPNITNLCPFGEVFNATRFASVYAWNRKRISNCVADYSVLYNSASFSTFKCYGVSPTKLNDLCFTNVYADSFVIRGDEVRQIAPGQTGKIADYNYKLPDDFTGCVIAWNSNNLDSKVGGNYNYLYRLFRKSNLKPFERDISTEIYQAGSTPCNGVEGFNCYFPLQSYGFQPTNGVGYQPYRVVVLSFELLHAPATVCGPKKSTNLVKNKCVNFNFNGLTGTGVLTESNKKFLPFQQFGRDIADTTDAVRDPQTLEILDITPCSFGGVSVITPGTNTSNQVAVLYQDVNCTEVPVAIHADQLTPTWRVYSTGSNVFQTRAGCLIGAEHVNNSYECDIPIGAGICASYQTQTNSPRRARSVASQSIIAYTMSLGAENSVAYSNNSIAIPTNFTISVTTEILPVSMTKTSVDCTMYICGDSTECSNLLLQYGSFCTQLNRALTGIAVEQDKNTQEVFAQVKQIYKTPPIKDCGGFNFSQILPDPSKPSKRSFIEDLLFNKVTLADAGFIKQYGDCLGDIAARDLICAQKFNGLTVLPPLLTDEMIAQYTSALLAGTITSGWTFCAGAALQIPFAMQMAYRFNGIGVTQNVLYENQKLIANQFNSAIGKIQDSLSSTASALGKLQDVVNQNAQALNTLVKQLSSNFGAISSVLNDILSRLDKVEAEVQIDRLITGRLQSLQTYVTQQLIRAAEIRASANLAATKMSECVCGQSKRVDFCGKGYHLMSFPQSAPHGVVFLHVTYVPAQEKNFTTAPAICHDGKAHFPREGVFVSNGTHWFVTQRNFYEPQIITTDNTFVSGNCDVVIGIVNNTVYDPLQPELDSGGSGYIPEAPRDGQAYVRKDGEWVLLSTFL

SEQ ID NO: 10204 - protein, 1177 aa, Artificial Sequence
  SARS-CoV-2/Tianmen/HBCDC-HB-07/2020__EPI_ISL_412983 spike protein (1-1147)(G889C_L1034C) Foldon construct
MFVFLVLLPLVSSQCVNLTTRTQLPPAYTNSFTRGVYYPDKVFRSSVLHSTQDLFLPFFSNVTWFHAIHVSGTNGTKRFDNPVLPFNDGVYFASTEKSNIIRGWIFGTTLDSKTQSLLIVNNATNVVIKVCEFQFCNDPFLGVYYHKNNKSWMESEFRVYSSANNCTFEYVSQPFLMDLEGKQGNFKNLREFVFKNIDGYFKIYSKHTPINLVRDLPQGFSALEPLVDLPIGINITRFQTLLALHRSYLTPGDSSSGWTAGAAAYYVGYLQPRTFLLKYNENGTITDAVDCALDPLSETKCTLKSFTVEKGIYQTSNFRVQPTESIVRFPNITNLCPFGEVFNATRFASVYAWNRKRISNCVADYSVLYNSASFSTFKCYGVSPTKLNDLCFTNVYADSFVIRGDEVRQIAPGQTGKIADYNYKLPDDFTGCVIAWNSNNLDSKVGGNYNYLYRLFRKSNLKPFERDISTEIYQAGSTPCNGVEGFNCYFPLQSYGFQPTNGVGYQPYRVVVLSFELLHAPATVCGPKKSTNLVKNKCVNFNFNGLTGTGVLTESNKKFLPFQQFGRDIADTTDAVRDPQTLEILDITPCSFGGVSVITPGTNTSNQVAVLYQDLNCTEVPVAIHADQLTPTWRVYSTGSNVFQTRAGCLIGAEHVNNSYECDIPIGAGICASYQTQTNSPRRARSVASQSIIAYTMSLGAENSVAYSNNSIAIPTNFTISVTTEILPVSMTKTSVDCTMYICGDSTECSNLLLQYGSFCTQLNRALTGIAVEQDKNTQEVFAQVKQIYKTPPIKDFGGFNFSQILPDPSKPSKRSFIEDLLFNKVTLADAGFIKQYGDCLGDIAARDLICAQKFNGLTVLPPLLTDEMIAQYTSALLAGTITSGWTFCAGAALQIPFAMQMAYRFNGIGVTQNVLYENQKLIANQFNSAIGKIQDSLSSTASALGKLQDVVNQNAQALNTLVKQLSSNFGAISSVLNDILSRLDKVEAEVQIDRLITGRLQSLQTYVTQQLIRAAEIRASANLAATKMSECVCGQSKRVDFCGKGYHLMSFPQSAPHGVVFLHVTYVPAQEKNFTTAPAICHDGKAHFPREGVFVSNGTHWFVTQRNFYEPQIITTDNTFVSGNCDVVIGIVNNTVYDPLQPELDSGGSGYIPEAPRDGQAYVRKDGEWVLLSTFL

SEQ ID NO: 10205 - protein, 1177 aa, Artificial Sequence
  SARS-CoV-2/Hong Kong/case42_VM20002493/2020__EPI_ISL_414527 spike protein (1-1147)(G889C_L1034C) Foldon construct
MFVFLVLLPLVSSQCVNLTTRTQLPPAYTNSFTRGVYYPDKVFRSSVLHSTQDLFLPFFSNVTWFHAIHVSGTNGTKRFDNPVLPFNDGVYFASTEKSNIIRGWIFGTTLDSKTQSLLIVNNATNVVIKVCEFQFCNDPFLGVYYHKNNKSWMESEFRVYSSANNCTFEYVSQPFLMDLEGKQGNFKNLREFVFKNIDGYFKIYSKHTPINLVRDLPQGFSALEPLVDLPIGINITRFQTLLALHRSYLTPGDSSSGWTAGAAAYYVGYLQPRTFLLKYNENGTITDAVDCALDPLSETKCTLKSFTVEKGIYQTSNFRVQPTESIVRFPNITNLCPFGEVFNATRFASVYAWNRKRISNCVADYSVLYNSASFSTFKCYGVSPTKLNDLCFTNVYADSFVIRGDEVRQIAPGQTGKIADYNYKLPDDFTGCVIAWNSNNLDSKVGGNYNYLYRLFRKSNLKPFERDISTEIYQAGSTPCNGVEGFNCYFPLQSYGFQPTNGVGYQPYRVVVLSFELLHAPATVCGPKKSTNLVKNKCVNFNFNGLTGTGVLTESNKKFLPFQQFGRDIADTTDAVRDPQTLEILDITPCSFGGVSVITPGTNTSNQVAVLYQDVNCTEVPVAIHADQLTPTWRVYSTGSNVFQTRAGCLIGAEHVNNSYECDIPIGAGICASYQTQTNSPRRARSVASQSIIAYTMSLGAENSVAYSNNSIAIPTNFAISVTTEILPVSMTKTSVDCTMYICGDSTECSNLLLQYGSFCTQLNRALTGIAVEQDKNTQEVFAQVKQIYKTPPIKDFGGFNFSQILPDPSKPSKRSFIEDLLFNKVTLADAGFIKQYGDCLGDIAARDLICAQKFNGLTVLPPLLTDEMIAQYTSALLAGTITSGWTFCAGAALQIPFAMQMAYRFNGIGVTQNVLYENQKLIANQFNSAIGKIQDSLSSTASALGKLQDVVNQNAQALNTLVKQLSSNFGAISSVLNDILSRLDKVEAEVQIDRLITGRLQSLQTYVTQQLIRAAEIRASANLAATKMSECVCGQSKRVDFCGKGYHLMSFPQSAPHGVVFLHVTYVPAQEKNFTTAPAICHDGKAHFPREGVFVSNGTHWFVTQRNFYEPQIITTDNTFVSGNCDVVIGIVNNTVYDPLQPELDSGGSGYIPEAPRDGQAYVRKDGEWVLLSTFL

SEQ ID NO: 10206 - protein, 1177 aa, Artificial Sequence
  SARS-CoV-2/USA/CruiseA-23/2020__EPI_ISL_414482 spike protein (1-1147)(G889C_L1034C) Foldon construct
MFVFLVLLPLVSSQCVNLTTRTQLPPAYTNSFTRGVYYPDKVFRSSVLHSTQDLFLPFFSNVTWFHAIHVSGTNGTKRFDNPVLPFNDGVYFASTEKSNIIRGWIFGTTLDSKTQSLLIVNNATNVVIKVCEFQFCNDPFLGVYYHKNNKSWMESEFRVYSSANNCTFEYVSQPFLMDLEVKQGNFKNLREFVFKNIDGYFKIYSKHTPINLVRDLPQGFSALEPLVDLPIGINITRFQTLLALHRSYLTPGDSSSGWTAGAAAYYVGYLQPRTFLLKYNENGTITDAVDCALDPLSETKCTLKSFTVEKGIYQTSNFRVQPTESIVRFPNITNLCPFGEVFNATRFASVYAWNRKRISNCVADYSVLYNSASFSTFKCYGVSPTKLNDLCFTNVYADSFVIRGDEVRQIAPGQTGKIADYNYKLPDDFTGCVIAWNSNNLDSKVGGNYNYLYRLFRKSNLKPFERDISTEIYQAGSTPCNGVEGFNCYFPLQSYGFQPTNGVGYQPYRVVVLSFELLHAPATVCGPKKSTNLVKNKCVNFNFNGLTGTGVLTESNKKFLPFQQFGRDIADTTDAVRDPQTLEILDITPCSFGGVSVITPGTNTSNQVAVLYQDVNCTEVPVAIHADQLTPTWRVYSTGSNVFQTRAGCLIGAEHVNNSYECDIPIGAGICASYQTQTNSPRRARSVASQSIIAYTMSLGAENSVAYSNNSIAIPTNFTISVTTEILPVSMTKTSVDCTMYICGDSTECSNLLLQYGSFCTQLNRALTGIAVEQDKNTQEVFAQVKQIYKTPPIKDFGGFNFSQILPDPSKPSKRSFIEDLLFNKVTLADAGFIKQYGDCLGDIAARDLICAQKFNGLTVLPPLLTDEMIAQYTSALLAGTITSGWTFCAGAALQIPFAMQMAYRFNGIGVTQNVLYENQKLIANQFNSAIGKIQDSLSSTASALGKLQDVVNQNAQALNTLVKQLSSNFGAISSVLNDILSRLDKVEAEVQIDRLITGRLQSLQTYVTQQLIRAAEIRASANLAATKMSECVCGQSKRVDFCGKGYHLMSFPQSAPHGVVFLHVTYVPAQEKNFTTAPAICHDGKAHFPREGVFVSNGTHWFVTQRNFYEPQIITTDNTFVSGNCDVVIGIVNNTVYDPLQPELDSGGSGYIPEAPRDGQAYVRKDGEWVLLSTFL

SEQ ID NO: 10207 - protein, 1177 aa, Artificial Sequence
  SARS-CoV-2/Hong Kong/case85_VM20002868/2020__EPI_ISL_414519 spike protein (1-1147)(G889C_L1034C) Foldon construct
MFVFLVLVPLVSSQCVNLTTRTQLPPAYTNSFTRGVYYPDKVFRSSVLHSTQDLFLPFFSNVTWFHAIHVSGTNGTKRFDNPVLPFNDGVYFASTEKSNIIRGWIFGTTLDSKTQSLLIVNNATNVVIKVCEFQFCNDPFLGVYYHKNNKSWMESEFRVYSSANNCTFEYVSQPFLMDLEGKQGNFKNLREFVFKNIDGYFKIYSKHTPINLVRDLPQGFSALEPLVDLPIGINITRFQTLLALHRSYLTPGDSSSGWTAGAAAYYVGYLQPRTFLLKYNENGTITDAVDCALDPLSETKCTLKSFTVEKGIYQTSNFRVQPTESIVRFPNITNLCPFGEVFNATRFASVYAWNRKRISNCVADYSVLYNSASFSTFKCYGVSPTKLNDLCFTNVYADSFVIRGDEVRQIAPGQTGKIADYNYKLPDDFTGCVIAWNSNNLDSKVGGNYNYLYRLFRKSNLKPFERDISTEIYQAGSTPCNGVEGFNCYFPLQSYGFQPTNGVGYQPYRVVVLSFELLHAPATVCGPKKSTNLVKNKCVNFNFNGLTGTGVLTESNKKFLPFQQFGRDIADTTDAVRDPQTLEILDITPCSFGGVSVITPGTNTSNQVAVLYQDVNCTEVPVAIHADQLTPTWRVYSTGSNVFQTRAGCLIGAEHVNNSYECDIPIGAGICASYQTQTNSPRRARSVASQSIIAYTMSLGAENSVAYSNNSIAIPTNFTISVTTEILPVSMTKTSVDCTMYICGDSTECSNLLLQYGSFCTQLNRALTGIAVEQDKNTQEVFAQVKQIYKTPPIKDFGGFNFSQILPDPSKPSKRSFIEDLLFNKVTLADAGFIKQYGDCLGDIAARDLICAQKFNGLTVLPPLLTDEMIAQYTSALLAGTITSGWTFCAGAALQIPFAMQMAYRFNGIGVTQNVLYENQKLIANQFNSAIGKIQDSLSSTASALGKLQDVVNQNAQALNTLVKQLSSNFGAISSVLNDILSRLDKVEAEVQIDRLITGRLQSLQTYVTQQLIRAAEIRASANLAATKMSECVCGQSKRVDFCGKGYHLMSFPQSAPHGVVFLHVTYVPAQEKNFTTAPAICHDGKAHFPREGVFVSNGTHWFVTQRNFYEPQIITTDNTFVSGNCDVVIGIVNNTVYDPLQPELDSGGSGYIPEAPRDGQAYVRKDGEWVLLSTFL

SEQ ID NO: 10208 - protein, 1177 aa, Artificial Sequence; identical to SEQ ID NO: 10198
  SARS-CoV-2/England/200990660/2020__EPI_ISL_414523 spike protein (1-1147)(G889C_L1034C) Foldon construct

SEQ ID NO: 10209 - protein, 1177 aa, Artificial Sequence
  SARS-CoV-2/Australia/NSW09/2020__EPI_ISL_413595 spike protein (1-1147)(G889C_L1034C) Foldon construct
MFVFLVLLPLVSSQCVNLTTRTQLPPAYTNSFTRGVYYPDKVFRSSVLHSTQDLFLPFFSNVTWFHAIHVSGTNGTKRFDNPVLPFNDGVYFASTEKSNIIRGWIFGTTLDSKTQSLLIVNNATNVVIKVCEFQFCNDPFLGVYYHKNNKSWMESEFRVYSSANNCTFEYVSQPFLMDLEGKQGNFKNLREFVFKNIDGYFKIYSKHTPINLVRDLPQGFSALEPLVDLPIGINITRFQTLLALHRSYLTPGDSSSGWTAGAAAYYVGYLQPRTFLLKYNENGTITDAVDCALDPLSETKCTLKSFTVEKGIYQTSNFRVQPTESIVRFPNITNLCPFGEVFNATRFASVYAWNRKRISNCVADYSVLYNSASFSTFKCYGVSPTKLNDLCFTNVYADSFVIRGDEVRQIAPGQTGKIADYNYKLPDDFTGCVIAWNSNNLDSKVGGNYNYLYRLFRKSNLKPFERDISTEIYQAGSTPCNGVEGFNCYFPLQSYGFQPTNGVGYQPYRVVVLSFELLHAPATVCGPKKSTNLVKNKCVNFNFNGLTGTGVLTESNKKFLPFQQFGRDIADTTDAVRDPQTLEILDITPCSFGGVSVITPGTNTSNQVAVLYQDVNCTEVPVAIHADQLTPTWRVYSTGSNVFQTRAGCLIGAEHVNNSYECDIPIGAGICASYQTQTNSPRRARSVASQSIIAYTMSLGAENSVAYSNNSIAIPTNFTISVTTEILPVSMTKTSVDCTMYICGDSTECSNLLLQYGSFCTQLNRALTGIAVEQDKNTQEVFAQVKQIYKTPPIKDFGGFNFSQILPDPSKPSKRSFIEDLLFNKVTLADAGFIKQYGDCLGDIAARDLICAQKFNGLTVLPPLLTDEMIAQYTSALLAGTITSGWTFCAGAALQIPFAMQMAYRFNGIGVTQNVLYENQKLIANQFNSAIGKIQDSLSFTASALGKLQDVVNQNAQALNTLVKQLSSNFGAISSVLNDILSRLDKVEAEVQIDRLITGRLQSLQTYVTQQLIRAAEIRASANLAATKMSECVCGQSKRVDFCGKGYHLMSFPQSAPHGVVFLHVTYVPAQEKNFTTAPAICHDGKAHFPREGVFVSNGTHWFVTQRNFYEPQIITTDNTFVSGNCDVVIGIVNNTVYDPLQPELDSGGSGYIPEAPRDGQAYVRKDGEWVLLSTFL

SEQ ID NO: 10210 - protein, 1177 aa, Artificial Sequence; identical to SEQ ID NO: 10190
  SARS-CoV-2/Australia/NSW10/2020__EPI_ISL_413596 spike protein (1-1147)(G889C_L1034C) Foldon construct

SEQ ID NO: 10211 - protein, 1177 aa, Artificial Sequence
  SARS-CoV-2/Switzerland/1000477797/2020__EPI_ISL_413023 spike protein (1-1147)(G889C_L1034C) Foldon construct
MFVFLVLLPLVSSQCVNLTTRTQLPPAYTNSFTRGVYYPDKVFRSSVLHSTQDLFLPFFSNVTWFHAIHVSGTNGTKRFDNPVLPFNDGVYFASTEKSNIIRGWIFGTTLDSKTQSLLIVNNATNVVIKVCEFQFCNDPFLGVYYHKNNKSWMESEFRVYSSANNCTFEYVSQPFLMDLEGKQGNFKNLREFVFKNIDGYFNIYSKHTPINLVRDLPQGFSALEPLVDLPIGINITRFQTLLALHRSYLTPGDSSSGWTAGAAAYYVGYLQPRTFLLKYNENGTITDAVDCALDPLSETKCTLKSFTVEKGIYQTSNFRVQPTESIVRFPNITNLCPFGEVFNATRFASVYAWNRKRISNCVADYSVLYNSASFSTFKCYGVSPTKLNDLCFTNVYADSFVIRGDEVRQIAPGQTGKIADYNYKLPDDFTGCVIAWNSNNLDSKVGGNYNYLYRLFRKSNLKPFERDISTEIYQAGSTPCNGVEGFNCYFPLQSYGFQPTNGVGYQPYRVVVLSFELLHAPATVCGPKKSTNLVKNKCVNFNFNGLTGTGVLTESNKKFLPFQQFGRDIADTTDAVRDPQTLEILDITPCSFGGVSVITPGTNTSNQVAVLYQGVNCTEVPVAIHADQLTPTWRVYSTGSNVFQTRAGCLIGAEHVNNSYECDIPIGAGICASYQTQTNSPRRARSVASQSIIAYTMSLGAENSVAYSNNSIAIPTNFTISVTTEILPVSMTKTSVDCTMYICGDSTECSNLLLQYGSFCTQLNRALTGIAVEQDKNTQEVFAQVKQIYKTPPIKDFGGFNFSQILPDPSKPSKRSFIEDLLFNKVTLADAGFIKQYGDCLGDIAARDLICAQKFNGLTVLPPLLTDEMIAQYTSALLAGTITSGWTFCAGAALQIPFAMQMAYRFNGIGVTQNVLYENQKLIANQFNSAIGKIQDSLSSTASALGKLQDVVNQNAQALNTLVKQLSSNFGAISSVLNDILSRLDKVEAEVQIDRLITGRLQSLQTYVTQQLIRAAEIRASANLAATKMSECVCGQSKRVDFCGKGYHLMSFPQSAPHGVVFLHVTYVPAQEKNFTTAPAICHDGKAHFPREGVFVSNGTHWFVTQRNFYEPQIITTDNTFVSGNCDVVIGIVNNTVYDPLQPELDSGGSGYIPEAPRDGQAYVRKDGEWVLLSTFL

SEQ ID NO: 10212 - protein, 1177 aa, Artificial Sequence
  SARS-CoV-2/Belgium/BA-02291/2020__EPI_ISL_415159 spike protein (1-1147)(G889C_L1034C) Foldon construct
MFVFLVLLPLVSSQCVNLTTRTQLPPAYTNSFTRGVYYPDKVFRSSVLHSTQDLFLPFFSNVTWFHAIHVSGTNGTKRFDNPVLPFNDGVYFASTEKSNIIRGWIFGTTLDSKTQSLLIVNNATNVVIKVCEFQFCNDPFLGVYYHKNNKSWMESEFRVYSSANNCTFEYVSQPFLMDLEGKQGNFKNLREFVFKNIDGYFKIYSKHTPINLVRDLPQGFSALEPLVDLPIGINITRFQTLLALHRSYLTPGDSSSGWTAGAAAYYVGYLQPRTFLLKYNENGTITDAVDCALDPLSETKCTLKSFTVEKGIYQTSNFRVQPTESIVRFPNITNLCPFGEVFNATRFASVYAWNRKRISNCVADYSVLYNSASFSTFKCYGVSPTKLNDLCFTNVYADSFVIRGDEVRQIAPGQTGKIADYNYKLPDDFTGCVIAWNSNNLDSKVGGNYNYLYRLFRRSNLKPFERDISTEIYQAGSTPCNGVEGFNCYFPLQSYGFQPTNGVGYQPYRVVVLSFELLPAPATVCGPKKSTNLVKNKCVNFNFNGLTGTGVLTESNKKFLPFQQFGRDIADTTDAVRDPQTLEILDITPCSFGGVSVITPGTNTSNQVAVLYQGVNCTEVPVAIHADQLTPTWRVYSTGSNVFQTRAGCLIGAEHVNNSYECDIPIGAGICASYQTQTNSPRRARSVASQSIIAYTMSLGAENSVAYSNNSIAIPTNFTISVTTEILPVSMTKTSVDCTMYICGDSTECSNLLLQYGSFCTQLNRALTGIAVEQDKNTQEVFAQVKQIYKTPPIKDFGGFNFSQILPDPSKPSKRSFIEDLLFNKVTLADAGFIKQYGDCLGDIAARDLICAQKFNGLTVLPPLLTDEMIAQYTSALLAGTITSGWTFCAGAALQIPFAMQMAYRFNGIGVTQNVLYENQKLIANQFNSAIGKIQDSLSSAAPALGKLQDVVNQNAQALNTLVKQLSSNFGAISSVLNDILSRLDKVEAEVQIDRLITGRLQSLQTYVTQQLIRAAEIRASANLAATKMSECVCGQSKRVDFCGKGYHLMSFPQSAPHGVVFLHVTYVPAQEKNFTTAPAICHDGKAHFPREGVFVSNGTHWFVTQRNFYEPQIITTDNTFVSGNCDVVIGIVNNTVYDPLQPELDSGGSGYIPEAPRDGQAYVRKDGEWVLLSTFL

SEQ ID NO: 10213 - protein, 1177 aa, Artificial Sequence
  SARS-CoV-2/USA/WA8-UW5/2020__EPI_ISL_413486 spike protein (1-1147)(G889C_L1034C) Foldon construct
MFVFLVLLPLVSSQCVNLTTRTQLPPAYTNSFTRGVYYPDKVFRSSVLHSTQDLFLPFFSNVTWFHAIHVSGTNGTKRFDNPVLPFNDGVYFASTEKSNIIRGWIFGTTLDSKTQSLLIVNNATNVVIKVCEFQFCNDPFLGVYYHKNNKSWMESEFRVYSSANNCTFEYVSQPFLMDLEGKQGNFKNLREFVFKNIDGYFKIYSKHTPINLVRDLPQGFSALEPLVDLPIGINITRFQTLLALHRSYLTPGDSSSGWTAGAAAYYVGYLQPRTFLLKYNENGTITDAVDCALDPLSETKCTLKSFTVEKGIYQTSNFRVQPTESIVRFPNITNLCPFGEVFNATRFASVYAWNRKRISNCVADYSVLYNSASFSTFKCYGVSPTKLNDLCFTNVYADSFVIRGDEVRQIAPGQTGKIADYNYKLPDDFTGCVIAWNSNNLDSKVGGNYNYLYRLFRKSNLKPFERDISTEIYQAGSTPCNGVEGFNCYFPLQSYGFQPTNGVGYQPYRVVVLSFELLHAPATVCGPKKSTNLVKNKCVNFNFNGLTGTGVLTESNKKFLPFQQFGRDIADTTDAVRDPQTLEILDITPCSFGGVSVITPGTNTSNQVAVLYQDVNCTEVPVAIHADQLTPTWRVYSTGSNVFQTRAGCLIGAEYVNNSYECDIPIGAGICASYQTQTNSPRRARSVASQSIIAYTMSLGAENSVAYSNNSIAIPTNFTISVTTEILPVSMTKTSVDCTMYICGDSTECSNLLLQYGSFCTQLNRALTGIAVEQDKNTQEVFAQVKQIYKTPPIKDFGGFNFSQILPDPSKPSKRSFIEDLLFNKVTLADAGFIKQYGDCLGDIAARDLICAQKFNGLTVLPPLLTDEMIAQYTSALLAGTITSGWTFCAGAALQIPFAMQMAYRFNGIGVTQNVLYENQKLIANQFNSAIGKIQDSLSSTASALGKLQDVVNQNAQALNTLVKQLSSNFGAISSVLNDILSRLDKVEAEVQIDRLITGRLQSLQTYVTQQLIRAAEIRASANLAATKMSECVCGQSKRVDFCGKGYHLMSFPQSAPHGVVFLHVTYVPAQEKNFTTAPAICHDGKAHFPREGVFVSNGTHWFVTQRNFYEPQIITTDNTFVSGNCDVVIGIVNNTVYDPLQPELDSGGSGYIPEAPRDGQAYVRKDGEWVLLSTFL

SEQ ID NO: 10214 - protein, 1177 aa, Artificial Sequence
  SARS-CoV-2/England/20102000506/2020__EPI_ISL_415147 spike protein (1-1147)(G889C_L1034C) Foldon construct
MFVFLVLLPLVSSQCVNLTTRTQLPPAYTNSFTRGVYYPDKVFRSSVLHSTQDLFLPFFSNVTWFHAIHVSGTNGTKRFDNPVLPFNDGVYFASTEKSNIIRGWIFGTTLDSKTQSLLIVNNATNVVIKVCEFQFCNDPFLGVYYHKNNKSWMESEFRVYSSANNCTFEYVSQPFLMDLEGKQGNFKNLREFVFKNIDGYFKIYSKHTPINLVRDLPQGFSALEPLVDLPIGINITRFQTLLALHRSYLTPGDSSSGWTAGAAAYYVGYLQPRTFLLKYNENGTITDAVDCALDPLSETKCTLKSFTVEKGIYQTSNFRVQPTESIVRFPNITNLCPFGEVFNATRFASVYAWNRKRISNCVADYSVLYNSASFSTFKCYGVSPTKLNDLCFTNVYADSFVIRGDEVRQIAPGQTGKIADYNYKLPDDFTGCVIAWNSNNLDSKVGGNYNYLYRLFRKSNLKPFERDISTEIYQAGSTPCNGVEGFNCYFPLQSYGFQPTNGVGYQPYRVVVLSFELLHAPATVCGPKKSTNLVKNKCVNFNFNGLTGTGVLTESNKKFLPFQQFGRDIADTTDAVRDPQTLEILDITPCSFGGVSVITPGTNTSNQVAVLYQGVNCTEVPVAIHADQLTPTWRVYSTGSNVFQTRAGCLIGAEHVNNSYECDIPIGAGICASYQTQTNSPRRARSVASQSIIAYTMSLGAENSVAYSNNSIAIPTNFTISVTTEILPVSMTKTSVDCTMYICGDSTECSNLLLQYGSFCTQLNRALTGIAVEQDKNTQEVFAQVKQIYKTPPIKDFGGFNFSQILPDPSKPSKRSFIEDLLFNKVTLADAGFIKQYGYCLGDIAARDLICAQKFNGLTVLPPLLTDEMIAQYTSALLAGTITSGWTFCAGAALQIPFAMQMAYRFNGIGVTQNVLYENQKLIANQFNSAIGKIQDSLSSTASALGKLQDVVNQNAQALNTLVKQLSSNFGAISSVLNDILSRLDKVEAEVQIDRLITGRLQSLQTYVTQQLIRAAEIRASANLAATKMSECVCGQSKRVDFCGKGYHLMSFPQSAPHGVVFLHVTYVPAQEKNFTTAPAICHDGKAHFPREGVFVSNGTHWFVTQRNFYEPQIITTDNTFVSGNCDVVIGIVNNTVYDPLQPELDSGGSGYIPEAPRDGQAYVRKDGEWVLLSTFL

SEQ ID NO: 10215 - protein, 1177 aa, Artificial Sequence
  SARS-CoV-2/Belgium/VAG-03013/2020__EPI_ISL_415155 spike protein (1-1147)(G889C_L1034C) Foldon construct
MFVFLVLLPLVSSQCVNLTTRTQLPPAYTNSFTRGVYYPDKVFRSSVLHSTQDLFLPFFSNVTWFHAIHVSGTNGTKRFDNPVLPFNDGVYFASTEKSNIIRGWIFGTTLDSKTQSLLIVNNATNVVIKVCEFQFCNDPFLGVYYHKNNKSWMESEFRVYSSANNCTFEYVSQPFLMDLEGKQGNFKNLREFVFKNIDGYFKIYSKHTPINLVRDLPQGFSALEPLVDLPIGINITRFQTLLALHRSYLTPGDSSSGWTAGAAAYYVGYLQPRTFLLKYNENGTITDAVDCALDPLSETKCTLKSFTVEKGIYQTSNFRVQPTESIVRFPNITNLCPFGEVFNATRFASVYAWNRKRISNCVADYSVLYNSASFSTFKCYGVSPTKLNDLCFTNVYADSFVIRGDEVRQIAPGQTGKIADYNYKLPDDFTGCVIAWNSNNLDSKVGGNYNYLYRLFRKSNLKPFERDISTEIYQAGSTPCNGVEGFNCYFPLQSYGFQPTNGVGYQPYRVVVLSFELLHAPATVCGPKKSTNLVKNKCVNFNFNGLTGTGVLTESNKKFLPFQQFGRDIADTTDAVRDPQTLEILDITPCSFGGVSVITPGTNTSNQVAVLYQGVNCTEVPVAIHADQLTPTWRVYSTGSNVFQTRAGCLIGAEHVNNSYECDIPIGAGICASYQTQTNSPRRARSVASQSIIAYTMSLGAENSVAYSNNSIAIPTNFTISVTTEILPVSMTKTSVDCTMYICGDSTECSNLLLQYGSFCTQLNRALTGIAVEQDKNTQEVFAQVKQIYKTPPIKDFGGFNFSQILPDPSKPSKRSFIEDLLFNKVTLADAGFIKQYGDCLGDIAARDLICAQKFNGLTVLPPLLTDEMIAQYTSALLAGTITSGWTFCAGAALQIPFAMQMAYRFNGIGVTQNVLYENQKLIANQFNSAIGKIQDSLSSTATALGKLQDVVNQNAQALNTLVKQLSSNFGAISSVLNDILSRLDKVEAEVQIDRLITGRLQSLQTYVTQQLIRAAEIRASANLAATKMSECVCGQSKRVDFCGKGYHLMSFPQSAPHGVVFLHVTYVPAQEKNFTTAPAICHDGKAHFPREGVFVSNGTHWFVTQRNFYEPQIITTDNTFVSGNCDVVIGIVNNTVYDPLQPELDSGGSGYIPEAPRDGQAYVRKDGEWVLLSTFL

SEQ ID NO: 10216 - protein, 1177 aa, Artificial Sequence
  SARS-CoV-2/Belgium/BC-03016/2020__EPI_ISL_415157 spike protein (1-1147)(G889C_L1034C) Foldon construct
MFVFLVLLPLVSSQCVNLTTRTQLPPAYTNSFTRGVYYPDKVFRSSVLHSTQDLFLPFFSNVTWFHAIHVSGTNGTKRFDNPVLPFNDGVYFASTEKSNIIRGWIFGTTLDSKTQSLLIVNNATNVVIKVCEFQFCNDPFLGVYYHKNNKSWMESEFRVYSSANNCTFEYVSQPFLMDLEGKQGNFKNLREFVFKNIDGYFKIYSKHTPINLVRDLPQGFSALEPLVDLPIGINITRFQTLLALHRSYLTPGDSSSGWTAGAAAYYVGYLQPRTFLLKYNENGTITDAVDCALDPLSETKCTLKSFTVEKGIYQTSNFRVQPTESIVRFPNITNLCPFGEVFNATRFASVYAWNRKRISNCVADYSVLYNSASFSTFKCYGVSPTKLNDLCFTNVYADSFVIRGDEVRQIAPGQTGKIADYNYKLPDDFTGCVIAWNSNNLDSKVGGNYNYLYRLFRKSNLKPFERDISTEIYQAGSTPCNGVEGFNCYFPLQSYGFQPTNGVGYQPYRVVVLSFELLHAPATVCGPKKSTNLVKNKCVNFNFNGLTGTGVLTESNKKFLPFQQFGRDIADTTDAVRDPQTLEILDITPCSFGGVSVITPGTNTSNQVAVLYQGVNCTEVPVAIHADQLTPTWRVYSTGSNVFQTRAGCLIGAEHVNNSYECDIPIGAGICASYQTQTNSPRRARSVASQSIIAYTMSLGAENSVAYSNNSIAIPTNFTISVTTEILPVSMTKTSVDCTMYICGDSTECSNLLLQYGSFCTQLNRALTGIAVEQDKNTQEVFAQVKQIYKTPPIKDFGGFNFSQILPDPSKPSKRSFIEDLLFNKVTLADAGFIKQYGDCLGDIAARDLICAQKFNGLTVLPPLLTDEMIAQYTSALLAGTITSGWTFCAGAALQIPFAMQMAYRFNGIGVTQNVLYENQKLIANQFNSAIGKIQDSLSSTAPALGKLQDVVNQNAQALNTLVKQLSSNFGAISSVLNDILSRLDKVEAEVQIDRLITGRLQSLQTYVTQQLIRAAEIRASANLAATKMSECVCGQSKRVDFCGKGYHLMSFPQSAPHGVVFLHVTYVPAQEKNFTTAPAICHDGKAHFPREGVFVSNGTHWFVTQRNFYEPQIITTDNTFVSGNCDVVIGIVNNTVYDPLQPELDSGGSGYIPEAPRDGQAYVRKDGEWVLLSTFL

SEQ ID NO: 10217 - protein, 1177 aa, Artificial Sequence
  SARS-CoV-2/Germany/BavPat3/2020__EPI_ISL_414521 spike protein (1-1147)(G889C_L1034C) Foldon construct
MFVFLVLLPLVSSQCVNLTTRTQLPPAYTNSFTRGVYYPDKVFRSSVLHSTQDLFLPFFSNVTWFHAIHVSGTNGTKRFDNPVLPFNDGVYFASTEKSNIIRGWIFGTTLDSKTQSLLIVNNATNVVIKVCEFQFCNDPFLGVYYHKNNKSWMESEFRVYSSANNCTFEYVSQPFLMDLEGKQGNFKNLREFVFKNIDGYFKIYSKHTPINLVRDLPQGFSALEPLVDLPIGINITRFQTLLALHRSYLTPGDSSSGWTAGAAAYYVGYLQPRTFLLKYNENGTITDAVDCALDPLSETKCTLKSFTVEKGIYQTSNFRVQPTESIVRFPNITNLCPFGEVFNATRFASVYAWNRKRISNCVADYSVLYNSASFSTFKCYGVSPTKLNDLCFTNVYADSFVIRGDEVRQIAPGQTGKIADYNYKLPDDFTGCVIAWNSNNLDSKVGGNYNYLYRLFRKSNLKPFERDISTEIYQAGSTPCNGVEGFNCYFPLQSYGFQPTNGVGYQPYRVVVLSFELLHAPATVCGPKKSTNLVKNKCVNFNFNGLTGTGVLTESNKKFLPFQQFGRDIADTTDAVRDPQTLEILDITPCSFGGVSVITPGTNTSNQVAVLYQDVNCTEVPVAIHADQLTPTWRVYSTGSNVFQTRAGCLIGAEHVNNSYECDIPIGAGICASYQTQTNSPRRARSVASQSIIAYTMSLGAENSVAYSNNSIAIPTNFTISVTTEILPVSMTKTSVDCTMYICGDSTECSNLLLQYGSFCTQLNRALTGIAVEQDKNTQQVFAQVKQIYKTPPIKDFGGFNFSQILPDPSKPSKRSFIEDLLFNKVTLADAGFIKQYGDCLGDIAARDLICAQKFNGLTVLPPLLTDEMIAQYTSALLAGTITSGWTFCAGAALQIPFAMQMAYRFNGIGVTQNVLYENQKLIANQFNSAIGKIQDSLSSTASALGKLQDVVNQNAQALNTLVKQLSSNFGAISSVLNDILSRLDKVEAEVQIDRLITGRLQSLQTYVTQQLIRAAEIRASANLAATKMSECVCGQSKRVDFCGKGYHLMSFPQSAPHGVVFLHVTYVPAQEKNFTTAPAICHDGKAHFPREGVFVSNGTHWFVTQRNFYEPQIITTDNTFVSGNCDVVIGIVNNTVYDPLQPELDSGGSGYIPEAPRDGQAYVRKDGEWVLLSTFL

SEQ ID NO: 10218 - protein, 1177 aa, Artificial Sequence
  SARS-CoV-2/France/HF1805/2020__EPI_ISL_414628 spike protein (1-1147)(G889C_L1034C) Foldon construct
MFVFLVLLPLVSSQCVNLTTRTQLPPAYTNSFTRGVYYPDKVFRSSVLHSTQDLFLPFFSNVTWFHAIHVSGTNGTKRFDNPVLPFNDGVYFASTEKSNIIRGWIFGTTLDSKTQSLLIVNNATNVVIKVCEFQFCNDPFLGVYYHKNNKSWMESEFRVYSSANNCTFEYVSQPFLMDLEGKQGNFKNLREFVFKNIDGYFKIYSKHTPINLVRDLPQGFSALEPLVDLPIGINITRFQTLLALHRSYLTPGDSSSGWTAGAAAYYVGYLQPRTFLLKYNENGTITDAVDCALDPLSETKCTLKSFTVEKGIYQTSNFRVQPTESIVRFPNITNLCPFGEVFNATRFASVYAWNRKRISNCVADYSVLYNSASFSTFKCYGVSPTKLNDLCFTNVYADSFVIRGDEVRQIAPGQTGKIADYNYKLPDDFTGCVIAWNSNNLDSKVGGNYNYLYRLFRKSNLKPFERDISTEIYQAGSTPCNGVEGFNCYFPLQSYGFQPTNGVGYQPYRVVVLSFELLHAPATVCGPKKSTNLVKNKCVNFNFNGLTGTGVLTESNKKFLPFQQFGRDIADTTDAVRDPQTLEILDITPCSFGGVSVITPGTNTSNQVAVLYQGVNCTEVPVAIHADQLTPTWRVYSTGSNVFQTRAGCLIGAEHVNNSYECDIPIGAGICASYQTQTNSPRRARSVASQSIIAYTMSLGAENSVAYSNNSIAIPTNFTISVTTEILPVSMTKTSVDCTMYICGDSTECSNLLLQYGSFCTQLNRALTGIAVEQDKNTQEVFAQVKQIYKTPPIKDFGGFNFSQILPDPSKPSKRSFIEDLLFNKVTLADAGFIKQYGDCLGDIAARDLICAQKFNGLTVLPPLLTDEMIAQYTSALLAGTITSGWTFCAGAALQIPFAMQMAYRFNGIGVTQNVLYENQKLIANQFNSAIGKIQDSLSSTASALGKLQDVVNQNAQALNTLVKQLSSNFGAISSVLNDILSRLDKVEAEVQIDRLITGRLQSLQTYVTQQLIRAAEIRASANLAATKMSECVCGQSKRVDFCGKGYHLMSFPQSAPHGVVFLHVTYVPAQEKNFTTAPAICHDGKAHFPREGVFVSNGTHWFVTQRNFYEPQIITTDNTFVSGNCDVVIGVVNNTVYDPLQPELDSGGSGYIPEAPRDGQAYVRKDGEWVLLSTFL

SEQ ID NO: 10219 - protein, 1177 aa, Artificial Sequence
  SARS-CoV-2/Netherlands/ZuidHolland_9/2020__EPI_ISL_414445 spike protein (1-1147)(G889C_L1034C) Foldon construct
MFVFLVLLPLVSSQCVNLTTRTQLPPAYTNSFTRGVYYPDKVFRSSVLHSTQDLFLPFFSNVTWFHAIHVSGTNGTKRFDNPVLPFNDGVYFASTEKSNIIRGWIFGTTLDSKTQSLLIVNNATNVVIKVCEFQFCNDPFLGVYYHKNNKSWMESEFRVYSSANNCTFEYVSQPFLMDLEGKQGNFKNLREFVFKNIDGYFKIYSKHTPINLVRDLPQGFSALEPLVDLPIGINITRFQTLLALHRSYLTPGDSSSGWTAGAAAYYVGYLQPRTFLLKYNENGTITDAVDCALDPLSETKCTLKSFTVEKGIYQTSNFRVQPTESIVRFPNITNLCPFGEVFNATRFASVYAWNRKRISNCVADYSVLYNSASFSTFKCYGVSPTKLNDLCFTNVYADSFVIRGDEVRQIAPGQTGKIADYNYKLPDDFTGCVIAWNSNNLDSKVGGNYNYLYRLFRKSNLKPFERDISTEIYQAGSTPCNGVEGFNCYFPLQSYGFQPTNGVGYQPYRVVVLSFELLHAPATVCGPKKSTNLVKNKCVNFNFNGLTGTGVLTESNKKFLPFQQFGRDIADTTDAVRDPQTLEILDITPCSFGGVSVITPGTNTSNQVAVLYQGVNCTEVPVAIHADQLTPTWRVYSTGSNVFQTRAGCLIGAEHVNNSYECDIPIGAGICASYQTQTNSPRRARSVASQSIIAYTMSLGAENSVAYSNNSIAIPTNFTISVTTEILPVSMTKTSVDCTMYICGDSTECSNLLLQYGSFCTQLNRALTGIAVEQDKNTQEVFAQVKQIYKTPPIKDFGGFNFSQILPDPSKPSKRSFIEDLLFNKVTLADAGFIKQYGDCLGDIAARDLICVQKFNGLTVLPPLLTDEMIAQYTSALLAGTITSGWTFCAGAALQIPFAMQMAYRFNGIGVTQNVLYENQKLIANQFNSAIGKIQDSLSSTASALGKLQDVVNQNAQALNTLVKQLSSNFGAISSVLNDILSRLDKVEAEVQIDRLITGRLQSLQTYVTQQLIRAAEIRASANLAATKMSECVCGQSKRVDFCGKGYHLMSFPQSAPHGVVFLHVTYVPAQEKNFTTAPAICHDGKAHFPREGVFVSNGTHWFVTQRNFYEPQIITTDNTFVSGNCDVVIGIVNNTVYDPLQPELDSGGSGYIPEAPRDGQAYVRKDGEWVLLSTFL

SEQ ID NO: 10220 - protein, 1177 aa, Artificial Sequence
  SARS-CoV-2/Finland/FIN03032020A/2020__EPI_ISL_413602 spike protein (1-1147)(G889C_L1034C) Foldon construct
MFVFLVLLPLVSSQCVNLTTRTQLPPAYTNSFTRGVYYPDKVFRSSVLHSTQDLFLPFFSNVTWFHAIHVSGTNGTKRFDNPVLPFNDGVYFASTEKSNIIRGWIFGTTLDSKTQSLLIVNNATNVVIKVCEFQFCNDPFLGVYYHKNNKSWMESEFRVYSSANNCTFEYVSQPFLMDLEGKQGNFKNLREFVFKNIDGYFKIYSKHTPINLVRDLPQGFSALEPLVDLPIGINITRFQTLLALHRSYLTPGDSSSGWTAGAAAYYVGYLQPRTFLLKYNENGTITDAVDCALDPLSETKCTLKSFTVEKGIYQTSNFRVQPTESIVRFPNITNLCPFGEVFNATRFASVYAWNRKRISNCVADYSVLYNSASFSTFKCYGVSPTKLNDLCFTNVYADSFVIRGDEVRQIAPGQTGKIADYNYKLPDDFTGCVISWNSNNLDSKVGGNYNYLYRLFRKSNLKPFERDISTEIYQAGSTPCNGVEGFNCYFPLQSYGFQPTNGVGYQPYRVVVLSFELLHAPATVCGPKKSTNLVKNKCVNFNFNGLTGTGVLTESNKKFLPFQQFGRDIADTTDAVRDPQTLEILDITPCSFGGVSVITPGTNTSNQVAVLYQGVNCTEVPVAIHADQLTPTWRVYSTGSNVFQTRAGCLIGAEHVNNSYECDIPIGAGICASYQTQTNSPRRARSVASQSIIAYTMSLGAENSVAYSNNSIAIPTNFTISVTTEILPVSMTKTSVDCTMYICGDSTECSNLLLQYGSFCTQLNRALTGIAVEQDKNTQEVFAQVKQIYKTPPIKDFGGFNFSQILPDPSKPSKRSFIEDLLFNKVTLADAGFIKQYGDCLGDIAARDLICAQKFNGLTVLPPLLTDEMIAQYTSALLAGTITSGWTFCAGAALQIPFAMQMAYRFNGIGVTQNVLYENQKLIANQFNSAIGKIQDSLSSTASALGKLQDVVNQNAQALNTLVKQLSSNFGAISSVLNDILSRLDKVEAEVQIDRLITGRLQSLQTYVTQQLIRAAEIRASANLAATKMSECVCGQSKRVDFCGKGYHLMSFPQSAPHGVVFLHVTYVPAQEKNFTTAPAICHDGKAHFPREGVFVSNGTHWFVTQRNFYEPQIITTDNTFVSGNCDVVIGIVNNTVYDPLQPELDSGGSGYIPEAPRDGQAYVRKDGEWVLLSTFL

SEQ ID NO: 10221 - protein, 1177 aa, Artificial Sequence
  SARS-CoV-2/France/GE1977/2020__EPI_ISL_414632 spike protein (1-1147)(G889C_L1034C) Foldon construct
MFVFLVLLPLVSSQCVNLTTRTQLPPAYTNSFTRGVYYPDKVFRSSVLHSTQDLFLPFFSNVTWFHAIHVSGTNGTKRFDNPVLPFNDGVYFASTEKSNIIRGWIFGTTLDSKTQSLLIVNNATNVVIKVCEFQFCNDPFLGVYYHKNNKSWMESEFRVYSSANNCTFEYVSQPFLMDLEGKQGNFKNLREFVFKNIDGYFKIYSKHTPINLVRDLPQGFSALEPLVDLPIGINITRFQTLLALHRSYLTPGDSSSGWTAGAAAYYVGYLQPRTFLLKYNENGTITDAVDCALDPLSETKCTLKSFTVEKGIYQTSNFRVQPTESIVRFPNITNLCPFGEVFNATRFASVYAWNRKRISNCVADYSVLYNSASFSTFKCYGVSPTKLNDLCFTNVYADSFVIRGDEVRQIAPGQTGKIADYNYKLPDDFTGCVIAWNSNNLDSKVGGNYNYLYRLFRKSNLKPFERDISTEIYQAGSTPCNGVEGFNCYFPLQSYGFQPTNGVGYQPYRVVVLSFELLHAPATVCGPKKSTNLVKNKCVNFNFNGLTGTGVLTESNKKFLPFQQFGRDIADTTDAVRDPQTLEILDITPCSFGGVSVITPGTNTSNQVAVLYQGVNCTEVPVAIHADQLTPTWRVYSTGSNVFQTRAGCLIGAEHVNNSYECDIPIGAGICASYQTQTNSPRRARSVASQSIIAYTMSLGAENSVAYSNNSIAIPTNFTISVTTEILPVSMTKTSVDCTMYICGDSTECSNLLLQYGSFCTQLNRALTGIAVEQDKNTQEVFAQVKQIYKTPPIKDFGGFNFSQILPDPSKPSKRSFIEDLLFNKVTLADAGFIKQYGDCLGDIAARDLICAQKFNGLTVLPPLLTDEMIAQYTSALLAGTITSGWTFCAGAALQIPFAMQMAYRFNGIGVTQNVLYENQKLIANQFNSAIGKIQDSLFSTASALGKLQDVVNQNAQALNTLVKQLSSNFGAISSVLNDILSRLDKVEAEVQIDRLITGRLQSLQTYVTQQLIRAAEIRASANLAATKMSECVCGQSKRVDFCGKGYHLMSFPQSAPHGVVFLHVTYVPAQEKNFTTAPAICHDGKAHFPREGVFVSNGTHWFVTQRNFYEPQIITTDNTFVSGNCDVVIGIVNNTVYDPLQPELDSGGSGYIPEAPRDGQAYVRKDGEWVLLSTFL

SEQ ID NO: 10222 - protein, 1177 aa, Artificial Sequence
  SARS-CoV-2/Finland/FIN-313/2020__EPI_ISL_414641 spike protein (1-1147)(G889C_L1034C) Foldon construct
MFVFLVLLPLVSSQCVNLTTRTQLPPAYTNSFTRGVYYPDKVFRSSVLHSTQDLFLPFFSNVTWFHAIHVSGTNGTKRFDNPVLPFNDGVYFASTEKSNIIRGWIFGTTLDSKTQSLLIVNNATNVVIKVCEFQFCNDPFLGVYYHKNNKSWMESEFRVYSSANNCTFEYVSQPFLMDLEGKQGNFKNLREFVFKNIDGYFKIYSKHTPINLVRDLPQGFSALEPLVDLPIGINITRFKTLLALHRSYLTPGDSSSGWTAGAAAYYVGYLQPRTFLLKYNENGTITDAVDCALDPLSETKCTLKSFTVEKGIYQTSNFRVQPTESIVRFPNITNLCPFGEVFNATRFASVYAWNRKRISNCVADYSVLYNSASFSTFKCYGVSPTKLNDLCFTNVYADSFVIRGDEVRQIAPGQTGKIADYNYKLPDDFTGCVIAWNSNNLDSKVGGNYNYLYRLFRKSNLKPFERDISTEIYQAGSTPCNGVEGFNCYFPLQSYGFQPTNGVGYQPYRVVVLSFELLHAPATVCGPKKSTNLVKNKCVNFNFNGLTGTGVLTESNKKFLPFQQFGRDIADTTDAVRDPQTLEILDITPCSFGGVSVITPGTNTSNQVAVLYQGVNCTEVPVAIHADQLTPTWRVYSTGSNVFQTRAGCLIGAEHVNNSYECDIPIGAGICASYQTQTNSPRRARSVASQSIIAYTMSLGAENSVAYSNNSIAIPTNFTISVTTEILPVSMTKTSVDCTMYICGDSTECSNLLLQYGSFCTQLNRALTGIAVEQDKNTQEVFAQVKQIYKTPPIKDFGGFNFSQILPDPSKPSKRSFIEDLLFNKVTLADAGFIKQYGDCLGDIAARDLICAQKFNGLTVLPPLLTDEMIAQYTSALLAGTITSGWTFCAGAALQIPFAMQMAYRFNGIGVTQNVLYENQKLIANQFNSAIGKIQDSLSSTASALGKLQDVVNQNAQALNTLVKQLSSNFGAISSVLNDILSRLDKVEAEVQIDRLITGRLQSLQTYVTQQLIRAAEIRASANLAATKMSECVCGQSKRVDFCGKGYHLMSFPQSAPHGVVFLHVTYVPAQEKNFTTAPAICHDGKAHFPREGVFVSNGTHWFVTQRNFYEPQIITTDNTFVSGNCDVVIGIVNNTVYDPLQPELDSGGSGYIPEAPRDGQAYVRKDGEWVLLSTFL

SEQ ID NO: 10223 - protein, 1177 aa, Artificial Sequence
  SARS-CoV-2/Netherlands/ZuidHolland_2/2020__EPI_ISL_414556 spike protein (1-1147)(G889C_L1034C) Foldon construct
MFVFLVLLPLVSSQCVNLTTRTQLPPAYTNSFTRGVYYPDKVFRSSVLHSTQDLFLPFFSNVTWFHAIHVSGTNGTKRFDNPVLPFNDGVYFASTEKSNIIRGWIFGTTLDSKTQSLLIVNNATNVVIKVCEFQFCNDPFLGVYYHKNNKSWMESEFRVYSSANNCTFEYVSQPFLMDLEGKQGNFKNLREFVFKNIDGYFKIYSKHTPINLVRDLPQGFSALEPLVDLPIGINITRFQTLLALHRSYLTPGDSSSGWTAGAAAYYVGYLQPRTFLLKYNENGTITDAVDCALDPLSETKCTLKSFTVEKGIYQTSNFRVQPTESIVRFPNITNLCPFGEVFNATRFASVYAWNRKRISNCVADYSVLYNSASFSTFKCYGVSPTKLNDLCFTNVYADSFVIRGDEVRQIAPGQTGKIADYNYKLPDDFTGCVIAWNSNNLDSKVGGNYNYLYRLFRKSNLKPFERDISTEIYQAGSTPCNGVEGFNCYFPLQSYGFQPTNGVGYQPYRVVVLSFELLHAPATVCGPKKSTNLVKNKCVNFNFNGLTGTGVLTESNKKFLPFQQFGRDIADTTDAVRDPQTLEILDITPCSFGGVSVITPGTNTSNQVAVLYQGVNCTEVPVAIHADQLTPTWRVYSTGSNVFQTRAGCLIGAEHVNNSYECDIPIGAGICASYQTQTNSPRRARSVASQSIIAYTMSLGAENSVAYSNNSIAIPTNFTISVTTEILPVSMTKTSVDCTMYICGDSTECSNLLLQYGSFCTQLNRALTGIALEQDKNTQEVFAQVKQIYKTPPIKDFGGFNFSQILPDPSKPSKRSFIEDLLFNKVTLADAGFIKQYGDCLGDIAARDLICAQKFNGLTVLPPLLTDEMIAQYTSALLAGTITSGWTFCAGAALQIPFAMQMAYRFNGIGVTQNVLYENQKLIANQFNSAIGKIQDSLSSTASALGKLQDVVNQNAQALNTLVKQLSSNFGAISSVLNDILSRLDKVEAEVQIDRLITGRLQSLQTYVTQQLIRAAEIRASANLAATKMSECVCGQSKRVDFCGKGYHLMSFPQSAPHGVVFLHVTYVPAQEKNFTTAPAICHDGKAHFPREGVFVSNGTHWFVTQRNFYEPQIITTDNTFVSGNCDVVIGIVNNTVYDPLQPELDSGGSGYIPEAPRDGQAYVRKDGEWVLLSTFL

SEQ ID NO: 10224 - protein, 1177 aa, Artificial Sequence
  SARS-CoV-2/USA/WA-UW31/2020__EPI_ISL_414618 spike protein (1-1147)(G889C_L1034C) Foldon construct
MFVFLVLLPLVSSQCVNLTTRTQLPPAYTNSFTRGVYYPDKVFRSSVLHSTQDLFLPFFSNVTWFHAIHVSGTNGTKRFDNPVLPFNDGVYFASTEKSNIIRGWIFGTTLDSKTQSLLIVNNATNVVIKVCEFQFCNDPFLGVYYHKNNKSWMESEFRVYSSANNCTFEYVSQPFLMDLEGKQGNFKNLREFVFKNIDGYFKIYSKHTPINLVRDLPQGFSALEPLVDLPIGINITRFQTLLALHRSYLTPGDSSSGWTAGAAAYYVGYLQPRTFLLKYNENGTITDAVDCALDPLSETKCTLKSFTVEKGIYQTSNFRVQPTESIVRFPNITNLCPFGEVFNATRFASVYAWNRKRISNCVADYSVLYNSASFSTFKCYGVSPTKLNDLCFTNVYADSFVIRGDEVRQIAPGQTGKIADYNYKLPDDFTGCVIAWNSNNLDSKVGGNYNYLYRLFRKSNLKPFERDISTEIYQAGSTPCNGAEGFNCYFPLQSYGFQPTNGVGYQPYRVVVLSFELLHAPATVCGPKKSTNLVKNKCVNFNFNGLTGTGVLTESNKKFLPFQQFGRDIADTTDAVRDPQTLEILDITPCSFGGVSVITPGTNTSNQVAVLYQDVNCTEVPVAIHADQLTPTWRVYSTGSNVFQTRAGCLIGAEHVNNSYECDIPIGAGICASYQTQTNSPRRARSVASQSIIAYTMSLGAENSVAYSNNSIAIPTNFTISVTTEILPVSMTKTSVDCTMYICGDSTECSNLLLQYGSFCTQLNRALTGIAVEQDKNTQEVFAQVKQIYKTPPIKDFGGFNFSQILPDPSKPSKRSFIEDLLFNKVTLADAGFIKQYGDCLGDIAARDLICAQKFNGLTVLPPLLTDEMIAQYTSALLAGTITSGWTFCAGAALQIPFAMQMAYRFNGIGVTQNVLYENQKLIANQFNSAIGKIQDSLSSTASALGKLQDVVNQNAQALNTLVKQLSSNFGAISSVLNDILSRLDKVEAEVQIDRLITGRLQSLQTYVTQQLIRAAEIRASANLAATKMSECVCGQSKRVDFCGKGYHLMSFPQSAPHGVVFLHVTYVPAQEKNFTTAPAICHDGKAHFPREGVFVSNGTHWFVTQRNFYEPQIITTDNTFVSGNCDVVIGIVNNTVYDPLQPELDSGGSGYIPEAPRDGQAYVRKDGEWVLLSTFL

SEQ ID NO: 10225 - protein, 1177 aa, Artificial Sequence
  SARS-CoV-2/South Korea/SNU01/2020__EPI_ISL_411929 spike protein (1-1147)(G889C_L1034C) Foldon construct
MFVFLVLLPLVSSQCVNLTTRTQLPPAYTNSFTRGVYYPDKVFRSSVLHSTQDLFLPFFSNVTWFHAIHVSGTNGTKRFDNPVLPFNDGVYFASTEKSNIIRGWIFGTTLDSKTQSLLIVNNATNVVIKVCEFQFCNDPFLGVYYHKNNKSWMESEFRVYSSANNCTFEYVSQPFLMDLEGKQGNFKNLREFVFKNIDGYFKIYSKHTPINLVRDLPQGFWALEPLVDLPIGINITRFQTLLALHRSYLTPGDSSSGWTAGAAAYYVGYLQPRTFLLKYNENGTITDAVDCALDPLSETKCTLKSFTVEKGIYQTSNFRVQPTESIVRFPNITNLCPFGEVFNATRFASVYAWNRKRISNCVADYSVLYNSASFSTFKCYGVSPTKLNDLCFTNVYADSFVIRGDEVRQIAPGQTGKIADYNYKLPDDFTGCVIAWNSNNLDSKVGGNYNYLYRLFRKSNLKPFERDISTEIYQAGSTPCNGVEGFNCYFPLQSYGFQPTNGVGYQPYRVVVLSFELLHAPATVCGPKKSTNLVKNKCVNFNFNGLTGTGVLTESNKKFLPFQQFGRDIADTTDAVRDPQTLEILDITPCSFGGVSVITPGTNTSNQVAVLYQDVNCTEVPVAIHADQLTPTWRVYSTGSNVFQTRAGCLIGAEHVNNSYECDIPIGAGICASYQTQTNSPRRARSVASQSIIAYTMSLGAENSVAYSNNSIAIPTNFTISVTTEILPVSMTKTSVDCTMYICGDSTECSNLLLQYGSFCTQLNRALTGIAVEQDKNTQEVFAQVKQIYKTPPIKDFGGFNFSQILPDPSKPSKRSFIEDLLFNKVTLADAGFIKQYGDCLGDIAARDLICAQKFNGLTVLPPLLTDEMIAQYTSALLAGTITSGWTFCAGAALQIPFAMQMAYRFNGIGVTQNVLYENQKLIANQFNSAIGKIQDSLSSTASALGKLQDVVNQNAQALNTLVKQLSSNFGAISSVLNDILSRLDKVEAEVQIDRLITGRLQSLQTYVTQQLIRAAEIRASANLAATKMSECVCGQSKRVDFCGKGYHLMSFPQSAPHGVVFLHVTYVPAQEKNFTTAPAICHDGKAHFPREGVFVSNGTHWFVTQRNFYEPQIITTDNTFVSGNCDVVIGIVNNTVYDPLQPELDSGGSGYIPEAPRDGQAYVRKDGEWVLLSTFL

SEQ ID NO: 10226 - protein, 1177 aa, Artificial Sequence
  SARS-CoV-2/China/WF0004/2020__EPI_ISL_413694 spike protein (1-1147)(G889C_L1034C) Foldon construct
MFVFLVLLPLVSSQCVNLTTRTQLPPAYTNSFTRGVYYPDKVFRSSVLHSTQDLFLPFFSNVTWFHAIHVSGTNGTKRFDNPVLPFNDGVYFASTEKSNIIRGWIFGTTLDSKTQSLLIVNNATNVVIKVCEFQFCNDPFLGVYYHKNNKSWTESEFRVYSSANNCTFEYVSQPFLMDLEGKQGNFKNLREFVFKNIDGYFKIYSKHTPINLVRDLPQGFSALEPLVDLPIGINITRFQTLLALHRSYLTPGDSSSGWTAGAAAYYVGYLQPRTFLLKYNENGTITDAVDCALDPLSETKCTLKSFTVEKGIYQTSNFRVQPTESIVRFPNITNLCPFGEVFNATRFASVYAWNRKRISNCVADYSVLYNSASFSTFKCYGVSPTKLNDLCFTNVYADSFVIRGDEVRQIAPGQTGKIADYNYKLPDDFTGCVIAWNSNNLDSKVGGNYNYLYRLFRKSNLKPFERDISTEIYQAGSTPCNGVEGFNCYFPLQSYGFQPTNGVGYQPYRVVVLSFELLHAPATVCGPKKSTNLVKNKCVNFNFNGLTGTGVLTESNKKFLPFQQFGRDIADTTDAVRDPQTLEILDITPCSFGGVSVITPGTNTSNQVAVLYQDVNCTEVPVAIHADQLTPTWRVYSTGSNVFQTRAGCLIGAEHVNNSYECDIPIGAGICASYQTQTNSPRRARSVASQSIIAYTMSLGAENSVAYSNNSIAIPTNFTISVTTEILPVSMTKTSVDCTMYICGDSTECSNLLLQYGSFCTQLNRALTGIAVEQDKNTQEVFAQVKQIYKTPPIKDFGGFNFSQILPDPSKPSKRSFIEDLLFNKVTLADAGFIKQYGDCLGDIAARDLICAQKFNGLTVLPPLLTDEMIAQYTSALLAGTITSGWTFCAGAALQIPFAMQMAYRFNGIGVTQNVLYENQKLIANQFNSAIGKIQDSLSSTASALGKLQDVVNQNAQALNTLVKQLSSNFGAISSVLNDILSRLDKVEAEVQIDRLITGRLQSLQTYVTQQLIRAAEIRASANLAATKMSECVCGQSKRFDFCGKGYHLMSFPQSAPHGVVFLHVTYVPAQEKNFTTAPAICHDGKAHFPREGVFVSNGTHWFVTQRNFYEPQIITTDNTFVSGNCDVVIGIVNNTVYDPLQPELDSGGSGYIPEAPRDGQAYVRKDGEWVLLSTFL

SEQ ID NO: 10227 - protein, 1177 aa, Artificial Sequence
  SARS-CoV-2/China/WF0028/2020__EPI_ISL_413791 spike protein (1-1147)(G889C_L1034C) Foldon construct
MFVFLVLLPLVSSQCVNLTTRTQLPPAYTNSFTRGVYYPDKVFRSSVLHSTQDLFLPFFSNVTWFHAIHVSGTNGTKRFDNPVLPFNDGVYFASTEKSNIIRGWIFGTTLDSKTQSLLIVNNATNVVIKVCEFQFCNDPFLGVYYHKNNKSWMESEFRVYSSANNCTFEYVSQPFLMDLEGKQGNFKNLREFVFKNIDGYFKIYSKHTPINLVRDLPQGFSALEPLVDLPIGINITRFQTLLALHRSYLTPGDSSSGWTAGAAAYYVGYLQPRTFLLKYNENGTITDAVDCALDPLSETKCTLKSFTVEKGIYQTSNFRVQPTESIVRFPNITNLCPFGEVFNATRFASVYAWNRKRISNCVADYSVLYNSASFSTFKCYGVSPTKLNDLCFTNVYADSFVIRGDEVRQIAPGQTGKIADYNYKLPDDFTGCVIAWNSNNLDSKVGGNYNYLYRLFRKSNLKPFERDISTEIYQAGSTPCNGVEGFNCYFPLQSYGFQPTNGVGYQPYRVVVLSFELLHAPATVCGPKKSTNLVKNKCVNFNFNGLTGTGVLTESNKKFLPFQQFGRDIADTTDAVRDPQTLEILDITPCSFGGVSVITPGTNTSNQVAVLYQDVNCTEVPVAIHADQLTPTWRVYSTGSNVFQTRAGCLIGAEHVNNSYECDIPIGAGICASYQTQTNSPRRARSVASQSIIAYTMSLGAENSVAYSNNSIAIPTNFTISVTTEILPVSMTKTSVDCTMYICGDSTECSNLLLQYGSFCTQLNRALTGIAVEQDKNTQEVFAQVKQIYKTPPIKDFGGFNFSQILPDPSKPSKRSFIEDLLFNKVTLADAGFIKQYGDCLGDIAARDLICAQKFNGLTVLPPLLTDEMIAQYTSALLAGTITSGWTFCAGAALQIPFAMQMAYRFNGIGVTQNVLYENQKLIANQFNSAIGKIQDSLSSTASALGKLQDVVNQNAQALNTLVKQLSSNFGAISSVLNDILSRLDKVEAEVQIDRLITGRLQSLQTYVTQQLIRAAEIRASANLAATKMSECVCGQSKRVDFCGKGYHLMSFPQSAPHGVVFLHVTYVPAQEKNFTTAPAICHDGKAHFPREGVFVSNGTHWFVTQRNFYEPQIITTDNTFVSGNCDVVIGIVNNTVYDPLQPELESGGSGYIPEAPRDGQAYVRKDGEWVLLSTFL

SEQ ID NO: 10228 - protein, 1177 aa, Artificial Sequence
  SARS-CoV-2/2019-nCoV/USA-CruiseA-18/2020__MT159716.1 spike protein (1-1147)(G889C_L1034C) Foldon construct
MFVFLVLLPLVSSQCVNLTTRTQLPPAYTNSFTRGVYYPDKVFRSSVLHSTQDLFLPFFSNVTWFHAIHVSGTNGTKRFDNPVLPFNDGVYFASTEKSNIIRGWIFGTTLDSKTQSLLIVNNATNVVIKVCEFQFCNDPFLGVYYHKNNKSWMESELRVYSSANNCTFEYVSQPFLMDLEGKQGNFKNLREFVFKNIDGYFKIYSKHTPINLVRDLPQGFSALEPLVDLPIGINITRFQTLLALHRSYLTPGDSSSGWTAGAAAYYVGYLQPRTFLLKYNENGTITDAVDCALDPLSETKCTLKSFTVEKGIYQTSNFRVQPTESIVRFPNITNLCPFGEVFNATRFASVYAWNRKRISNCVADYSVLYNSASFSTFKCYGVSPTKLNDLCFTNVYADSFVIRGDEVRQIAPGQTGKIADYNYKLPDDFTGCVIAWNSNNLDSKVGGNYNYLYRLFRKSNLKPFERDISTEIYQAGSTPCNGVEGFNCYFPLQSYGFQPTNGVGYQPYRVVVLSFELLHAPATVCGPKKSTNLVKNKCVNFNFNGLTGTGVLTESNKKFLPFQQFGRDIADTTDAVRDPQTLEILDITPCSFGGVSVITPGTNTSNQVAVLYQDVNCTEVPVAIHADQLTPTWRVYSTGSNVFQTRAGCLIGAEHVNNSYECDIPIGAGICASYQTQTNSPRRARSVASQSIIAYTMSLGAENSVAYSNNSIAIPTNFTISVTTEILPVSMTKTSVDCTMYICGDSTECSNLLLQYGSFCTQLNRALTGIAVEQDKNTQEVFAQVKQIYKTPPIKDFGGFNFSQILPDPSKPSKRSFIEDLLFNKVTLADAGFIKQYGDCLGDIAARDLICAQKFNGLTVLPPLLTDEMIAQYTSALLAGTITSGWTFCAGAALQIPFAMQMAYRFNGIGVTQNVLYENQKLIANQFNSAIGKIQDSLSSTASALGKLQDVVNQNAQALNTLVKQLSSNFGAISSVLNDILSRLDKVEAEVQIDRLITGRLQSLQTYVTQQLIRAAEIRASANLAATKMSECVCGQSKRVDFCGKGYHLMSFPQSAPHGVVFLHVTYVPAQEKNFTTAPAICHDGKAHFPREGVFVSNGTHWFVTQRNFYEPQIITTDNTFVSGNCDVVIGIVNNTVYDPLQPELDSGGSGYIPEAPRDGQAYVRKDGEWVLLSTFL

SEQ ID NO: 10229 - protein, 1177 aa, Artificial Sequence
  SARS-CoV-2/SARS-CoV-2/Yunnan-01/human/2020/CHN__MT049951.1 spike protein (1-1147)(G889C_L1034C) Foldon construct
MFVFLVLLPLVSSQCVNLTTRTQLPPANTNSFTRGVYYPDKVFRSSVLHSTQDLFLPFFSNVTWFHAIHVSGTNGTKRFDNPVLPFNDGVYFASTEKSNIIRGWIFGTTLDSKTQSLLIVNNATNVVIKVCEFQFCNDPFLGVYYHKNNKSWMESEFRVYSSANNCTFEYVSQPFLMDLEGKQGNFKNLREFVFKNIDGYFKIYSKHTPINLVRDLPQGFSALEPLVDLPIGINITRFQTLLALHRSYLTPGDSSSGWTAGAAAYYVGYLQPRTFLLKYNENGTITDAVDCALDPLSETKCTLKSFTVEKGIYQTSNFRVQPTESIVRFPNITNLCPFGEVFNATRFASVYAWNRKRISNCVADYSVLYNSASFSTFKCYGVSPTKLNDLCFTNVYADSFVIRGDEVRQIAPGQTGKIADYNYKLPDDFTGCVIAWNSNNLDSKVGGNYNYLYRLFRKSNLKPFERDISTEIYQAGSTPCNGVEGFNCYFPLQSYGFQPTNGVGYQPYRVVVLSFELLHAPATVCGPKKSTNLVKNKCVNFNFNGLTGTGVLTESNKKFLPFQQFGRDIADTTDAVRDPQTLEILDITPCSFGGVSVITPGTNTSNQVAVLYQDVNCTEVPVAIHADQLTPTWRVYSTGSNVFQTRAGCLIGAEHVNNSYECDIPIGAGICASYQTQTNSPRRARSVASQSIIAYTMSLGAENSVAYSNNSIAIPTNFTISVTTEILPVSMTKTSVDCTMYICGDSTECSNLLLQYGSFCTQLNRALTGIAVEQDKNTQEVFAQVKQIYKTPPIKDFGGFNFSQILPDPSKPSKRSFIEDLLFNKVTLADAGFIKQYGDCLGDIAARDLICAQKFNGLTVLPPLLTDEMIAQYTSALLAGTITSGWTFCAGAALQIPFAMQMAYRFNGIGVTQNVLYENQKLIANQFNSAIGKIQDSLSSTASALGKLQDVVNQNAQALNTLVKQLSSNFGAISSVLNDILSRLDKVEAEVQIDRLITGRLQSLQTYVTQQLIRAAEIRASANLAATKMSECVCGQSKRVDFCGKGYHLMSFPQSAPHGVVFLHVTYVPAQEKNFTTAPAICHDGKAHFPREGVFVSNGTHWFVTQRNFYEPQIITTDNTFVSGNCDVVIGIVNNTVYDPLQPELDSGGSGYIPEAPRDGQAYVRKDGEWVLLSTFL

SEQ ID NO: 10230 - protein, 1177 aa, Artificial Sequence
  SARS-CoV-2/USA/WA-UW292/2020__EPI_ISL_418077 spike protein (1-1147)(G889C_L1034C) Foldon construct
MFVFLVLLPLVSSQCVNLTTRTQLPPAYTNSFTRGVYYPDKVFRSSVLHSTQDLFLPFFSNVTWFHAIHVSGTNGTKRFDNPVLPFNDGVYFASTEKSNIIRGWIFGTTLDSKTQSLLIVNNATNVVIKVCEFQFCNDPFLGVYYHKNNKSWMESEFRVYSSANNCTFEYVSQPFLMDLEGKQGNFKNLREFVFKNIDGYFKIYSKHTPINLVRDLPQGFSALEPLVDLPIGINITRFQTLLALHRSYLTPGDSSSGWTAGAAAYYVGYLQPRTFLLKYNENGTITDAVDCALDPLSETKCTLKSFTVEKGIYQTSNFRVQPTESIVRFPNITNLCPFGEVFNATRFASVYAWNRKRISNCVADYSVLYNSASFSTFKCYGVSPTKLNDLCFTNVYADSFVIRGDEVRQIAPGQTGKIADYNYKLPDDFTGCVIAWNSNNLDSKVGGNYNYLYRLFRKSNLKPFERDISTEIYQASSTPCNGVEGFNCYFPLQSYGFQPTNGVGYQPYRVVVLSFELLHAPATVCGPKKSTNLVKNKCVNFNFNGLTGTGVLTESNKKFLPFQQFGRDIADTTDAVRDPQTLEILDITPCSFGGVSVITPGTNTSNQVAVLYQDVNCTEVPVAIHADQLTPTWRVYSTGSNVFQTRAGCLIGAEHVNNSYECDIPIGAGICASYQTQTNSPRRARSVASQSIIAYTMSLGAENSVAYSNNSIAIPTNFTISVTTEILPVSMTKTSVDCTMYICGDSTECSNLLLQYGSFCTQLNRALTGIAVEQDKNTQEVFAQVKQIYKTPPIKDFGGFNFSQILPDPSKPSKRSFIEDLLFNKVTLADAGFIKQYGDCLGDIAARDLICAQKFNGLTVLPPLLTDEMIAQYTSALLAGTITSGWTFCAGAALQIPFAMQMAYRFNGIGVTQNVLYENQKLIANQFNSAIGKIQDSLSSTASALGKLQDVVNQNAQALNTLVKQLSSNFGAISSVLNDILSRLDKVEAEVQIDRLITGRLQSLQTYVTQQLIRAAEIRASANLAATKMSECVCGQSKRVDFCGKGYHLMSFPQSAPHGVVFLHVTYVPAQEKNFTTAPAICHDGKAHFPREGVFVSNGTHWFVTQRNFYEPQIITTDNTFVSGNCDVVIGIVNNTVYDPLQPELDSGGSGYIPEAPRDGQAYVRKDGEWVLLSTFL

SEQ ID NO: 10231 - protein, 1177 aa, Artificial Sequence
  SARS-CoV-2/Iceland/192/2020__EPI_ISL_417819 spike protein (1-1147)(G889C_L1034C) Foldon construct
MFVFFVLLPLVSSQCVNLTTRTQLPPAYTNSFTRGVYYPDKVFRSSVLHSTQDLFLPFFSNVTWFHAIHVSGTNGTKRFDNPVLPFNDGVYFASTEKSNIIRGWIFGTTLDSKTQSLLIVNNATNVVIKVCEFQFCNDPFLGVYYHKNNKSWMESEFRVYSSANNCTFEYVSQPFLMDLEGKQGNFKNLREFVFKNIDGYFKIYSKHTPINLVRDLPQGFSALEPLVDLPIGINITRFQTLLALHRSYLTPGDSSSGWTAGAAAYYVGYLQPRTFLLKYNENGTITDAVDCALDPLSETKCTLKSFTVEKGIYQTSNFRVQPTESIVRFPNITNLCPFGEVFNATRFASVYAWNRKRISNCVADYSVLYNSASFSTFKCYGVSPTKLNDLCFTNVYADSFVIRGDEVRQIAPGQTGKIADYNYKLPDDFTGCVIAWNSNNLDSKVGGNYNYLYRLFRKSNLKPFERDISTEIYQAGSTPCNGVEGFNCYFPLQSYGFQPTNGVGYQPYRVVVLSFELLHAPATVCGPKKSTNLVKNKCVNFNFNGLTGTGVLTESNKKFLPFQQFGRDIADTTDAVRDPQTLEILDITPCSFGGVSVITPGTNTSNQVAVLYQGVNCTEVPVAIHADQLTPTWRVYSTGSNVFQTRAGCLIGAEHVNNSYECDIPIGAGICASYQTQTNSPRRARSVASQSIIAYTMSLGAENSVAYSNNSIAIPTNFTISVTTEILPVSMTKTSVDCTMYICGDSTECSNLLLQYGSFCTQLNRALTGIAVEQDKNTQEVFAQVKQIYKTPPIKDFGGFNFSQILPDPSKPSKRSFIEDLLFNKVTLADAGFIKQYGDCLGDIAARDLICAQKFNGLTVLPPLLTDEMIAQYTSALLAGTITSGWTFCAGAALQIPFAMQMAYRFNGIGVTQNVLYENQKLIANQFNSAIGKIQDSLSSTASALGKLQDVVNQNAQALNTLVKQLSSNFGAISSVLNDILSRLDKVEAEVQIDRLITGRLQSLQTYVTQQLIRAAEIRASANLAATKMSECVCGQSKRVDFCGKGYHLMSFPQSAPHGVVFLHVTYVPAQEKNFTTAPAICHDGKAHFPREGVFVSNGTHWFVTQRNFYEPQIITTDNTFVSGNCDVVIGIVNNTVYDPLQPELDSGGSGYIPEAPRDGQAYVRKDGEWVLLSTFL

SEQ ID NO: 10232 - protein, 1177 aa, Artificial Sequence
  SARS-CoV-2/Belgium/ULG-6939/2020__EPI_ISL_417020 spike protein (1-1147)(G889C_L1034C) Foldon construct
MFVFLVLLPLVSSQCVNLTTRTQLPPAYTNSFTRGVYYPDKVFRSSVLHSTQDLFLPFFSNVTWFHAIHVSGTNGTKRFDNPVLPFNDGVYFASTEKSNIIRGWIFGTTLDSKTQSLLIVNNATNVVIKVCEFQFCNDPFLGVYYHKNNKSWMESEFRVYSSANNCTFEYVSQPFLMDLEGKQGNFKNLREFVFKNIDGYFKIYSKHTPINLVRDLPQGFSALEPLVDLPIGINITRFQTLLALHRSYLTPGDSSSGWTAGAAAYYVGYLQPRTFLLKYNENGTITDAVDCALDPLSETKCTLKSFTVEKGIYQTSNFRVQPTESIVRFPNITNLCPFGEVFNATRFASVYAWNRKRISNCVADYSVLYNSASFSTFKCYGVSPTKLNDLCFTNVYADSFVIRGDEVRQIAPGQTGKIADYNYKLPDDFTGCVIAWNSNNLDSKVGGNYNYLYRLFRKSNLKPFERDISTEIYQAGSTPCNGVEGFNCYFPLQSYGFQPTNGVGYQPYRVVVLSFELLHAPATVCGPKKSTNLVKNKCVNFNFNGLTGTGVLTESNKKFLPFQQFGRDIADTTDAVRDPQTLEILDITPCSFGGVSVITPGTNTSNQVAVLYQGVNCTEVPVAIHADQLTPTWRVYSTGSNVFQTRAGCLIGAEHVNNSYECDIPIGAGICASYQTQTNSPRRARSVASQSIIAYTMSLGAENSVVYSNNSIAIPTNFTISVTTEILPVSMTKTSVDCTMYICGDSTECSNLLLQYGSFCTQLNRALTGIAVEQDKNTQEVFAQVKQIYKTPPIKDFGGFNFSQILPDPSKPSKRSFIEDLLFNKVTLADAGFIKQYGDCLGDIAARDLICAQKFNGLTVLPPLLTDEMIAQYTSALLAGTITSGWTFCAGAALQIPFAMQMAYRFNGIGVTQNVLYENQKLIANQFNSAIGKIQDSLSSTASALGKLQDVVNQNAQALNTLVKQLSSNFGAISSVLNDILSRLDKVEAEVQIDRLITGRLQSLQTYVTQQLIRAAEIRASANLAATKMSECVCGQSKRVDFCGKGYHLMSFPQSAPHGVVFLHVTYVPAQEKNFTTAPAICHDGKAHFPREGVFVSNGTHWFVTQRNFYEPQIITTDNTFVSGNCDVVIGIVNNTVYDPLQPELDSGGSGYIPEAPRDGQAYVRKDGEWVLLSTFL

SEQ ID NO: 10233 - protein, 1177 aa, Artificial Sequence
  SARS-CoV-2/France/HF2496/2020__EPI_ISL_418231 spike protein (1-1147)(G889C_L1034C) Foldon construct
MFVFLVLLPLVSSQCVNLTTRTQLPPAYTNSFTRGVYYPDKVFRSSVLHSTQDLFLPFFSNVTWFHAIHVSGTNGTKRFDNPVLPFNDGVYFASTEKSNIIRGWIFGTTLDSKTQSLLIVNNATNVVIKVCEFQFCNDPFLGVYYHKNNKSWMESEFRVYSSANNCTFEYVSQPFLMDLEGKQGNFKNLREFVFKNIDGYFKIYSKHTPINLVRDLPQGFSALEPLVDLPIGINITRFQTLLALHRSYLTPGDSSSGWTAGAAAYYVGYLQPRTFLLKYNENGTITDAVDCALDPLSETKCTLKSFTVEKGIYQTSNFRVQPTESIVRFPNITNLCPFGEVFNATRFASVYAWNRKRISNCVADYSVLYNSASFSTFKCYGVSPTKLNDLCFTNVYADSFVIRGDEVRQIAPGQTGKIADYNYKLPDDFTGCVIAWNSNNLDSKVGGNYNYLYRLFRKSNLKPFERDISTEIYQAGSTPCNGVEGFNCYFPLQSYGFQPTNGVGYQPYRVVVLSFELLHAPATVCGPKKSTNLVKNKCVNFNFNGLTGTGVLTESNKKFLPFQQFGRDIADTTDAVRDPQTLEILDITPCSFGGVSVITPGTNTSNQVAVLYQGVNCTEVPVAIHADQLTPTWRVYSTGSNVFQTRAGCLIGAEHVNNSYECDIPIGAGICASYQTQTNSPRRARSVASQSIIAYTMSLGAENSVAYSNNSIAIPTNFTISVTTEILPVSMTKTSVDCTMYICGDSTECSNLLLQYGSFCTQLNRALTGIAVEQDKNTQEVFAQVKQIYKTPPIKDFGGFNFSQILPDPSKPSKRSFIEDLLFNKVTLADAGFIKQYGDCLGDIVARDLICAQKFNGLTVLPPLLTDEMIAQYTSALLAGTITSGWTFCAGAALQIPFAMQMAYRFNGIGVTQNVLYENQKLIANQFNSAIGKIQDSLSSTASALGKLQDVVNQNAQALNTLVKQLSSNFGAISSVLNDILSRLDKVEAEVQIDRLITGRLQSLQTYVTQQLIRAAEIRASANLAATKMSECVCGQSKRVDFCGKGYHLMSFPQSAPHGVVFLHVTYVPAQEKNFTTAPAICHDGKAHFPREGVFVSNGTHWFVTQRNFYEPQIITTDNTFVSGNCDVVIGIVNNTVYDPLQPELDSGGSGYIPEAPRDGQAYVRKDGEWVLLSTFL

SEQ ID NO: 10234 - protein, 1177 aa, Artificial Sequence
  SARS-CoV-2/USA/WA-UW291/2020__EPI_ISL_418076 spike protein (1-1147)(G889C_L1034C) Foldon construct
MFVFLVLLPLVSSQCVNLTTRTQLPPAYTNSFTRGVYYPDKVFRSSVLHSTQDLFLPFFSNVTWFHAIHVSGTNGTKRFDNPVLPFNDGVYFASTEKSNIIRGWIFGTTLDSKTQSLLIVNNATNVVIKVCEFQFCNDPFLGVYYHKNNKSWMESEFRVYSSANNCTFEYVSQPFLMDLEGKQGNFKNLREFVFKNIDGYFKIYSKHTPINLVRDLPQGFSALEPLVDLPIGINITRFQTLLALHRSYLTPGDSSSGWTAGAAAYYVGYLQPRTFLLKYNENGTITDAVDCALDPLSETKCTLKSFTVEKGIYQTSNFRVQPTESIVRFPNITNLCPFGEVFNATRFASVYAWNRKRISNCVADYSVLYNSASFSTFKCYGVSPTKLNDLCFTNVYADSFVIRGDEVRQIAPGQTGKIADYNYKLPDDFTGCVIAWNSNNLDSKVGGNYNYLYRLFRKSNLKPFERDISTEIYQAGSTPCNGVEGFNCYFPLQSYGFQPTNGVGYQPYRVVVLSFELLHAPATVCGPKKSTNLVKNKCVNFNFNGLTGTGVLTESNKKFLPFQQFGRDIADTTDAVRDPQTLEILDITPCSFGGVSVITPGTNTSNQVAVLYQGVNCTEVPVAIHADQLTPTWRVYSTGSNVFQTRAGCLIGAEHVNNSYECDIPIGAGICASYQTQTNSPRRARSVASQSIIAYTMSLGAENSVAYSNNSIAIPTNFTISVTTEILPVSMTKTSVDCTMYICGDSTECSNLLLQYGSFCTQLNRALTGIAVEQDKNTQEVFAQVKQIYKTPPIKDFGGFNFSQILPDPSKPSKRSFIEDLLFNKVTLADAGFIKQYGDCLGDIAARDLICAQKFNGLTVLPPLLTDEMIAQYTSALLAGTITSGWTFCAGAALQIPFAMQMAYRFNGIGVTQNVLYENQKLIANQFNSAIGKIQYSLSSTASALGKLQDVVNQNAQALNTLVKQLSSNFGAISSVLNDILSRLDKVEAEVQIDRLITGRLQSLQTYVTQQLIRAAEIRASANLAATKMSECVCGQSKRVDFCGKGYHLMSFPQSAPHGVVFLHVTYVPAQEKNFTTAPAICHDGKAHFPREGVFVSNGTHWFVTQRNFYEPQIITTDNTFVSGNCDVVIGIVNNTVYDPLQPELDSGGSGYIPEAPRDGQAYVRKDGEWVLLSTFL

SEQ ID NO: 10235 - protein, 1177 aa, Artificial Sequence; identical to SEQ ID NO: 10198
  SARS-CoV-2/Portugal/PT0034/2020__EPI_ISL_418019 spike protein (1-1147)(G889C_L1034C) Foldon construct

SEQ ID NO: 10236 - protein, 1177 aa, Artificial Sequence; identical to SEQ ID NO: 10190
  SARS-CoV-2/Iceland/202/2020__EPI_ISL_417750 spike protein (1-1147)(G889C_L1034C) Foldon construct

SEQ ID NO: 10237 - protein, 1177 aa, Artificial Sequence
  SARS-CoV-2/USA/WA-UW261/2020__EPI_ISL_418046 spike protein (1-1147)(G889C_L1034C) Foldon construct
MFVFLVLLPLVSSQCVNLTTRTQLPPAYTNSFTRGVYYPDKVFRSSVLHSTQDLFLPFFSNVTWFHAIHVSGTNGTKRFDNPVLPFNDGVYFASTEKSNIIRGWIFGTTLDSKTQSLLIVNNATNVVIKVCEFQFCNDPFLGVYYHKNNKSWMESEFRVYSSANNCTFEYVSQPFLMDLEGKQGNFKNLREFVFKNIDGYFKIYSKHTPINLVRDLPQGFSALEPLVDLPIGINITRFQTLLALHRSYLTPGDSSSGWTAGAAAYYVGYLQPRTFLLKYNENGTITDAVDCALDPLSETKCTLKSFTVEKGIYQTSNFRVQPTESIVRFPNITNLCPFGEVFNATRFTSVYAWNRKRISNCVADYSVLYNSASFSTFKCYGVSPTKLNDLCFTNVYADSFVIRGDEVRQIAPGQTGKIADYNYKLPDDFTGCVIAWNSNNLDSKVGGNYNYLYRLFRKSNLKPFERDISTEIYQAGSTPCNGVEGFNCYFPLQSYGFQPTNGVGYQPYRVVVLSFELLHAPATVCGPKKSTNLVKNKCVNFNFNGLTGTGVLTESNKKFLPFQQFGRDIADTTDAVRDPQTLEILDITPCSFGGVSVITPGTNTSNQVAVLYQDVNCTEVPVAIHADQLTPTWRVYSTGSNVFQTRAGCLIGAEHVNNSYECDIPIGAGICASYQTQTNSPRRARSVASQSIIAYTMSLGAENSVAYSNNSIAIPTNFTISVTTEILPVSMTKTSVDCTMYICGDSTECSNLLLQYGSFCTQLNRALTGIAVEQDKNTQEVFAQVKQIYKTPPIKDFGGFNFSQILPDPSKPSKRSFIEDLLFNKVTLADAGFIKQYGDCLGDIAARDLICAQKFNGLTVLPPLLTDEMIAQYTSALLAGTITSGWTFCAGAALQIPFAMQMAYRFNGIGVTQNVLYENQKLIANQFNSAIGKIQDSLSSTASALGKLQDVVNQNAQALNTLVKQLSSNFGAISSVLNDILSRLDKVEAEVQIDRLITGRLQSLQTYVTQQLIRAAEIRASANLAATKMSECVCGQSKRVDFCGKGYHLMSFPQSAPHGVVFLHVTYVPAQEKNFTTAPAICHDGKAHFPREGVFVSNGTHWFVTQRNFYEPQIITTDNTFVSGNCDVVIGIVNNTVYDPLQPELDSGGSGYIPEAPRDGQAYVRKDGEWVLLSTFL

SEQ ID NO: 10238 - protein, 1177 aa, Artificial Sequence
  SARS-CoV-2/Portugal/PT0035/2020__EPI_ISL_418020 spike protein (1-1147)(G889C_L1034C) Foldon construct
MFVFLVLLPLVSSQCVNLTTRTQLPPAYTNSFTRGVYYPDKVFRSSVLHSTQDLFLPFFSNVTWFHAIHVSGTNGTKRFDNPVLPFNDGVYFASTEKSNIIRGWIFGTTLDSKTQSLLIVNNATNVVIKVCEFQFCNDPFLGVYYHKNNKSWMESEFRVYSSANNCTFEYVSQPFLMDLEGKQGNFKNLREFVFKNIDGYFKIYSKHTPINLVRDLPQGFSALEPLVDLPIGINITRFQTLLALHRSYLTPGDSSSGWTAGAAAYYVGYLQPRTFLLKYNENGTITDAVDCALDPLSETKCTLKSFTVEKGIYQTSNFRVQPTESIVRFPNITNLCPFGEVFNATRFASVYAWNRKRISNCVADYSVLYNSASFSTFKCYGVSPTKLNDLCFTNVYADSFVIRGDEVRQIAPGQTGKIADYNYKLPDDFTGCVIAWNSNNLDSKVGGNYNYLYRLFRKSNLKPFERDISTEIYQAGSTPCNGVEGFNCYFPLQSYGFQPTNGVGYQPYRVVVLSFELLHAPATVCGPKKSTNLVKNKCVNFNFNGLTGTGVLTESNKKFLPFQQFGRDIADTTDAVRDPQTLEILDITPCSFGGVSVITPGTNTSNQVAVLYQDVNCTEVPVAIHADQLTPTWRVYSTGSNVFQTRAGCLIGAEHVNNSYECDIPIGAGICASYQTQTNSPRRARSVASQSIIAYTMSLGAENSVAYSNNSIAIPTNFTISVTTEILPVSMTKTSVDCTMYICGDSTECSNLLLQYGSFCTQLNRALTGIAVEQDKNTQEVFAQVKQIYKTPPIKDFGGFNFSQILPDPSKPSKRSFIEDLLFNKVTLADAGFIKQYGDCLGDISARDLICAQKFNGLTVLPPLLTDEMIAQYTSALLAGTITSGWTFCAGAALQIPFAMQMAYRFNGIGVTQNVLYENQKLIANQFNSAIGKIQDSLSSTASALGKLQDVVNQNAQALNTLVKQLSSNFGAISSVLNDILSRLDKVEAEVQIDRLITGRLQSLQTYVTQQLIRAAEIRASANLAATKMSECVCGQSKRVDFCGKGYHLMSFPQSAPHGVVFLHVTYVPAQEKNFTTAPAICHDGKAHFPREGVFVSNGTHWFVTQRNFYEPQIITTDNTFVSGNCDVVIGIVNNTVYDPLQPELDSGGSGYIPEAPRDGQAYVRKDGEWVLLSTFL

SEQ ID NO: 10239 - protein, 1177 aa, Artificial Sequence
  SARS-CoV-2/USA/NY-NYUMC7/2020__EPI_ISL_418192 spike protein (1-1147)(G889C_L1034C) Foldon construct
MFVFLVLLPLVSSQCVNLTTRTQLPPAYTNSFTRGVYYPDKVFRSSVLHSTQDLFLPFFSNVTWFHAIHVSGTNGTKRFDNPVLPFNDGVYFASTEKSNIIRGWIFGTTLDSKTQSLLIVNNATNVVIKVCEFQFCNDPFLGVYHHKNNKSWMESEFRVYSSANNCTFEYVSQPFLMDLEGKQGNFKNLREFVFKNIDGYFKIYSKHTPINLVRDLPQGFSALEPLVDLPIGINITRFQTLLALHRSYLTPGDSSSGWTAGAAAYYVGYLQPRTFLLKYNENGTITDAVDCALDPLSETKCTLKSFTVEKGIYQTSNFRVQPTESIVRFPNITNLCPFGEVFNATRFASVYAWNRKRISNCVADYSVLYNSASFSTFKCYGVSPTKLNDLCFTNVYADSFVIRGDEVRQIAPGQTGKIADYNYKLPDDFTGCVIAWNSNNLDSKVGGNYNYLYRLFRKSNLKPFERDISTEIYQAGSTPCNGVEGFNCYFPLQSYGFQPTNGVGYQPYRVVVLSFELLHAPATVCGPKKSTNLVKNKCVNFNFNGLTGTGVLTESNKKFLPFQQFGRDIADTTDAVRDPQTLEILDITPCSFGGVSVITPGTNTSNQVAVLYQGVNCTEVPVAIHADQLTPTWRVYSTGSNVFQTRAGCLIGAEHVNNSYECDIPIGAGICASYQTQTNSPRRARSVASQSIIAYTMSLGAENSVAYSNNSIAIPTNFTISVTTEILPVSMTKTSVDCTMYICGDSTECSNLLLQYGSFCTQLNRALTGIAVEQDKNTQEVFAQVKQIYKTPPIKDFGGFNFSQILPDPSKPSKRSFIEDLLFNKVTLADAGFIKQYGDCLGDIAARDLICAQKFNGLTVLPPLLTDEMIAQYTSALLAGTITSGWTFCAGAALQIPFAMQMAYRFNGIGVTQNVLYENQKLIANQFNSAIGKIQDSLSSTASALGKLQDVVNQNAQALNTLVKQLSSNFGAISSVLNDILSRLDKVEAEVQIDRLITGRLQSLQTYVTQQLIRAAEIRASANLAATKMSECVCGQSKRVDFCGKGYHLMSFPQSAPHGVVFLHVTYVPAQEKNFTTAPAICHDGKAHFPREGVFVSNGTHWFVTQRNFYEPQIITTDNTFVSGNCDVVIGIVNNTVYDPLQPELDSGGSGYIPEAPRDGQAYVRKDGEWVLLSTFL

SEQ ID NO: 10240 - protein, 1177 aa, Artificial Sequence
  SARS-CoV-2/Iceland/189/2020__EPI_ISL_417709 spike protein (1-1147)(G889C_L1034C) Foldon construct
MFVFLVLLPLVSSQCVNLTTRTQLPPAYTNSFTRGVYYPDKVFRSSVLHSTQDLFLPFFSNVTWFHAIHVSGTNGTKRFDNPVLPFNDGVYFASTEKSNIIRGWIFGTTLDSKTQSLLIVNNATNVVIKVCEFQFCNDPFLGVYYHKNNKSWMESEFRVYSSANNCTFEYVSQPFLMDLEGKQGNFKNLREFVFKNIDGYFKIYSKHTPINLVRDLPQGFSALEPLVDLPIGINITRFQTLLALHRSYLTPGDSSSGWTAGAAAYYVGYLQPRTFLLKYNENGTITDAVDCALDPLSETKCTLKSFTVEKGIYQTSNFRVQPTESIVRFPNITNLCPFGEVFNATRFASVYAWNRKRISNCVADYSVLYNSASFSTFKCYGVSPTKLNDLCFTNVYADSFVIRGDEVRQIAPGQTGKIADYNYKLPDDFTGCVIAWNSNNLDSKVGGNYNYLYRLFRKSNLKPFERDISTEIYQAGSTPCNGVEGFNCYFPLQSYGFQPTNGVGYQPYRVVVLSFELLHAPATVCGPKKSTNLVKNKCVNFNFNGLTGTGVLTESNKKFLPFQQFGRDIADTTDAVRDPQTLEILDITPCSFGGVSVITPGTNTSNQVAVLYQGVNCTEVPVAIHADQLTPTWRVYSTGSNVFQTRAGCLIGAEHVNNSYECDIPIGAGICASYQTQTNSPRRARSVASQSIIAYTMSLGAENSVAYSNNSIAIPTNFTISVTTEILPVSMTKTSVDCTMYICGDSTECSNLLLQYGSFCTQLNRALTGIAVEQDKNTQEVFAQVKQIYKTPPIKDFGGFNFSQILPDPSKPSKRSFIEDLLFNKVTLADAGFTKQYGDCLGDIAARDLICAQKFNGLTVLPPLLTDEMIAQYTSALLAGTITSGWTFCAGAALQIPFAMQMAYRFNGIGVTQNVLYENQKLIANQFNSAIGKIQDSLSSTASALGKLQDVVNQNAQALNTLVKQLSSNFGAISSVLNDILSRLDKVEAEVQIDRLITGRLQSLQTYVTQQLIRAAEIRASANLAATKMSECVCGQSKRVDFCGKGYHLMSFPQSAPHGVVFLHVTYVPAQEKNFTTAPAICHDGKAHFPREGVFVSNGTHWFVTQRNFYEPQIITTDNTFVSGNCDVVIGIVNNTVYDPLQPELDSGGSGYIPEAPRDGQAYVRKDGEWVLLSTFL

SEQ ID NO: 10241 - protein, 1177 aa, Artificial Sequence
  SARS-CoV-2/Australia/NSW56/2020__EPI_ISL_417408 spike protein (1-1147)(G889C_L1034C) Foldon construct
MFVFLVLLPLVSSQCVNLTTRTQLPPAYTNSFTRGVYYPDKVFRSSVLHSTQDLFLPFFSNVTWFHAIHVSGTNGTKRFDNPVLPFNDGVYFASTEKSNIIRGWIFGTTLDSKTQSLLIVNNATNVVIKVCEFQFCNDPFLGVYYHKNNKSWMESEFRVYSSANNCTFEYVSQPFLMDLEGKQGNFKNLREFVFKNIDGYFKIYSKHTPINLVRDLPQGFSALEPLVDLPIGINITRFQTLLALHRSYLTPGDSSSGWTAGAAAYYVGYLQPRTFLLKYNENGTITDAVDCALDPLSETKCTLKSFTVEKGIYQTSNFRVQPTESIVRFPNITNLCPFGEVFNATRFASVYAWNRKRISNCVADYSVLYNSASFSTFKCYGVSPTKLNDLCFTNVYADSFVIRGDEVRQIAPGQTGKIADYNYKLPDDFTGCVIAWNSNNLDSKVGGNYNYLYRLFRKSNLKPFERDISTEIYQAGSTPCNGVEGFNCYFPLQSYGFQPTNGVGYQPYRVVVLSFELLHAPATVCGPKKSTNLVKNKCVNFNFNGLTGTGVLTESNKKFLPFQQFGRDIADTTDAVRDPQTLEILDITPCSFGGVSVITPGTNTSNQVAVLYQDVNCTEVPVAIHADQLTPTWRVYSTGSNVFQTRAGCLIGAEHVNNSYECDIPIGAGICASYQTQTNSPRRARSVASQSIIAYTMSLGAENSVAYSNNSIAIPTNFTISVTTEILPVSMTKTSVDCTMYICGDSTECSNLLLQYGSFCTQLNRALTGIAVEQDKNTQEVFAQVKQIYKTPPIKDFGGFNFSQILPDSSKPSKRSFIEDLLFNKVTLADAGFIKQYGDCLGDIAARDLICAQKFNGLTVLPPLLTDEMIAQYTSALLAGTITSGWTFCAGAALQIPFAMQMAYRFNGIGVTQNVLYENQKLIANQFNSAIGKIQDSLSSTASALGKLQDVVNQNAQALNTLVKQLSSNFGAISSVLNDILSRLDKVEAEVQIDRLITGRLQSLQTYVTQQLIRAAEIRASANLAATKMSECVCGQSKRVDFCGKGYHLMSFPQSAPHGVVFLHVTYVPAQEKNFTTAPAICHDGKAHFPREGVFVSNGTHWFVTQRNFYEPQIITTDNTFVSGNCDVVIGIVNNTVYDPLQPELDSGGSGYIPEAPRDGQAYVRKDGEWVLLSTFL

SEQ ID NO: 10242 - protein, 1177 aa, Artificial Sequence
  SARS-CoV-2/Iceland/280/2020__EPI_ISL_417608 spike protein (1-1147)(G889C_L1034C) Foldon construct
MFVFLVLLPLVSSQCVNLTTRTQLPPAYTNSFTRGVYYPDKVFRSSVLHSTQDLFLPFFSNVTWFHAIHVSGTNGTKRFDNPVLPFNDGVYFASTEKSNIIRGWIFGTTLDSKTQSLLIVNNATNVVIKVCEFQFCNDPFLGVYYHKNNKSWMESEFRVYSSANNCTFEYVSQPFLMDLEGKQGNFKNLREFVFKNIDGYFKIYSKHTPINLVRDLPQGFSALEPLVDLPIGINITRFQTLLALHRSYLTPGDSSSGWTAGAAAYYVGYLQPRTFLLKYNENGTITDAVDCALDPLSETKCTLKSFTVEKGIYQTSNFRVQPTESIVRFPNITNLCPFGEVFNATRFASVYAWNRKRISNCVADYSVLYNSASFSTFKCYGVSPTKLNDLCFTNVYADSFVIRGDEVRQIAPGQTGKIADYNYKLPDDFTGCVIAWNSNNLDSKVGGNYNYLYRLFRKSNLKPFERDISTEIYQAGSTPCNGVEGFNCYFPLQSYGFQPTNGVGYQPYRVVVLSFELLHAPATVCGPKKSTNLVKNKCVNFNFNGLTGTGVLTESNKKFLPFQQFGRDIADTTDAVRDPQTLEILDITPCSFGGVSVITPGTNTSNQVAVLYQGVNCTEVPVAIHADQLTPTWRVYSTGSNVFQTRAGCLIGAEHVNNSYECDIPIGAGICASYHTQTNSPRRARSVASQSIIAYTMSLGAENSVAYSNNSIAIPTNFTISVTTEILPVSMTKTSVDCTMYICGDSTECSNLLLQYGSFCTQLNRALTGIAVEQDKNTQEVFAQVKQIYKTPPIKDFGGFNFSQILPDPSKPSKRSFIEDLLFNKVTLADAGFIKQYGDCLGDIAARDLICAQKFNGLTVLPPLLTDEMIAQYTSALLAGTITSGWTFCAGAALQIPFAMQMAYRFNGIGVTQNVLYENQKLIANQFNSAIGKIQDSLSSTASALGKLQDVVNQNAQALNTLVKQLSSNFGAISSVLNDILSRLDKVEAEVQIDRLITGRLQSLQTYVTQQLIRAAEIRASANLAATKMSECVCGQSKRVDFCGKGYHLMSFPQSAPHGVVFLHVTYVPAQEKNFTTAPAICHDGKAHFPREGVFVSNGTHWFVTQRNFYEPQIITTDNTFVSGNCDVVIGIVNNTVYDPLQPELDSGGSGYIPEAPRDGQAYVRKDGEWVLLSTFL

SEQ ID NO: 10243 - protein, 1177 aa, Artificial Sequence; identical to SEQ ID NO: 10198
  SARS-CoV-2/Iceland/247/2020__EPI_ISL_417575 spike protein (1-1147)(G889C_L1034C) Foldon construct

SEQ ID NO: 10244 - protein, 1177 aa, Artificial Sequence
  SARS-CoV-2/Iceland/238/2020__EPI_ISL_417566 spike protein (1-1147)(G889C_L1034C) Foldon construct
MFVFLVLLPLVSSQCVNLTTRTQLPPAYTNSFTRGVYYPDKVFRSSVLHSTQDLFLPFFSNVTWFHAIHVSGTNGTKRFDNPVLPFNDGVYFASTEKSNIIRGWIFGTTLDSKTQSLLIVNNATNVVIKVCEFQFCNDPFLGVYYHKNNKSWMESEFRVYSSANNCTFEYVSQPFLMDLEGKQGNFKNLREFVFKNIDGYFKIYSKHTPINLVRDLPQGFSALEPLVDLPIGINITRFQTLLALHRSYLTPGDSSSGWTAGAAAYYVGYLQPRTFLLKYNENGTITDAVDCALDPLSETKCTLKSFTVEKGIYQTSNFRVQPTESIVRFPNITNLCPFGEVFNATRFASVYAWNRKRISNCVADYSVLYNSASFSTFKCYGVSPTKLNDLCFTNVYADSFVIRGDEVRQIAPGQTGKIADYNYKLPDDFTGCVIAWNSNNLDSKVGGNYNYLYRLFRKSNLKPFERDISTEIYQAGSTPCNGVEGFNCYFPLQSYGFQPTNGVGYQPYRVVVLSFELLHAPATVCGPKKSTNLVKNKCVNFNFNGLTGTGVLTESNKKFLPFQQFGRDIADTTDAVRDPQTLEILDITPCSFGGVSVITPGTNTSNQVAVLYQGVNCTEVPVAIHADQLTPTWRVYSTGSNVFQTRAGCLIGAEHVNNSYECDIPIGAGICASYQTQTNSPRRARSVASQSIIAYTMSLGAENSVAYSNNSIAIPTNFTISVTTEILPVSMTKTSVDCTMYICGDSTECSNLLLQYGSFCTQLNRALTGIAVEQDKNTQEVFAQVKQIYKTPPIKDFGGFNFSQILPDPSKPSKRSFIEDLLFNKVTLADVGFIKQYGDCLGDIAARDLICAQKFNGLTVLPPLLTDEMIAQYTSALLAGTITSGWTFCAGAALQIPFAMQMAYRFNGIGVTQNVLYENQKLIANQFNSAIGKIQDSLSSTASALGKLQDVVNQNAQALNTLVKQLSSNFGAISSVLNDILSRLDKVEAEVQIDRLITGRLQSLQTYVTQQLIRAAEIRASANLAATKMSECVCGQSKRVDFCGKGYHLMSFPQSAPHGVVFLHVTYVPAQEKNFTTAPAICHDGKAHFPREGVFVSNGTHWFVTQRNFYEPQIITTDNTFVSGNCDVVIGIVNNTVYDPLQPELDSGGSGYIPEAPRDGQAYVRKDGEWVLLSTFL

SEQ ID NO: 10245 - protein, 1177 aa, Artificial Sequence
  SARS-CoV-2/Greece/16/2020__EPI_ISL_418265 spike protein (1-1147)(G889C_L1034C) Foldon construct
MFVFLVLLPLVSSQCVNLTTRTQLPPAYTNSFTRGVYYPDKVFRSSVLHSTQDLFLPFFSNVTWFHAIHVSGTNGTKRFDNPVLPFNDGVYFASTEKSNIIRGWIFGTTLDSKTQSLLIVNNATNVVIKVCEFQFCNDPFLGVYYHKNNKSWMESEFRVYSSANNCTFEYVSQPFLMDLEGKQGNFKNLREFVFKNVDGYFKIYSKHTPINLVRDLPQGFSALEPLVDLPIGINITRFQTLLALHRSYLTPGDSSSGWTAGAAAYYVGYLQPRTFLLKYNENGTITDAVDCALDPLSETKCTLKSFTVEKGIYQTSNFRVQPTESIVRFPNITNLCPFGEVFNATRFASVYAWNRKRISNCVADYSVLYNSASFSTFKCYGVSPTKLNDLCFTNVYADSFVIRGDEVRQIAPGQTGKIADYNYKLPDDFTGCVIAWNSNNLDSKVGGNYNYLYRLFRKSNLKPFERDISTEIYQAGSTPCNGVEGFNCYFPLQSYGFQPTNGVGYQPYRVVVLSFELLHAPATVCGPKKSTNLVKNKCVNFNFNGLTGTGVLTESNKKFLPFQQFGRDIADTTDAVRDPQTLEILDITPCSFGGVSVITPGTNTSNQVAVLYQDVNCTEVPVAIHADQLTPTWRVYSTGSNVFQTRAGCLIGAEHVNNSYECDIPIGAGICASYQTQTNSPRRARSVASQSIIAYTMSLGAENSVAYSNNSIAIPTNFTISVTTEILPVSMTKTSVDCTMYICGDSTECSNLLLQYGSFCTQLNRALTGIAVEQDKNTQEVFAQVKQIYKTPPIKDFGGFNFSQILPDPSKPSKRSFIEDLLFNKVTLADAGFIKQYGDCLGDIAARDLICAQKFNGLTVLPPLLTDEMIAQYTSALLAGTITSGWTFCAGAALQIPFAMQMAYRFNGIGVTQNVLYENQKLIANQFNSAIGKIQDSLSSTASALGKLQDVVNQNAQALNTLVKQLSSNFGAISSVLNDILSRLDKVEAEVQIDRLITGRLQSLQTYVTQQLIRAAEIRASANLAATKMSECVCGQSKRVDFCGKGYHLMSFPQSAPHGVVFLHVTYVPAQEKNFTTAPAICHDGKAHFPREGVFVSNGTHWFVTQRNFYEPQIITTDNTFVSGNCDVVIGIVNNTVYDPLQPELDSGGSGYIPEAPRDGQAYVRKDGEWVLLSTFL

SEQ ID NO: 10246 - protein, 1177 aa, Artificial Sequence
  SARS-CoV-2/Iceland/319/2020__EPI_ISL_417648 spike protein (1-1147)(G889C_L1034C) Foldon construct
MFVFLVLLPLVSSQCVNLTTRTQLPPAYTNSFTRGVYYPDKVFRSSVLHSTQDLFLPFFSNVTWFHAIHVSGTNGTKRFDNPVLPFNDGVYFASTEKSNIIRGWIFGTTLDSKTQSLLIVNNATNVVIKVCEFQFCNDPFLGVYYHKNNKSWMESEFRVYSSANNCTFEYVSQPFLIDLEGKQGNFKNLREFVFKNIDGYFKIYSKHTPINLVRDLPQGFSALEPLVDLPIGINITRFQTLLALHRSYLTPGDSSSGWTAGAAAYYVGYLQPRTFLLKYNENGTITDAVDCALDPLSETKCTLKSFTVEKGIYQTSNFRVQPTESIVRFPNITNLCPFGEVFNATRFASVYAWNRKRISNCVADYSVLYNSASFSTFKCYGVSPTKLNDLCFTNVYADSFVIRGDEVRQIAPGQTGKIADYNYKLPDDFTGCVIAWNSNNLDSKVGGNYNYLYRLFRKSNLKPFERDISTEIYQAGSTPCNGVEGFNCYFPLQSYGFQPTNGVGYQPYRVVVLSFELLHAPATVCGPKKSTNLVKNKCVNFNFNGLTGTGVLTESNKKFLPFQQFGRDIADTTDAVRDPQTLEILDITPCSFGGVSVITPGTNTSNQVAVLYQGVNCTEVPVAIHADQLTPTWRVYSTGSNVFQTRAGCLIGAEHVNNSYECDIPIGAGICASYQTQTNSPRRARSVASQSIIAYTMSLGAENSVAYSNNSIAIPTNFTISVTTEILPVSMTKTSVDCTMYICGDSTECSNLLLQYGSFCTQLNRALTGIAVEQDKNTQEVFAQVKQIYKTPPIKDFGGFNFSQILPDPSKPSKRSFIEDLLFNKVTLADAGFIKQYGDCLGDIAARDLICAQKFNGLTVLPPLLTDEMIAQYTSALLAGTITSGWTFCAGAALQIPFAMQMAYRFNGIGVTQNVLYENQKLIANQFNSAIGKIQDSLSSTASALGKLQDVVNQNAQALNTLVKQLSSNFGAISSVLNDILSRLDKVEAEVQIDRLITGRLQSLQTYVTQQLIRAAEIRASANLAATKMSECVCGQSKRVDFCGKGYHLMSFPQSAPHGVVFLHVTYVPAQEKNFTTAPAICHDGKAHFPREGVFVSNGTHWFVTQRNFYEPQIITTDNTFVSGNCDVVIGIVNNTVYDPLQPELDSGGSGYIPEAPRDGQAYVRKDGEWVLLSTFL

SEQ ID NO: 10247 - protein, 1177 aa, Artificial Sequence
  SARS-CoV-2/Congo/94/2020__EPI_ISL_417947 spike protein (1-1147)(G889C_L1034C) Foldon construct
MFVFLVLLPLVSSQCVNLTTRTQLPPAYTNSFTRGVYYPDKVFRSSVLHSTQDLFLPFFSNVTWFHAIHVSGTNGTKRFDNPVLPFNDGVYFASTEKSNIIRGWIFGTTLDSKTQSLLIVNNATNVVIKVCEFQFCNDPFLGVYYHKNNKSWMESEFRVYSSANNCTFEYVSQPFLMDLEGKQGNFKNLREFVFKNIDGYFKIYSKHTPINLVRDLPQGFSALEPLVDLPIGINITRFQTLLALHRSYLTPGDSSSGWTAGAAAYYVGYLQPRTFLLKYNENGTITDAVDCALDPLSETKCTLKSFTVEKGIYQTSNFRVQPTESIVRFPNITNLCPFGEVFNATRFASVYAWNRKRISNCVADYSVLYNSASFSTFKCYGVSPTKLNDLCFTNVYADSFVIRGDEVRQIAPGQTGKIADYNYKLPDDFTGCVIAWNSNNLDSKVGGNYNYLYRLFRKSNLKPFERDISTEIYQAGSTPCNGVEGFNCYFPLQSYGFQPTNGVGYQPYRVVVLSFELLHAPATVCGPKKSTNLVKNKCVNFNFNGLTGTGVLTESNKKFLPFQQFGRDIADTTDAVRDPQTLEILDITPCSFGGVSVITPGTNTSNQVAVLYQGVNCTEVPVAIHADQLTPTWRVYSTGSNVFQTRAGCLIGAEHVNNSYECDIPIGAGICASYQTQTNSPRRARSVASQSIIAYTMSLGAENSVAYSNNSIAIPTNFTISVTTEILPVSMTKTSVDCTMYICGDSTECSNLLLQYGSFCTQLNRALTGIAVEQDKNTQEVFAQVKQIYKTPPIKDFGGFNFSQILPDPSKPSKRSFIEDILFNKVTLADAGFIKQYGDCLGDIAARDLICAQKFNGLTVLPPLLTDEMIAQYTSALLAGTITSGWTFCAGAALQIPFAMQMAYRFNGIGVTQNVLYENQKLIANQFNSAIGKIQDSLSSTASALGKLQDVVNQNAQALNTLVKQLSSNFGAISSVLNDILSRLDKVEAEVQIDRLITGRLQSLQTYVTQQLIRAAEIRASANLAATKMSECVCGQSKRVDFCGKGYHLMSFPQSAPHGVVFLHVTYVPAQEKNFTTAPAICHDGKAHFPREGVFVSNGTHWFVTQRNFYEPQIITTDNTFVSGNCDVVIGIVNNTVYDPLQPELDSGGSGYIPEAPRDGQAYVRKDGEWVLLSTFL

SEQ ID NO: 10248 - protein, 1177 aa, Artificial Sequence
  SARS-CoV-2/Congo/158/2020__EPI_ISL_417950 spike protein (1-1147)(G889C_L1034C) Foldon construct
MFVFLVLLPLVSSQCVNLTTRTQLPPAYTNSFTRGVYYPDKVFRSSVLHSTQDLFLPFFSNVTWFHAIHVSGTNGTKRFDNPVLPFNDGVYFASTEKSNIIRGWIFGTTLDSKTQSLLIVNNATNVVIKVCEFQFCNDPFLGVYYHKNNKSWMESEFRVYSSANNCTFEYVSQPFLMDLEGKQGNFKNLREFVFKNIDGYFKIYSKHTPINLVRDLPQGFSALEPLVDLPIGINITRFQTLLALHRSYLTPGDSSSGWTAGAAAYYVGYLQPRTFLLKYNENGTITDAVDCALDPLSETKCTLKSFTVEKGIYQTSNFRVQPTESIVRFPNITNLCPFGEVFNATRFASVYAWNRKRISNCVADYSVLYNSASFSTFKCYGVSPTKLNDLCFTNVYADSFVIRGDEVRQIAPGQTGKIADYNYKLPDDFTGCVIAWNSNNLDSKVGGNYNYLYRLFRKSNLKPFERDISTEIYQAGSTPCNGVEGFNCYFPLQSYGFQPTNGVGYQPYRVVVLSFELLHAPATVCGPKKSTNLVKNKCVNFNFNGLTGTGVLTESNKKFLPFQQFGRDIADTTDAVRDPQTLEILDITPCSFGGVSVITPGTNTSNQVAVLYQDVNCTEVPVAIHADQLTPTWRVYSTGSNVFQTRAGCLIGAEHVNNSYECDIPIGAGICASYQTQTNSPRRARSVASQSIIAYTMSLGAENSVAYSNNSIAIPTNFTISVTTEILPVSMTKTSVDCTMYICGDSTECSNLLLQYGSFCTQLNRALTGIAVEQDKNTQEVFAQVKQIYKTPPIKDFGGFNFSQILPDPSKPSKRSFIEDLLFNKVTLADAGFIKQYGDCLGDIAARDLICAQKFNGLTVLPPLLTDEMIAQYTSALLAGTITSGWTFCAGAALQIPFAMQMAYRFNGIGVTQNVLYENQKLIANQFNSAIGKIQDSLSSTASALGKLQDVVNQNAQALNTLVKQLSSNFGAISSVLNDILSRLDKVEAEVQIDRLITGRLQSLQTYVTQQLIRAAEIRASANLAATKMSECVCGQSKRVDFCGKGYHLMSFPQSAPHGVVFLHVTYVPAQEKNFTTAPAICHDGKAHFPREGVFVSNGTHWFVTQRNFYEPQIITTDNTFLSGNCDVVIGIVNNTVYDPLQPELDSGGSGYIPEAPRDGQAYVRKDGEWVLLSTFL

SEQ ID NO: 10249 - protein, 1177 aa, Artificial Sequence
  SARS-CoV-2/USA/UT-00034/2020__EPI_ISL_417977 spike protein (1-1147)(G889C_L1034C) Foldon construct
MFVFLVLLPLVSSQCVNLTTRTQLPPAYTNSFTRGVYYPDKVFRSSVLHSTQDLFLPFFSNVTWFHAIHVSGTNGTKRFDNPVLPFNDGVYFASTEKSNIIRGWIFGTTLDSKTQSLLIVNNATNVVIKVCEFQFCNDPFLGVYYYKNNKSWMESEFRVYSSANNCTFEYVSQPFLMDLEGKQGNFKNLREFVFKNIDGYFKIYSKHTPINLVRDLPQGFSALEPLVDLPIGINITRFQTLLALHRSYLTPGDSSSGWTAGAAAYYVGYLQPRTFLLKYNENGTITDAVDCALDPLSETKCTLKSFTVEKGIYQTSNFRVQPTESIVRFPNITNLCPFGEVFNATRFASVYAWNRKRISNCVADYSVLYNSASFSTFKCYGVSPTKLNDLCFTNVYADSFVIRGDEVRQIAPGQTGKIADYNYKLPDDFTGCVIAWNSNNLDSKVGGNYNYLYRLFRKSNLKPFERDISTEIYQAGSTPCNGVEGFNCYFPLQSYGFQPTNGVGYQPYRVVVLSFELLHAPATVCGPKKSTNLVKNKCVNFNFNGLTGTGVLTESNKKFLPFQQFGRDIADTTDAVRDPQTLEILDITPCSFGGVSVITPGTNTSNQVAVLYQGVNCTEVPVAIHADQLTPTWRVYSTGSNVFQTRAGCLIGAEHVNNSYECDIPIGAGICASYQTQTNSPRRARSVASQSIIAYTMSLGAENSVAYSNNSIAIPTNFTISVTTEILPVSMTKTSVDCTMYICGDSTECSNLLLQYGSFCTQLNRALTGIAVEQDKNTQEVFAQVKQIYKTPPIKDFGGFNFSQILPDPSKPSKRSFIEDLLFNKVTLADAGFIKQYGDCLGDIAARDLICAQKFNGLTVLPPLLTDEMIAQYTSALLAGTITSGWTFCAGAALQIPFAMQMAYRFNGIGVTQNVLYENQKLIANQFNSAIGKIQDSLSSTASALGKLQDVVNQNAQALNTLVKQLSSNFGAISSVLNDILSRLDKVEAEVQIDRLITGRLQSLQTYVTQQLIRAAEIRASANLAATKMSECVCGQSKRVDFCGKGYHLMSFPQSAPHGVVFLHVTYVPAQEKNFTTAPAICHDGKAHFPREGVFVSNGTHWFVTQRNFYEPQIITTDNTFVSGNCDVVIGIVNNTVYDPLQPELDSGGSGYIPEAPRDGQAYVRKDGEWVLLSTFL

SEQ ID NO: 10250 - protein, 1177 aa, Artificial Sequence
  SARS-CoV-2/USA/UT-00033/2020__EPI_ISL_417976 spike protein (1-1147)(G889C_L1034C) Foldon construct
MFVFLVLLPLVSSQCVNLTTRTQLPPAYTNSFTRGVYYPDKVFRSSVLHSTQDLFLPFFSNVTWFHAIHVSGTNGTKRFDNPVLPFNDGVYFASTEKSNIIRGWIFGTTLDSKTQSLLIVNNATNVVIKVCEFQFCNDPFLGVYYHKNNKSWMESEFRVYSSANNCTFEYVSQPFLMDLEGKQGNFKNLREFVFKNIDGYFKIYSKHTPINLVRDLPQGFSALEPLVDLPIGINITRFQTLLALHRSYLTPGDSSSGLTAGAAAYYVGYLQPRTFLLKYNENGTITDAVDCALDPLSETKCTLKSFTVEKGIYQTSNFRVQPTESIVRFPNITNLCPFGEVFNATRFASVYAWNRKRISNCVADYSVLYNSASFSTFKCYGVSPTKLNDLCFTNVYADSFVIRGDEVRQIAPGQTGKIADYNYKLPDDFTGCVIAWNSNNLDSKVGGNYNYLYRLFRKSNLKPFERDISTEIYQAGSTPCNGVEGFNCYFPLQSYGFQPTNGVGYQPYRVVVLSFELLHAPATVCGPKKSTNLVKNKCVNFNFNGLTGTGVLTESNKKFLPFQQFGRDIADTTDAVRDPQTLEILDITPCSFGGVSVITPGTNTSNQVAVLYQGVNCTEVPVAIHADQLTPTWRVYSTGSNVFQTRAGCLIGAEHVNNSYECDIPIGAGICASYQTQTNSPRRARSVASQSIIAYTMSLGAENSVAYSNNSIAIPTNFTISVTTEILPVSMTKTSVDCTMYICGDSTECSNLLLQYGSFCTQLNRALTGIAVEQDKNTQEVFAQVKQIYKTPPIKDFGGFNFSQILPDPSKPSKRSFIEDLLFNKVTLADAGFIKQYGDCLGDIAARDLICAQKFNGLTVLPPLLTDEMIAQYTSALLAGTITSGWTFCAGAALQIPFAMQMAYRFNGIGVTQNVLYENQKLIANQFNSAIGKIQDSLSSTASALGKLQDVVNQNAQALNTLVKQLSSNFGAISSVLNDILSRLDKVEAEVQIDRLITGRLQSLQTYVTQQLIRAAEIRASANLAATKMSECVCGQSKRVDFCGKGYHLMSFPQSAPHGVVFLHVTYVPAQEKNFTTAPAICHDGKAHFPREGVFVSNGTHWFVTQRNFYEPQIITTDNTFVSGNCDVVIGIVNNTVYDPLQPELDSGGSGYIPEAPRDGQAYVRKDGEWVLLSTFL

SEQ ID NO: 10251 - protein, 1177 aa, Artificial Sequence
  SARS-CoV-2/USA/WI-13/2020__EPI_ISL_417516 spike protein (1-1147)(G889C_L1034C) Foldon construct
MFVFLVLLPLVSSQCVNLTTRTQLPPAYTNSFTRGVYYPDKVFRSSVLHSTQDLFLPFFSNVTWFHAIHVSGTNGTKRFDNPVLPFNDGVYFASTEKSNIIRGWIFGTTLDSKTQSLLIVNNATNVVIKVCEFQFCNDPFLGVYYHKNNKSWMESEFRVYSSANNCTFEYVSQPFLMDLEGKQGNFKNLREFVFKNIDGYFKIYSKHTPINLVRDLPQGFSALEPLVDLPIGINITRFQTLLALHRSYLTPGDSSSGWTAGAAAYYVGYLQPRTFLLKYNENGTITDAVDCALDPLSETKCTLKSFTVEKGIYQTSNFRVLPTESIVRFPNITNLCPFGEVFNATRFASVYAWNRKRISNCVADYSVLYNSASFSTFKCYGVSPTKLNDLCFTNVYADSFVIRGDEVRQIAPGQTGKIADYNYKLPDDFTGCVIAWNSNNLDSKVGGNYNYLYRLFRKSNLKPFERDISTEIYQAGSTPCNGVEGFNCYFPLQSYGFQPTNGVGYQPYRVVVLSFELLHAPATVCGPKKSTNLVKNKCVNFNFNGLTGTGVLTESNKKFLPFQQFGRDIADTTDAVRDPQTLEILDITPCSFGGVSVITPGTNTSNQVAVLYQGVNCTEVPVAIHADQLTPTWRVYSTGSNVFQTRAGCLIGAEHVNNSYECDIPIGAGICASYQTQTNSPRRARSVASQSIIAYTMSLGAENSVAYSNNSIAIPTNFTISVTTEILPVSMTKTSVDCTMYICGDSTECSNLLLQYGSFCTQLNRALTGIAVEQDKNTQEVFAQVKQIYKTPPIKDFGGFNFSQILPDPSKPSKRSFIEDLLFNKVTLADAGFIKQYGDCLGDIAARDLICAQKFNGLTVLPPLLTDEMIAQYTSALLAGTITSGWTFCAGAALQIPFAMQMAYRFNGIGVTQNVLYENQKLIANQFNSAIGKIQDSLSSTASALGKLQDVVNQNAQALNTLVKQLSSNFGAISSVLNDILSRLDKVEAEVQIDRLITGRLQSLQTYVTQQLIRAAEIRASANLAATKMSECVCGQSKRVDFCGKGYHLMSFPQSAPHGVVFLHVTYVPAQEKNFTTAPAICHDGKAHFPREGVFVSNGTHWFVTQRNFYEPQIITTDNTFVSGNCDVVIGIVNNTVYDPLQPELDSGGSGYIPEAPRDGQAYVRKDGEWVLLSTFL

SEQ ID NO: 10252 - protein, 1176 aa, Artificial Sequence
  SARS-CoV-2/India/1-27/2020__EPI_ISL_413522 spike protein (1-1146)(G888C_L1033C) Foldon construct
MFVFLVLLPLVSSQCVNLTTRTQLPPAYTNSFTRGVYYPDKVFRSSVLHSTQDLFLPFFSNVTWFHAIHVSGTNGTKRFDNPVLPFNDGVYFASTEKSNIIRGWIFGTTLDSKTQSLLIVNNATNVVIKVCEFQFCNDPFLGVYHKNNKSWMESEFRVYSSANNCTFEYVSQPFLMDLEGKQGNFKNLREFVFKNIDGYFKIYSKHTPINLVRDLPQGFSALEPLVDLPIGINITRFQTLLALHRSYLTPGDSSSGWTAGAAAYYVGYLQPRTFLLKYNENGTITDAVDCALDPLSETKCTLKSFTVEKGIYQTSNFRVQPTESIVRFPNITNLCPFGEVFNATRFASVYAWNRKRISNCVADYSVLYNSASFSTFKCYGVSPTKLNDLCFTNVYADSFVIRGDEVIQIAPGQTGKIADYNYKLPDDFTGCVIAWNSNNLDSKVGGNYNYLYRLFRKSNLKPFERDISTEIYQAGSTPCNGVEGFNCYFPLQSYGFQPTNGVGYQPYRVVVLSFELLHAPATVCGPKKSTNLVKNKCVNFNFNGLTGTGVLTESNKKFLPFQQFGRDIADTTDAVRDPQTLEILDITPCSFGGVSVITPGTNTSNQVAVLYQDVNCTEVPVAIHADQLTPTWRVYSTGSNVFQTRAGCLIGAEHVNNSYECDIPIGAGICASYQTQTNSPRRARSVASQSIIAYTMSLGAENSVAYSNNSIAIPTNFTISVTTEILPVSMTKTSVDCTMYICGDSTECSNLLLQYGSFCTQLNRALTGIAVEQDKNTQEVFAQVKQIYKTPPIKDFGGFNFSQILPDPSKPSKRSFIEDLLFNKVTLADAGFIKQYGDCLGDIAARDLICAQKFNGLTVLPPLLTDEMIAQYTSALLAGTITSGWTFCAGAALQIPFAMQMAYRFNGIGVTQNVLYENQKLIANQFNSAIGKIQDSLSSTASALGKLQDVVNQNAQALNTLVKQLSSNFGAISSVLNDILSRLDKVEAEVQIDRLITGRLQSLQTYVTQQLIRAAEIRASANLAATKMSECVCGQSKRVDFCGKGYHLMSFPQSAPHGVVFLHVTYVPAQEKNFTTAPAICHDGKAHFPREGVFVSNGTHWFVTQRNFYEPQIITTDNTFVSGNCDVVIGIVNNTVYDPLQPELDSGGSGYIPEAPRDGQAYVRKDGEWVLLSTFL

SEQ ID NO: 10253 - protein, 1171 aa, Artificial Sequence
  SARS-CoV-2/pangolin/Guangxi/P4L/2017__EPI_ISL_410538 spike protein (1-1141)(G883C_L1028C) Foldon construct
MFVFLFVLPLVSSQCVNLTTRTGIPPGYTNSSTRGVYYPDKVFRSSILHLTQDLFLPFFSNVTWFNTINYQGGFKKFDNPVLPFNDGVYFASTEKSNIIRGWIFGTTLDARTQSLLIVNNATNVVIKVCEFQFCTDPFLGVYYHNNNKTWVENEFRVYSSANNCTFEYISQPFLMDLEGKQGNFKNLREFVFKNVDGYFKIYSKHTPIDLVRDLPRGFAALEPLVDLPIGINITRFQTLLALHRSYLTPGNLESGWTTGAAAYYVGYLQQRTFLLSYNQNGTITDAVDCSLDPLSETKCTLKSLTVEKGIYQTSNFRVQPTISIVRFPNITNLCPFGEVFNASKFASVYAWNRKRISNCVADYSVLYNSTSFSTFKCYGVSPTKLNDLCFTNVYADSFVVKGDEVRQIAPGQTGVIADYNYKLPDDFTGCVIAWNSVKQDALTGGNYGYLYRLFRKSKLKPFERDISTEIYQAGSTPCNGQVGLNCYYPLERYGFHPTTGVNYQPFRVVVLSFELLNGPATVCGPKLSTTLVKDKCVNFNFNGLTGTGVLTTSKKQFLPFQQFGRDISDTTDAVRDPQTLEILDITPCSFGGVSVITPGTNTSNQVAVLYQDVNCTEVPMAIHAEQLTPAWRVYSAGANVFQTRAGCLVGAEHVNNSYECDIPVGAGICASYHSMSSLRSVNQRSIIAYTMSLGAENSVAYSNNSIAIPTNFTISVTTEILPVSMTKTSVDCTMYICGDSIECSNLLLQYGSFCTQLNRALTGIAVEQDKNTQEVFAQVKQIYKTPPIKDFGGFNFSQILPDPSKPSKRSFIEDLLFNKVTLADAGFIKQYGDCLGDIAARDLICAQKFNGLTVLPPLLTDEMIAQYTSALLAGTITSGWTFCAGAALQIPFAMQMAYRFNGIGVTQNVLYENQKLIANQFNSAIGKIQDSLSSTASALGKLQDVVNQNAQALNTLVKQLSSNFGAISSVLNDILSRLDKVEAEVQIDRLITGRLQSLQTYVTQQLIRAAEIRASANLAATKMSECVCGQSKRVDFCGKGYHLMSFPQSAPHGVVFLHVTYVPAQEKNFTTAPAICHEGKAHFPREGVFVSNGTHWFITQRNFYEPQIITTDNTFVSGSCDVVIGIVNNTVYDPLQPELDSGGSGYIPEAPRDGQAYVRKDGEWVLLSTFL

SEQ ID NO: 10254 - protein, 1171 aa, Artificial Sequence
  SARS-CoV-2/pangolin/Guangxi/P5L/2017__EPI_ISL_410540 spike protein (1-1141)(G883C_L1028C) Foldon construct
MFVFLFVLPLVSSQCVNLTTRTGIPPGYTNSSTRGVYYPDKVFRSSILHLTQDLFLPFFSNVTWFNTINYQGGFKKFDNPVLPFNDGVYFASTEKSNIIRGWIFGTTLDARTQSLLIVNNATNVVIKVCEFQFCTDPFLGVYYHNNNKTWVENEFRVYSSANNCTFEYISQPFLMDLEGKQGNFKNLREFVFKNVDGYFKIYSKHTPIDLVRDLPRGFAALEPLVDLPIGINITRFQTLLALHRSYLTPGKLESGWTTGAAAYYVGYLQQRTFLLSYNQNGTITDAVDCSLDPLSETKCTLKSLTVEKGIYQTSNFRVQPTISIVRFPNITNLCPFGEVFNASKFASVYAWNRKRISNCVADYSVLYNSTSFSTFKCYGVSPTKLNDLCFTNVYADSFVVKGDEVRQIAPGQTGVIADYNYKLPDDFTGCVIAWNSVKQDALTGGNYGYLYRLFRKSKLKPFERDISTEIYQAGSTPCNGQVGLNCYYPLERYGFHPTTGVNYQPFRVVVLSFELLNGPATVCGPKLSTTLVKDKCVNFNFNGLTGTGVLTTSKKQFLPFQQFGRDISDTTDAVRDPQTLEILDITPCSFGGVSVITPGTNTSNQVAVLYQDVNCTEVPMAIHAEQLTPAWRVYSAGANVFQTRAGCLVGAEHVNNSYECDIPVGAGICASYHSMSSFRSVNQRSIIAYTMSLGAENSVAYSNNSIAIPTNFTISVTTEILPVSMTKTSVDCTMYICGDSIECSNLLLQYGSFCTQLNRALTGIAVEQDKNTQEVFAQVKQIYKTPPIKDFGGFNFSQILPDPSKPSKRSFIEDLLFNKVTLADAGFIKQYGDCLGDIAARDLICAQKFNGLTVLPPLLTDEMIAQYTSALLAGTITSGWTFCAGAALQIPFAMQMAYRFNGIGVTQNVLYENQKLIANQFNSAIGKIQDSLSSTASALGKLQDVVNQNAQALNTLVKQLSSNFGAISSVLNDILSRLDKVEAEVQIDRLITGRLQSLQTYVTQQLIRAAEIRASANLAATKMSECVCGQSKRVDFCGKGYHLMSFPQSAPHGVVFLHVTYVPAQEKNFTTAPAICHEGKAHFPREGVFVSNGTHWFITQRNFYEPQIITTDNTFVSGSCDVVIGIVNNTVYDPLQPELDSGGSGYIPEAPRDGQAYVRKDGEWVLLSTFL

SEQ ID NO: 10255 - protein, 1171 aa, Artificial Sequence
  SARS-CoV-2/pangolin/Guangxi/P5E/2017__EPI_ISL_410541 spike protein (1-1141)(G883C_L1028C) Foldon construct
MFVFLFVLPLVSSQCVNLTTRTGIPPGYTNSSTRGVYYPDKVFRSSILHLTQDLFLPFFSNVTWFNTITYQGGSKKFDNPVLPFNDGVYFASTEKSNIIRGWIFGTTLDARTQSLLIVNNATNVVIKVCEFQFCTDPFLGVYYHNNNKTWVENEFRVYSSANNCTFEYISQPFLMDLEGKQGNFKNLREFVFKNVDGYFKIYSKHTPIDLVRDLPRGFAALEPLVDLPIGINITRFQTLLALHRSYLTPGKLESGWTTGAAAYYVGYLQQRTFLLSYNQNGTITDAVDCSLDPLSETKCTLKSLTVEKGIYQTSNFRVQPTISIVRFPNITNLCPFGEVFNASKFASVYAWNRKRISNCVADYSVLYNSTSFSTFKCYGVSPTKLNDLCFTNVYADSFVVKGDEVRQIAPGQTGVIADYNYKLPDDFTGCVIAWNSVKQDALTGDNYGYLYRLFRKSKLKPFERDISTEIYQAGSTPCNGQVGLNCYYPLERYGFHPTTGVNYQPFRVVVLSFELLNGPATVCGPKLSTTLVKDKCVNFNFNGLTGTGVLTTSKKQFLPFQQFGRDISDTTDAVRDPQTLEILDITPCSFGGVSVITPGTNTSNQVAVLYQDVNCTEVPMAIHAEQLTPAWRVYSAGANVFQTRAGCLVGAEHVNNSYECDIPVGAGICASYHSMSSFRSVNQRSIIAYTMSLGAENSVAYSNNSIAIPTNFTISVTTEILPVSMTKTSVDCTMYICGDSIECSNLLLQYGSFCTQLNRALTGIAVEQDKNTQEVFAQVKQIYKTPPIKDFGGFNFSQILPDPSKPSKRSFIEDLLFNKVTLADAGFIKQYGDCLGDIAARDLICAQKFNGLTVLPPLLTDEMIAQYTSALLAGTITSGWTFCAGAALQIPFAMQMAYRFNGIGVTQNVLYENQKLIANQFNSAIGKIQDSLSSTASALGKLQDVVNQNAQALNTLVKQLSSNFGAISSVLNDILSRLDKVEAEVQIDRLITGRLQSLQTYVTQQLIRAAEIRASANLAATKMSECVCGQSKRVDFCGKGYHLMSFPQSAPHGVVFLHVTYVPAQEKNFTTAPAICHEGKAHFPREGVFVSNGTHWFITQRNFYEPQIITTDNTFVSGSCDVVIGIVNNTVYDPLQPELDSGGSGYIPEAPRDGQAYVRKDGEWVLLSTFL

SEQ ID NO: 10256 - protein, 1169 aa, Artificial Sequence
  SARS-CoV-2/pangolin/Guangxi/P1E/2017__EPI_ISL_410539 spike protein (1-1139)(G881C_L1026C) Foldon construct
MFVFLFVLPLVSSQCVNLTTRTGIQPGYTNSSTRGVYYPDKVFRSSILHLTQDLFLPFFSNVTWFNTINYQGGFKKFDNPVLPFNDGVYFASTEKSNIIRGWIFGTTLDARTQSLLIVNNATNVVIKVCEFQFCTDPFLGVYYHNNNKTWVENEFRVYSSANNCTFEYISQPFLMDLEGKQGNFKNLREFVFKNVDGYFKIYSKHTPIDLVRDLPRGFAALEPLVDLPIGINITRFQTLLALHRSYLTPGKLESGWTTGAAAYYVGYLQQRTFLLSYNQNGTITDAVDCSLDPLSETKCTLKSLTVEKGIYQTSNFRVQPTISIVRFPNITNLCPFGEVFNASKFASVYAWNRKRISNCVADYSVLYNSTSFSTFKCYGVSPTKLNDLCFTNVYADSFVVKGDEVRQIAPGQTGVIADYNYKLPDDFTGCVIAWNSVKQDALTGGNYLYRLFRKSKLKPFERDISTEIYQAGSTPCNGQVGLNCYYPLERYGFHPTTGVNYQPFRVVVLSFELLNGPATVCGPKLSTTLVKDKCVNFNFNGLTGTGVLTTSKKQFLPFQQFGRDISDTTDAVRDPQTLEILDITPCSFGGVSVITPGTNTSNQVAVLYQDVNCTEVPMAIHAEQLTPAWRVYSAGANVFQTRAGCLVGAEHVNNSYECDIPVGAGICASYHSMSSLRSVNQRSIIAYTMSLGAENSVAYSNNSIAIPTNFTISVTTEILPVSMTKTSVDCTMYICGDSIECSNLLLQYGSFCTQLNRALTGIAVEQDKNTQEVFAQVKQIYKTPPIKDFGGFNFSQILPDPSKPSKRSFIEDLLFNKVTLADAGFIKQYGDCLGDIAARDLICAQKFNGLTVLPPLLTDEMIAQYTSALLAGTITSGWTFCAGAALQIPFAMQMAYRFNGIGVTQNVLYENQKLIANQFNSAIGKIQDSLSSTASALGKLQDVVNQNAQALNTLVKQLSSNFGAISSVLNDILSRLDKVEAEVQIDRLITGRLQSLQTYVTQQLIRAAEIRASANLAATKMSECVCGQSKRVDFCGKGYHLMSFPQSAPHGVVFLHVTYVPAQEKNFTTAPAICHEGKAHFPREGVFVSNGTHWFITQRNFYEPQIITTDNTFVSGSCDVVIGIVNNTVYDPLQPELDSGGSGYIPEAPRDGQAYVRKDGEWVLLSTFL

SEQ ID NO: 10257 - protein, 1177 aa, Artificial Sequence
  SARS-CoV-2/Wuhan/WIV05/2019__EPI_ISL_402128 spike protein (1-1147)(I909C_Y1047C) Foldon construct
MFVFLVLLPLVSSQCVNLTTRTQLPPAYTNSFTRGVYYPDKVFRSSVLHSTQDLFLPFFSNVTWFHAIHVSGTNGTKRFDNPVLPFNDGVYFASTEKSNIIRGWIFGTTLDSKTQSLLIVNNATNVVIKVCEFQFCNDPFLGVYYHKNNKSWMESEFRVYSSANNCTFEYVSQPFLMDLEGKQGNFKNLREFVFKNIDGYFKIYSKHTPINLVRDLPQGFSALEPLVDLPIGINITRFQTLLALHRSYLTPGDSSSGWTAGAAAYYVGYLQPRTFLLKYNENGTITDAVDCALDPLSETKCTLKSFTVEKGIYQTSNFRVQPTESIVRFPNITNLCPFGEVFNATRFASVYAWNRKRISNCVADYSVLYNSASFSTFKCYGVSPTKLNDLCFTNVYADSFVIRGDEVRQIAPGQTGKIADYNYKLPDDFTGCVIAWNSNNLDSKVGGNYNYLYRLFRKSNLKPFERDISTEIYQAGSTPCNGVEGFNCYFPLQSYGFQPTNGVGYQPYRVVVLSFELLHAPATVCGPKKSTNLVKNKCVNFNFNGLTGTGVLTESNKKFLPFQQFGRDIADTTDAVRDPQTLEILDITPCSFGGVSVITPGTNTSNQVAVLYQDVNCTEVPVAIHADQLTPTWRVYSTGSNVFQTRAGCLIGAEHVNNSYECDIPIGAGICASYQTQTNSPRRARSVASQSIIAYTMSLGAENSVAYSNNSIAIPTNFTISVTTEILPVSMTKTSVDCTMYICGDSTECSNLLLQYGSFCTQLNRALTGIAVEQDKNTQEVFAQVKQIYKTPPIKDFGGFNFSQILPDPSKPSKRSFIEDLLFNKVTLADAGFIKQYGDCLGDIAARDLICAQKFNGLTVLPPLLTDEMIAQYTSALLAGTITSGWTFGAGAALQIPFAMQMAYRFNGCGVTQNVLYENQKLIANQFNSAIGKIQDSLSSTASALGKLQDVVNQNAQALNTLVKQLSSNFGAISSVLNDILSRLDKVEAEVQIDRLITGRLQSLQTYVTQQLIRAAEIRASANLAATKMSECVLGQSKRVDFCGKGCHLMSFPQSAPHGVVFLHVTYVPAQEKNFTTAPAICHDGKAHFPREGVFVSNGTHWFVTQRNFYEPQIITTDNTFVSGNCDVVIGIVNNTVYDPLQPELDSGGSGYIPEAPRDGQAYVRKDGEWVLLSTFL

SEQ ID NO: 10258 - protein, 1173 aa, Artificial Sequence
  SARS-CoV-2/bat/Yunnan/RaTG13/2013__EPI_ISL_402131 spike protein (1-1143)(I905C_Y1043C) Foldon construct
MFVFLVLLPLVSSQCVNLTTRTQLPPAYTNSSTRGVYYPDKVFRSSVLHLTQDLFLPFFSNVTWFHAIHVSGTNGIKRFDNPVLPFNDGVYFASTEKSNIIRGWIFGTTLDSKTQSLLIVNNATNVVIKVCEFQFCNDPFLGVYYHKNNKSWMESEFRVYSSANNCTFEYVSQPFLMDLEGKQGNFKNLREFVFKNIDGYFKIYSKHTPINLVRDLPPGFSALEPLVDLPIGINITRFQTLLALHRSYLTPGDSSSGWTAGAAAYYVGYLQPRTFLLKYNENGTITDAVDCALDPLSETKCTLKSFTVEKGIYQTSNFRVQPTDSIVRFPNITNLCPFGEVFNATTFASVYAWNRKRISNCVADYSVLYNSTSFSTFKCYGVSPTKLNDLCFTNVYADSFVITGDEVRQIAPGQTGKIADYNYKLPDDFTGCVIAWNSKHIDAKEGGNFNYLYRLFRKANLKPFERDISTEIYQAGSKPCNGQTGLNCYYPLYRYGFYPTDGVGHQPYRVVVLSFELLNAPATVCGPKKSTNLVKNKCVNFNFNGLTGTGVLTESNKKFLPFQQFGRDIADTTDAVRDPQTLEILDITPCSFGGVSVITPGTNASNQVAVLYQDVNCTEVPVAIHADQLTPTWRVYSTGSNVFQTRAGCLIGAEHVNNSYECDIPIGAGICASYQTQTNSRSVASQSIIAYTMSLGAENSVAYSNNSIAIPTNFTISVTTEILPVSMTKTSVDCTMYICGDSTECSNLLLQYGSFCTQLNRALTGIAVEQDKNTQEVFAQVKQIYKTPPIKDFGGFNFSQILPDPSKPSKRSFIEDLLFNKVTLADAGFIKQYGDCLGDIAARDLICAQKFNGLTVLPPLLTDEMIAQYTSALLAGTITSGWTFGAGAALQIPFAMQMAYRFNGCGVTQNVLYENQKLIANQFNSAIGKIQDSLSSTASALGKLQDVVNQNAQALNTLVKQLSSNFGAISSVLNDILSRLDKVEAEVQIDRLITGRLQSLQTYVTQQLIRAAEIRASANLAATKMSECVLGQSKRVDFCGKGCHLMSFPQSAPHGVVFLHVTYVPAQEKNFTTAPAICHDGKAHFPREGVFVSNGTHWFVTQRNFYEPQIITTDNTFVSGSCDVVIGIVNNTVYDPLQPELDSGGSGYIPEAPRDGQAYVRKDGEWVLLSTFL

SEQ ID NO: 10259 - protein, 1177 aa, Artificial Sequence
  SARS-CoV-2/Wuhan/HBCDC-HB-01/2019__EPI_ISL_402132 spike protein (1-1147)(I909C_Y1047C) Foldon construct
MFVFLVLLPLVSSQCVNLTTRTQLPPAYTNSITRGVYYPDKVFRSSVLHSTQDLFLPFFSNVTWFHAIHVSGTNGTKRFDNPVLPFNDGVYFASTEKSNIIRGWIFGTTLDSKTQSLLIVNNATNVVIKVCEFQFCNDPFLGVYYHKNNKSWMESEFRVYSSANNCTFEYVSQPFLMDLEGKQGNFKNLREFVFKNIDGYFKIYSKHTPINLVRDLPQGFSALEPLVDLPIGINITRFQTLLALHRSYLTPGDSSSGWTAGAAAYYVGYLQPRTFLLKYNENGTITDAVDCALDPLSETKCTLKSFTVEKGIYQTSNFRVQPTESIVRFPNITNLCPFGEVFNATRFASVYAWNRKRISNCVADYSVLYNSASFSTFKCYGVSPTKLNDLCFTNVYADSFVIRGDEVRQIAPGQTGKIADYNYKLPDDFTGCVIAWNSNNLDSKVGGNYNYLYRLFRKSNLKPFERDISTEIYQAGSTPCNGVEGFNCYFPLQSYGFQPTNGVGYQPYRVVVLSFELLHAPATVCGPKKSTNLVKNKCVNFNFNGLTGTGVLTESNKKFLPFQQFGRDIADTTDAVRDPQTLEILDITPCSFGGVSVITPGTNTSNQVAVLYQDVNCTEVPVAIHADQLTPTWRVYSTGSNVFQTRAGCLIGAEHVNNSYECDIPIGAGICASYQTQTNSPRRARSVASQSIIAYTMSLGAENSVAYSNNSIAIPTNFTISVTTEILPVSMTKTSVDCTMYICGDSTECSNLLLQYGSFCTQLNRALTGIAVEQDKNTQEVFAQVKQIYKTPPIKDFGGFNFSQILPDPSKPSKRSFIEDLLFNKVTLADAGFIKQYGDCLGDIAARDLICAQKFNGLTVLPPLLTDEMIAQYTSALLAGTITSGWTFGAGAALQIPFAMQMAYRFNGCGVTQNVLYENQKLIANQFNSAIGKIQDSLSSTASALGKLQDVVNQNAQALNTLVKQLSSNFGAISSVLNDILSRLDKVEAEVQIDRLITGRLQSLQTYVTQQLIRAAEIRASANLAATKMSECVLGQSKRVDFCGKGCHLMSFPQSAPHGVVFLHVTYVPAQEKNFTTAPAICHDGKAHFPREGVFVSNGTHWFVTQRNFYEPQIITTDNTFVSGNCDVVIGIVNNTVYDPLQPELDSGGSGYIPEAPRDGQAYVRKDGEWVLLSTFL

SEQ ID NO: 10260 - protein, 1177 aa, Artificial Sequence
  SARS-CoV-2/Guangdong/20SF028/2020__EPI_ISL_403936 spike protein (1-1147)(I909C_Y1047C) Foldon construct
MFVFLVLLPLVSSQCVNLTTRTQLPPAYTNSFTRGVYYPDKVFRSSVLYSTQDLFLPFFSNVTWFHAIHVSGTNGTKRFDNPVLPFNDGVYFASTEKSNIIRGWIFGTTLDSKTQSLLIVNNATNVVIKVCEFQFCNDPFLGVYYHKNNKSWMESEFRVYSSANNCTFEYVSQPFLMDLEGKQGNFKNLREFVFKNIDGYFKIYSKHTPINLVRDLPQGFSALEPLVDLPIGINITRFQTLLALHRSYLTPGDSSSGWTAGAAAYYVGYLQPRTFLLKYNENGTITDAVDCALDPLSETKCTLKSFTVEKGIYQTSNFRVQPTESIVRFPNITNLCPFGEVFNATRFASVYAWNRKRISNCVADYSVLYNSASFSTFKCYGVSPTKLNDLCFTNVYADSFVIRGDEVRQIAPGQTGKIADYNYKLPDDFTGCVIAWNSNNLDSKVGGNYNYLYRLFRKSNLKPFERDISTEIYQAGSTPCNGVEGFNCYFPLQSYGFQPTNGVGYQPYRVVVLSFELLHAPATVCGPKKSTNLVKNKCVNFNFNGLTGTGVLTESNKKFLPFQQFGRDIADTTDAVRDPQTLEILDITPCSFGGVSVITPGTNTSNQVAVLYQDVNCTEVPVAIHADQLTPTWRVYSTGSNVFQTRAGCLIGAEHVNNSYECDIPIGAGICASYQTQTNSPRRARSVASQSIIAYTMSLGAENSVAYSNNSIAIPTNFTISVTTEILPVSMTKTSVDCTMYICGDSTECSNLLLQYGSFCTQLNRALTGIAVEQDKNTQEVFAQVKQIYKTPPIKDFGGFNFSQILPDPSKPSKRSFIEDLLFNKVTLADAGFIKQYGDCLGDIAARDLICAQKFNGLTVLPPLLTDEMIAQYTSALLAGTITSGWTFGAGAALQIPFAMQMAYRFNGCGVTQNVLYENQKLIANQFNSAIGKIQDSLSSTASALGKLQDVVNQNAQALNTLVKQLSSNFGAISSVLNDILSRLDKVEAEVQIDRLITGRLQSLQTYVTQQLIRAAEIRASANLAATKMSECVLGQSKRVDFCGKGCHLMSFPQSAPHGVVFLHVTYVPAQEKNFTTAPAICHDGKAHFPREGVFVSNGTHWFVTQRNFYEPQIITTDNTFVSGNCDVVIGIVNNTVYDPLQPELDSGGSGYIPEAPRDGQAYVRKDGEWVLLSTFL

SEQ ID NO: 10261 - protein, 1177 aa, Artificial Sequence
  SARS-CoV-2/Shenzhen/SZTH-001/2020__EPI_ISL_406592 spike protein (1-1147)(I909C_Y1047C) Foldon construct
MFVFLVLLPLVSSQCVNLTTRTQLPPAYTNSFTRGVYYPDKVFRSSVLHSTQDLFLPFFSNVTWFHAIHVSGTNGTKRFDNPVLPFNDGVYFASTEKSNIIRGWIFGTTLDSKTQSLLIVNNATNVVIKVCEFQFCNDPFLGVYYHKNNKSWMESEFRVYSSANNCTFEYVSQPFLMDLEGKQGNFKNLREFVFKNIDGYFKIYSKHTPINLVRDLPQGFSALEPLVDLPIGINITRFQTLLALHRSYLTPGDSSSGWTAGAAAYYVGYLQPRTFLLKYNENGTITDAVDCALDPLSETKCTLKSFTVEKGIYQTSNFRVQPTESIVRFPNITNLCPFGEVFNATRFASVYAWNRKRISNCVADYSVLYNSASFSTFKCYGVSPTKLNDLCFTNVYADSFVIRGDEVRQIAPGQTGKIADYNYKLPDDFTGCVIAWNSNNLDSKVGGNYNYLYRLFRKSNLKPFERDISTEIYQAGSTPCNGVEGFNCYFPLQSYGFQPTNGVGYQPYRVVVLSFELLHAPATVCGPKKSTNLVKNKCVNFNFNGLTGTGVLTESNKKFLPFQQFGRDIADTTDAVRDPQTLEILDITPCSFGGVSVITPGTNTSNQVAVLYQDVNCTEVPVAIHADQLTPTWRVYSTGSNVFQTRAGCLIGAEHVNNSYECDIPIGAGICASYQTQTNSPRRARSVASQSIIAYTMSLGAENSVAYSNNSIAIPTNFTISVTTEILPVSMTKTSVDCTMYICGDSTECSNLLLQYGSFCTQLNRALTGIAVEQDKNTQEVFAQVKQIYKTPPIKDFGGFNFSQILPDPSKPSKRSFIEDLLFNKVTLADAGFIKQYGDCLGDIAARDLICAQKFNGLTVLPPLLTDEMIAQYTSALLAGTITSGWTFGAGAALQIPFAMQMAYRFNGCGVTQNVLYENQKLIANQFNSAIGKIQDSLSSTASALGKLQDVVNQNAQALNTLVKQLSSNFGAISSVLNDILSRLDKVEAEVQIDRLITGRLQSLQTYVTQQLIRAAEIRASANLAATKMSECVLGQSKRVDFCGKGCHLMSFPQSAPHGVVFLHVTYVPAQEKNFTTAPAICHDGKAHFPREGVFVSNGTHWFVTQRNFYEPQIITTDNTFVSGNCDVLIGIVNNTVYDPLQPELDSGGSGYIPEAPRDGQAYVRKDGEWVLLSTFL

SEQ ID NO: 10262 - protein, 1177 aa, Artificial Sequence
  SARS-CoV-2/Shenzhen/SZTH-004/2020__EPI_ISL_406595 spike protein (1-1147)(I909C_Y1047C) Foldon construct
MFVFLVLLPLVSSQCVNLTTRTQLPPAYTNSFTRGVYYPDKVFRSSVLHSTQDLFLPFFSNVTWFHAIHVSGTNGTKRFDNPVLPFNDGVYFASTEKSNIIRGWIFGTTLDSKTQSLLIVNNATNVVIKVCEFQFCNDPFLGVYYHKNNKSWMESEFRVYSSANNCTFEYVSQPFLMDLEGKQGNFKNLREFVFKNIDGYFKIYSKHTPINLVRDLPQGFSALEPLVDLPIGINITRFQTLLALHRSYLTPGDSSSGWTAGAAAYYVGYLQPRTFLLKYNENGTITDAVDCALDPLSETKCTLKSFTVEKGIYQTSNFRVQPTESIVRFPNITNLCPFGEVFNATRFASVYAWDRKRISNCVAYYSVLYNSASFSTFKCYGVSPTKLNDLCFTNVYADSFVIRGDEVRQIAPGQTGKIADYNYKLPDDFTGCVIAWNSNNLDSKVGGNYNYLYRLFRKSNLKPFERDISTEIYQAGSTPCNGVEGFNCYFPLQSYGFQPTNGVGYQPYRVVVLSFELLHAPATVCGPKKSTNLVKNKCVNFNFNGLTGTGVLTESNKKFLPFQQFGRDIADTTDAVRDPQTLEILDITPCSFGGVSVITPGTNTSNQVAVLYQDVNCTEVPVAIHADQLTPTWRVYSTGSNVFQTRAGCLIGAEHVNNSYECDIPIGAGICASYQTQTNSPRRARSVASQSIIAYTMSLGAENSVAYSNNSIAIPTNFTISVTTEILPVSMTKTSVDCTMYICGDSTECSNLLLQYGSFCTQLNRALTGIAVEQDKNTQEVFAQVKQIYKTPPIKDFGGFNFSQILPDPSKPSKRSFIEDLLFNKVTLADAGFIKQYGDCLGDIAARDLICAQKFNGLTVLPPLLTDEMIAQYTSALLAGTITSGWTFGAGAALQIPFAMQMAYRFNGCGVTQNVLYENQKLIANQFNSAIGKIQDSLSSTASALGKLQDVVNQNAQALNTLVKQLSSNFGAISSVLNDILSRLDKVEAEVQIDRLITGRLQSLQTYVTQQLIRAAEIRASANLAATKMSECVLGQSKRVDFCGKGCHLMSFPQSAPHGVVFLHVTYVPAQEKNFTTAPAICHDGKAHFPREGVFVSNGTHWFVTQRNFYEPQIITTDNTFVSGNCDVVIGIVNNTVYDPLQPELDSGGSGYIPEAPRDGQAYVRKDGEWVLLSTFL

SEQ ID NO: 10263 - protein, 1177 aa, Artificial Sequence
  SARS-CoV-2/France/IDF0372/2020__EPI_ISL_406596 spike protein (1-1147)(I909C_Y1047C) Foldon construct
MFVFLVLLPLVSSQCVNLTTRTQLPPAYTNSFTRGVYYPDKVFRSSVLHSTQDLFLPFFSNVTWFHAIHVSGTNGTKRFDNPVLPFNDGVYFASTEKSNIIRGWIFGTTLDSKTQSLLIVNNATNVVIKVCEFQFCNDPFLGVYYHKNNKSWMESEFRVYSSANNCTFEYVSQPFLMDLEGKQGNFKNLREFVFKNIDGYFKIYSKHTPINLVRDLPQGFSALEPLVDLPIGINITRFQTLLALHRSYLTPGDSSSGWTAGAAAYYVGYLQPRTFLLKYNENGTITDAVDCALDPLSETKCTLKSFTVEKGIYQTSNFRVQPTESIVRFPNITNLCPFGEVFNATRFASVYAWNRKRISNCVADYSFLYNSASFSTFKCYGVSPTKLNDLCFTNVYADSFVIRGDEVRQIAPGQTGKIADYNYKLPDDFTGCVIAWNSNNLDSKVGGNYNYLYRLFRKSNLKPFERDISTEIYQAGSTPCNGVEGFNCYFPLQSYGFQPTNGVGYQPYRVVVLSFELLHAPATVCGPKKSTNLVKNKCVNFNFNGLTGTGVLTESNKKFLPFQQFGRDIADTTDAVRDPQTLEILDITPCSFGGVSVITPGTNTSNQVAVLYQDVNCTEVPVAIHADQLTPTWRVYSTGSNVFQTRAGCLIGAEHVNNSYECDIPIGAGICASYQTQTNSPRRARSVASQSIIAYTMSLGAENSVAYSNNSIAIPTNFTISVTTEILPVSMTKTSVDCTMYICGDSTECSNLLLQYGSFCTQLNRALTGIAVEQDKNTQEVFAQVKQIYKTPPIKDFGGFNFSQILPDPSKPSKRSFIEDLLFNKVTLADAGFIKQYGDCLGDIAARDLICAQKFNGLTVLPPLLTDEMIAQYTSALLAGTITSGWTFGAGAALQIPFAMQMAYRFNGCGVTQNVLYENQKLIANQFNSAIGKIQDSLSSTASALGKLQDVVNQNAQALNTLVKQLSSNFGAISSVLNDILSRLDKVEAEVQIDRLITGRLQSLQTYVTQQLIRAAEIRASANLAATKMSECVLGQSKRVDFCGKGCHLMSFPQSAPHGVVFLHVTYVPAQEKNFTTAPAICHDGKAHFPREGVFVSNGTHWFVTQRNFYEPQIITTDNTFVSGNCDVVIGIVNNTVYDPLQPELDSGGSGYIPEAPRDGQAYVRKDGEWVLLSTFL

SEQ ID NO: 10264 - protein, 1177 aa, Artificial Sequence
  SARS-CoV-2/Australia/VIC01/2020__EPI_ISL_406844 spike protein (1-1147)(I909C_Y1047C) Foldon construct
MFVFLVLLPLVSSQCVNLTTRTQLPPAYTNSFTRGVYYPDKVFRSSVLHSTQDLFLPFFSNVTWFHAIHVSGTNGTKRFDNPVLPFNDGVYFASTEKSNIIRGWIFGTTLDSKTQSLLIVNNATNVVIKVCEFQFCNDPFLGVYYHKNNKSWMESEFRVYSSANNCTFEYVSQPFLMDLEGKQGNFKNLREFVFKNIDGYFKIYSKHTPINLVRDLPQGFSALEPLVDLPIGINITRFQTLLALHRRYLTPGDSSSGWTAGAAAYYVGYLQPRTFLLKYNENGTITDAVDCALDPLSETKCTLKSFTVEKGIYQTSNFRVQPTESIVRFPNITNLCPFGEVFNATRFASVYAWNRKRISNCVADYSVLYNSASFSTFKCYGVSPTKLNDLCFTNVYADSFVIRGDEVRQIAPGQTGKIADYNYKLPDDFTGCVIAWNSNNLDSKVGGNYNYLYRLFRKSNLKPFERDISTEIYQAGSTPCNGVEGFNCYFPLQSYGFQPTNGVGYQPYRVVVLSFELLHAPATVCGPKKSTNLVKNKCVNFNFNGLTGTGVLTESNKKFLPFQQFGRDIADTTDAVRDPQTLEILDITPCSFGGVSVITPGTNTSNQVAVLYQDVNCTEVPVAIHADQLTPTWRVYSTGSNVFQTRAGCLIGAEHVNNSYECDIPIGAGICASYQTQTNSPRRARSVASQSIIAYTMSLGAENSVAYSNNSIAIPTNFTISVTTEILPVSMTKTSVDCTMYICGDSTECSNLLLQYGSFCTQLNRALTGIAVEQDKNTQEVFAQVKQIYKTPPIKDFGGFNFSQILPDPSKPSKRSFIEDLLFNKVTLADAGFIKQYGDCLGDIAARDLICAQKFNGLTVLPPLLTDEMIAQYTSALLAGTITSGWTFGAGAALQIPFAMQMAYRFNGCGVTQNVLYENQKLIANQFNSAIGKIQDSLSSTASALGKLQDVVNQNAQALNTLVKQLSSNFGAISSVLNDILSRLDKVEAEVQIDRLITGRLQSLQTYVTQQLIRAAEIRASANLAATKMSECVLGQSKRVDFCGKGCHLMSFPQSAPHGVVFLHVTYVPAQEKNFTTAPAICHDGKAHFPREGVFVSNGTHWFVTQRNFYEPQIITTDNTFVSGNCDVVIGIVNNTVYDPLQPELDSGGSGYIPEAPRDGQAYVRKDGEWVLLSTFL

SEQ ID NO: 10265 - protein, 1177 aa, Artificial Sequence
  SARS-CoV-2/Germany/BavPat1/2020__EPI_ISL_406862 spike protein (1-1147)(I909C_Y1047C) Foldon construct
MFVFLVLLPLVSSQCVNLTTRTQLPPAYTNSFTRGVYYPDKVFRSSVLHSTQDLFLPFFSNVTWFHAIHVSGTNGTKRFDNPVLPFNDGVYFASTEKSNIIRGWIFGTTLDSKTQSLLIVNNATNVVIKVCEFQFCNDPFLGVYYHKNNKSWMESEFRVYSSANNCTFEYVSQPFLMDLEGKQGNFKNLREFVFKNIDGYFKIYSKHTPINLVRDLPQGFSALEPLVDLPIGINITRFQTLLALHRSYLTPGDSSSGWTAGAAAYYVGYLQPRTFLLKYNENGTITDAVDCALDPLSETKCTLKSFTVEKGIYQTSNFRVQPTESIVRFPNITNLCPFGEVFNATRFASVYAWNRKRISNCVADYSVLYNSASFSTFKCYGVSPTKLNDLCFTNVYADSFVIRGDEVRQIAPGQTGKIADYNYKLPDDFTGCVIAWNSNNLDSKVGGNYNYLYRLFRKSNLKPFERDISTEIYQAGSTPCNGVEGFNCYFPLQSYGFQPTNGVGYQPYRVVVLSFELLHAPATVCGPKKSTNLVKNKCVNFNFNGLTGTGVLTESNKKFLPFQQFGRDIADTTDAVRDPQTLEILDITPCSFGGVSVITPGTNTSNQVAVLYQGVNCTEVPVAIHADQLTPTWRVYSTGSNVFQTRAGCLIGAEHVNNSYECDIPIGAGICASYQTQTNSPRRARSVASQSIIAYTMSLGAENSVAYSNNSIAIPTNFTISVTTEILPVSMTKTSVDCTMYICGDSTECSNLLLQYGSFCTQLNRALTGIAVEQDKNTQEVFAQVKQIYKTPPIKDFGGFNFSQILPDPSKPSKRSFIEDLLFNKVTLADAGFIKQYGDCLGDIAARDLICAQKFNGLTVLPPLLTDEMIAQYTSALLAGTITSGWTFGAGAALQIPFAMQMAYRFNGCGVTQNVLYENQKLIANQFNSAIGKIQDSLSSTASALGKLQDVVNQNAQALNTLVKQLSSNFGAISSVLNDILSRLDKVEAEVQIDRLITGRLQSLQTYVTQQLIRAAEIRASANLAATKMSECVLGQSKRVDFCGKGCHLMSFPQSAPHGVVFLHVTYVPAQEKNFTTAPAICHDGKAHFPREGVFVSNGTHWFVTQRNFYEPQIITTDNTFVSGNCDVVIGIVNNTVYDPLQPELDSGGSGYIPEAPRDGQAYVRKDGEWVLLSTFL

SEQ ID NO: 10266 - protein, 1177 aa, Artificial Sequence
  SARS-CoV-2/Wuhan/HBCDC-HB-02/2020__EPI_ISL_412978 spike protein (1-1147)(I909C_Y1047C) Foldon construct
MFVFLVLLPLVSSQCVNLTTRTQLPPAYTNSFTRGVYYPDKVFRSSVLHSTQDLFLPFFSNVTWFHAIHVSGTNGTKRFDNPVLPFNDGVYFASTEKSNIIRGWIFGTTLDSKTQSLLIVNNATNVVIKVCEFQFCNDPFLGVYYHKNNKSWMESEFRVYSSANNCTFEYVSQPFLMDLEGKQGNFKNLREFVFKNIDGYFKIYSKHTPINLVRDLPQGFSALEPLVDLPIGINITRFQTLLALHRSYLTPGDSSSGWTAGAAAYYVGYLQPRTFLLKYNENGTITDAVDCALDPLSETKCTLKSFTVEKGIYQTSNFRVQPTESIVRFPNITNLCPFGEVFNATRFASVYAWNRKRISNCVADYSVLYNSASFSTFKCYGVSPTKLNDLCFTNVYADSFVIRGDEVRQIAPGQTGKIADYNYKLPDDFTGCVIAWNSNNLDSKVGGNYNYLYRLFRKSNLKPFERDISTEIYQAGSTPCNGVEGFNCYFPLQSYGFQPTNGVGYQPYRVVVLSFELLHAPATVCGPKKSTNLVKNKCVNFNFNGLTGTGVLTESNKKFLPFQQFGRDIADTTDAVRDPQTLEILDITPCSFGGVSVITPGTNTSNQVAVLYQDVNCTEVPVAIHADQLTPTWRVYSTGSNVFQTRAGCLIGAEHVNNSYECDIPIGAGICASYQTQTNSPRRARSVASQSIIAYTMSLGAENSVAYSNNSIAIPTNFTISVTTEILPVSMTKTSVDCTMYICGDSTECSNFLLQYGSFCTQLNRALTGIAVEQDKNTQEVFAQVKQIYKTPPIKDFGGFNFSQILPDPSKPSKRSFIEDLLFNKVTLADAGFIKQYGDCLGDIAARDLICAQKFNGLTVLPPLLTDEMIAQYTSALLAGTITSGWTFGAGAALQIPFAMQMAYRFNGCGVTQNVLYENQKLIANQFNSAIGKIQDSLSSTASALGKLQDVVNQNAQALNTLVKQLSSNFGAISSVLNDILSRLDKVEAEVQIDRLITGRLQSLQTYVTQQLIRAAEIRASANLAATKMSECVLGQSKRVDFCGKGCHLMSFPQSAPHGVVFLHVTYVPAQEKNFTTAPAICHDGKAHFPREGVFVSNGTHWFVTQRNFYEPQIITTDNTFVSGNCDVVIGIVNNTVYDPLQPELDSGGSGYIPEAPRDGQAYVRKDGEWVLLSTFL

SEQ ID NO: 10267 - protein, 1177 aa, Artificial Sequence
  SARS-CoV-2/Australia/QLD02/2020__EPI_ISL_407896 spike protein (1-1147)(I909C_Y1047C) Foldon construct
MFVFLVLLPLVSSQCVNLTTRTQLPPAYTNSFTRGVYYPDKVFRSSVLHSTQDLFLPFFSNVTWFHAIHVSGTNGTKRFDNPVLPFNDGVYFASTEKSNIIRGWIFGTTLDSKTQSLLIVNNATNVVIKVCEFQFCNDPFLGVYYHKNNKSWMESEFRVYSSANNCTFEYVSQPFLMDLEGKQGNFKNLREFVFKNIDGYFKIYSKHTPINLVRDLPQGFSALEPLVDLPIGINITRFQTLLALHRSYLTPGDSSSGWTAGAAAYYVGYLQPRTFLLKYNENGTITDAVDCALDPLSETKCTLKSFTVEKGIYQTSNFRVQPTESIVRFPNITNLCPFGEVFNATRFASVYAWNRKRISNCVADYSVLYNSASFSTFKCYGVSPTKLNDLCFTNVYADSFVIRGDEVRQIAPGQTGKIADYNYKLPDDFTGCVIAWNSNNLDSKVGGNYNYLYRLFRKSNLKPFERDISTEIYQAGSTPCNGVEGFNCYFPLQSYGFQPTNGVGYQPYRVVVLSFELLHAPATVCGPKKSTNLVKNKCVNFNFNGLTGTGVLTESNKKFLPFQQFGRDIADTTDAVRDPQTLEILDITPCSFGGVSVITPGTNTSNQVAVLYQDVNCTEVPVAIHADQLTPTWRVYSTGSNVFQTRAGCLIGAEHVNNSYECDIPIGAGICASYQTQTNSPRRARSVASQSIIAYTMSLGAENSVAYSNNSIAIPTNFTISVTTEILPVSMTKTSVDCTMYICGDSTECSNLLLQYGSFCTQLNRALTGIAVEQDKNTQEVFAQVKQIYKTPPIKDFGGFNFSQILPDPSKPSKRSFIEDLLFNKVTLADAGFIKQYGDCLGDIAARDLICAQKFNGLTVLPPLLTDEMIAQYTSALLAGTITSGWTFGAGAALQIPFAMQMAYRFNGCGVTQNVLYENQKLIANQFNSAIGKIQDSLSSTASALGKLQDVVNQNAQALNTLVKQLSSNFGAISSVLNDILSRLDKVEAEVQIDRLITGRLQSLQTYVTQQLIRAAEIRASANLAATKMSECVLGQSKRVDFCGKGCHLMSFPQSAPHGVVFLHVTYVPAQEKNFTTAPAICHDGKAHFPREGVFVSNGTHWFVTQRNFYEPQIITTDNTFVSGNCDVVIGIVNNTVYDPLQLELDSGGSGYIPEAPRDGQAYVRKDGEWVLLSTFL

SEQ ID NO: 10268 - protein, 1177 aa, Artificial Sequence
  SARS-CoV-2/India/1-31/2020__EPI_ISL_413523 spike protein (1-1147)(I909C_Y1047C) Foldon construct
MFVFLVLLPLVSSQCVNLTTRTQLPPAYTNSFTRGVYYPDKVFRSSVLHSTQDLFLPFFSNVTWFHAIHVSGTNGTKRFDNPVLPFNDGVYFASTEKSNIIRGWIFGTTLDSKTQSLLIVNNATNVVIKVCEFQFCNDPFLGVYYHKNNKSWMESEFRVYSSANNCTFEYVSQPFLMDLEGKQGNFKNLREFVFKNIDGYFKIYSKHTPINLVRDLPQGFSALEPLVDLPIGINITRFQTLLALHRSYLTPGDSSSGWTAGAAAYYVGYLQPRTFLLKYNENGTITDAVDCALDPLSETKCTLKSFTVEKGIYQTSNFRVQPTESIVRFPNITNLCPFGEVFNATRFASVYAWNRKRISNCVADYSVLYNSASFSTFKCYGVSPTKLNDLCFTNVYADSFVIRGDEVRQIAPGQTGKIADYNYKLPDDFTGCVIAWNSNNLDSKVGGNYNYLYRLFRKSNLKPFERDISTEIYQAGSTPCNGVEGFNCYFPLQSYGFQPTNGVGYQPYRVVVLSFELLHAPATVCGPKKSTNLVKNKCVNFNFNGLTGTGVLTESNKKFLPFQQFGRDIADTTDAVRDPQTLEILDITPCSFGGVSVITPGTNTSNQVAVLYQDVNCTEVPVAIHADQLTPTWRVYSTGSNVFQTRAGCLIGAEHVNNSYECDIPIGAGICASYQTQTNSPRRARSVASQSIIAYTMSLGAENSVAYSNNSIAIPTNFTISVTTEILPVSMTKTSVDCTMYICGDSTECSNLLLQYGSFCTQLNRALTGIAVEQDKNTQEVFAQVKQIYKTPPIKDFGGFNFSQILPDPSKPSKRSFIEDLLFNKVTLADAGFIKQYGDCLGDIAARDLICAQKFNGLTVLPPLLTDEMIAQYTSALLAGTITSGWTFGAGAALQIPFAMQMAYRFNGCGVTQNVLYENQKLIANQFNSVIGKIQDSLSSTASALGKLQDVVNQNAQALNTLVKQLSSNFGAISSVLNDILSRLDKVEAEVQIDRLITGRLQSLQTYVTQQLIRAAEIRASANLAATKMSECVLGQSKRVDFCGKGCHLMSFPQSAPHGVVFLHVTYVPAQEKNFTTAPAICHDGKAHFPREGVFVSNGTHWFVTQRNFYEPQIITTDNTFVSGNCDVVIGIVNNTVYDPLQPELDSGGSGYIPEAPRDGQAYVRKDGEWVLLSTFL

SEQ ID NO: 10269 - protein, 1177 aa, Artificial Sequence
  SARS-CoV-2/Guangdong/GD2020087-P0008/2020__EPI_ISL_413863 spike protein (1-1147)(I909C_Y1047C) Foldon construct
MFVFLVLLPLVSSQCVNLTTRTQLPPAYTNSFTRGVYYPDKVFRSSVLHSTQDLFLPFFSNVTWFHAIHVSGTNGTKRFDNPVLPFNDGVYFASTEKSNIIRGWIFGTTLDSKTQSLLIVNNATNVVIKVCEFQFCNDPFLGVYYHKNNKSWMESEFRVYSSANNCTFEYVSQPFLMDLEGKQGNFKNLREFVFKNIDGYFKIYSKHTPINLVRDLPQGFSALEPLVDLPIGINITRFQTLLALHRSYLTPGDSSSGWTAGAAAYYVGYLQPRTFLLKYNENGTITDAVDCALDPLSETKCTLKSFTVEKGIYQTSNFRVQPTESIVRFPNITNLCPFGEVFNATRFASVYAWNRKRISNCVADYSVLYNSASFSTFKCYGVSPTKLNDLCFTNVYADSFVIRGDEVREIAPGQTGKIADYNYKLPDDFTGCVIAWNSNNLDSKVGGNYNYLYRLFRKSNLKPFERDISTEIYQAGSTPCNGVEGFNCYFPLQSYGFQPTNGVGYQPYRVVVLSFELLHAPATVCGPKKSTNLVKNKCVNFNFNGLTGTGVLTESNKKFLPFQQFGRDIADTTDAVRDPQTLEILDITPCSFGGVSVITPGTNTSNQVAVLYQDVNCTEVPVAIHADQLTPTWRVYSTGSNVFQTRAGCLIGAEHVNNSYECDIPIGAGICASYQTQTNSPRRARSVASQSIIAYTMSLGAENSVAYSNNSIAIPTNFTISVTTEILPVSMTKTSVDCTMYICGDSTECSNLLLQYGSFCTQLNRALTGIAVEQDKNTQEVFAQVKQIYKTPPIKDFGGFNFSQILPDPSKPSKRSFIEDLLFNKVTLADAGFIKQYGDCLGDIAARDLICAQKFNGLTVLPPLLTDEMIAQYTSALLAGTITSGWTFGAGAALQIPFAMQMAYRFNGCGVTQNVLYENQKLIANQFNSAIGKIQDSLSSTASALGKLQDVVNQNAQALNTLVKQLSSNFGAISSVLNDILSRLDKVEAEVQIDRLITGRLQSLQTYVTQQLIRAAEIRASANLAATKMSECVLGQSKRVDFCGKGCHLMSFPQSAPHGVVFLHVTYVPAQEKNFTTAPAICHDGKAHFPREGVFVSNGTHWFVTQRNFYEPQIITTDNTFVSGNCDVVIGIVNNTVYDPLQPELDSGGSGYIPEAPRDGQAYVRKDGEWVLLSTFL

SEQ ID NO: 10270 - protein, 1177 aa, Artificial Sequence
  SARS-CoV-2/Sweden/01/2020__EPI_ISL_411951 spike protein (1-1147)(I909C_Y1047C) Foldon construct
MFVFLVLLPLVSSQCVNLTTRTQLPPAYTNSFTRGVYYPDKVFRSSVLHSTQDLFLPFFSNVTWFHAIHVSGTNGTKRFDNPVLPFNDGVYFASTEKSNIIRGWIFGTTLDSKTQSLLIVNNATNVVIKVCEFQFCNDPFLGVYYHKNNKSWMESEFRVYSSANNCTFEYVSQPFLMDLEGKQGNFKNLREFVFKNIDGYFKIYSKHTPINLVRDLPQGFSALEPLVDLPIGINITRFQTLLALHRSYLTPGDSSSGWTAGAAAYYVGYLQPRTFLLKYNENGTITDAVDCALDPLSETKCTLKSFTVEKGIYQTSNFRVQPTESIVRFPNITNLCPFGEVFNATRFASVYAWNRKRISNCVADYSVLYNSASFSTFKCYGVSPTKLNDLCFTNVYADSFVIRGDEVRQIAPGQTGKIADYNYKLPDDFTGCVIAWNSNNLDSKVGGNYNYLYRLFRKSNLKPFERDISTEIYQAGSTPCNGVEGFNCYFPLQSYGFQPTNGVGYQPYRVVVLSFELLHAPATVCGPKKSTNLVKNKCVNFNFNGLTGTGVLTESNKKFLPFQQFGRDIADTTDAVRDPQTLEILDITPCSFGGVSVITPGTNTSNQVAVLYQDVNCTEVPVAIHADQLTPTWRVYSTGSNVFQTRAGCLIGAEHVNNSYECDIPIGAGICASYQTQTNSPRRARSVASQSIIAYTMSLGAENSVAYSNNSIAIPTNFTISVTTEILPVSMTKTSVDCTMYICGDSTECSNLLLQYGSFCTQLNRALTGIAVEQDKNTQEVFAQVKQIYKTPPIKDCGGFNFSQILPDPSKPSKRSFIEDLLFNKVTLADAGFIKQYGDCLGDIAARDLICAQKFNGLTVLPPLLTDEMIAQYTSALLAGTITSGWTFGAGAALQIPFAMQMAYRFNGCGVTQNVLYENQKLIANQFNSAIGKIQDSLSSTASALGKLQDVVNQNAQALNTLVKQLSSNFGAISSVLNDILSRLDKVEAEVQIDRLITGRLQSLQTYVTQQLIRAAEIRASANLAATKMSECVLGQSKRVDFCGKGCHLMSFPQSAPHGVVFLHVTYVPAQEKNFTTAPAICHDGKAHFPREGVFVSNGTHWFVTQRNFYEPQIITTDNTFVSGNCDVVIGIVNNTVYDPLQPELDSGGSGYIPEAPRDGQAYVRKDGEWVLLSTFL

SEQ ID NO: 10271 - protein, 1177 aa, Artificial Sequence
  SARS-CoV-2/Tianmen/HBCDC-HB-07/2020__EPI_ISL_412983 spike protein (1-1147)(I909C_Y1047C) Foldon construct
MFVFLVLLPLVSSQCVNLTTRTQLPPAYTNSFTRGVYYPDKVFRSSVLHSTQDLFLPFFSNVTWFHAIHVSGTNGTKRFDNPVLPFNDGVYFASTEKSNIIRGWIFGTTLDSKTQSLLIVNNATNVVIKVCEFQFCNDPFLGVYYHKNNKSWMESEFRVYSSANNCTFEYVSQPFLMDLEGKQGNFKNLREFVFKNIDGYFKIYSKHTPINLVRDLPQGFSALEPLVDLPIGINITRFQTLLALHRSYLTPGDSSSGWTAGAAAYYVGYLQPRTFLLKYNENGTITDAVDCALDPLSETKCTLKSFTVEKGIYQTSNFRVQPTESIVRFPNITNLCPFGEVFNATRFASVYAWNRKRISNCVADYSVLYNSASFSTFKCYGVSPTKLNDLCFTNVYADSFVIRGDEVRQIAPGQTGKIADYNYKLPDDFTGCVIAWNSNNLDSKVGGNYNYLYRLFRKSNLKPFERDISTEIYQAGSTPCNGVEGFNCYFPLQSYGFQPTNGVGYQPYRVVVLSFELLHAPATVCGPKKSTNLVKNKCVNFNFNGLTGTGVLTESNKKFLPFQQFGRDIADTTDAVRDPQTLEILDITPCSFGGVSVITPGTNTSNQVAVLYQDLNCTEVPVAIHADQLTPTWRVYSTGSNVFQTRAGCLIGAEHVNNSYECDIPIGAGICASYQTQTNSPRRARSVASQSIIAYTMSLGAENSVAYSNNSIAIPTNFTISVTTEILPVSMTKTSVDCTMYICGDSTECSNLLLQYGSFCTQLNRALTGIAVEQDKNTQEVFAQVKQIYKTPPIKDFGGFNFSQILPDPSKPSKRSFIEDLLFNKVTLADAGFIKQYGDCLGDIAARDLICAQKFNGLTVLPPLLTDEMIAQYTSALLAGTITSGWTFGAGAALQIPFAMQMAYRFNGCGVTQNVLYENQKLIANQFNSAIGKIQDSLSSTASALGKLQDVVNQNAQALNTLVKQLSSNFGAISSVLNDILSRLDKVEAEVQIDRLITGRLQSLQTYVTQQLIRAAEIRASANLAATKMSECVLGQSKRVDFCGKGCHLMSFPQSAPHGVVFLHVTYVPAQEKNFTTAPAICHDGKAHFPREGVFVSNGTHWFVTQRNFYEPQIITTDNTFVSGNCDVVIGIVNNTVYDPLQPELDSGGSGYIPEAPRDGQAYVRKDGEWVLLSTFL

SEQ ID NO: 10272 - protein, 1177 aa, Artificial Sequence
  SARS-CoV-2/Hong Kong/case42_VM20002493/2020__EPI_ISL_414527 spike protein (1-1147)(I909C_Y1047C) Foldon construct
MFVFLVLLPLVSSQCVNLTTRTQLPPAYTNSFTRGVYYPDKVFRSSVLHSTQDLFLPFFSNVTWFHAIHVSGTNGTKRFDNPVLPFNDGVYFASTEKSNIIRGWIFGTTLDSKTQSLLIVNNATNVVIKVCEFQFCNDPFLGVYYHKNNKSWMESEFRVYSSANNCTFEYVSQPFLMDLEGKQGNFKNLREFVFKNIDGYFKIYSKHTPINLVRDLPQGFSALEPLVDLPIGINITRFQTLLALHRSYLTPGDSSSGWTAGAAAYYVGYLQPRTFLLKYNENGTITDAVDCALDPLSETKCTLKSFTVEKGIYQTSNFRVQPTESIVRFPNITNLCPFGEVFNATRFASVYAWNRKRISNCVADYSVLYNSASFSTFKCYGVSPTKLNDLCFTNVYADSFVIRGDEVRQIAPGQTGKIADYNYKLPDDFTGCVIAWNSNNLDSKVGGNYNYLYRLFRKSNLKPFERDISTEIYQAGSTPCNGVEGFNCYFPLQSYGFQPTNGVGYQPYRVVVLSFELLHAPATVCGPKKSTNLVKNKCVNFNFNGLTGTGVLTESNKKFLPFQQFGRDIADTTDAVRDPQTLEILDITPCSFGGVSVITPGTNTSNQVAVLYQDVNCTEVPVAIHADQLTPTWRVYSTGSNVFQTRAGCLIGAEHVNNSYECDIPIGAGICASYQTQTNSPRRARSVASQSIIAYTMSLGAENSVAYSNNSIAIPTNFAISVTTEILPVSMTKTSVDCTMYICGDSTECSNLLLQYGSFCTQLNRALTGIAVEQDKNTQEVFAQVKQIYKTPPIKDFGGFNFSQILPDPSKPSKRSFIEDLLFNKVTLADAGFIKQYGDCLGDIAARDLICAQKFNGLTVLPPLLTDEMIAQYTSALLAGTITSGWTFGAGAALQIPFAMQMAYRFNGCGVTQNVLYENQKLIANQFNSAIGKIQDSLSSTASALGKLQDVVNQNAQALNTLVKQLSSNFGAISSVLNDILSRLDKVEAEVQIDRLITGRLQSLQTYVTQQLIRAAEIRASANLAATKMSECVLGQSKRVDFCGKGCHLMSFPQSAPHGVVFLHVTYVPAQEKNFTTAPAICHDGKAHFPREGVFVSNGTHWFVTQRNFYEPQIITTDNTFVSGNCDVVIGIVNNTVYDPLQPELDSGGSGYIPEAPRDGQAYVRKDGEWVLLSTFL

SEQ ID NO: 10273 - protein, 1177 aa, Artificial Sequence
  SARS-CoV-2/USA/CruiseA-23/2020__EPI_ISL_414482 spike protein (1-1147)(I909C_Y1047C) Foldon construct
MFVFLVLLPLVSSQCVNLTTRTQLPPAYTNSFTRGVYYPDKVFRSSVLHSTQDLFLPFFSNVTWFHAIHVSGTNGTKRFDNPVLPFNDGVYFASTEKSNIIRGWIFGTTLDSKTQSLLIVNNATNVVIKVCEFQFCNDPFLGVYYHKNNKSWMESEFRVYSSANNCTFEYVSQPFLMDLEVKQGNFKNLREFVFKNIDGYFKIYSKHTPINLVRDLPQGFSALEPLVDLPIGINITRFQTLLALHRSYLTPGDSSSGWTAGAAAYYVGYLQPRTFLLKYNENGTITDAVDCALDPLSETKCTLKSFTVEKGIYQTSNFRVQPTESIVRFPNITNLCPFGEVFNATRFASVYAWNRKRISNCVADYSVLYNSASFSTFKCYGVSPTKLNDLCFTNVYADSFVIRGDEVRQIAPGQTGKIADYNYKLPDDFTGCVIAWNSNNLDSKVGGNYNYLYRLFRKSNLKPFERDISTEIYQAGSTPCNGVEGFNCYFPLQSYGFQPTNGVGYQPYRVVVLSFELLHAPATVCGPKKSTNLVKNKCVNFNFNGLTGTGVLTESNKKFLPFQQFGRDIADTTDAVRDPQTLEILDITPCSFGGVSVITPGTNTSNQVAVLYQDVNCTEVPVAIHADQLTPTWRVYSTGSNVFQTRAGCLIGAEHVNNSYECDIPIGAGICASYQTQTNSPRRARSVASQSIIAYTMSLGAENSVAYSNNSIAIPTNFTISVTTEILPVSMTKTSVDCTMYICGDSTECSNLLLQYGSFCTQLNRALTGIAVEQDKNTQEVFAQVKQIYKTPPIKDFGGFNFSQILPDPSKPSKRSFIEDLLFNKVTLADAGFIKQYGDCLGDIAARDLICAQKFNGLTVLPPLLTDEMIAQYTSALLAGTITSGWTFGAGAALQIPFAMQMAYRFNGCGVTQNVLYENQKLIANQFNSAIGKIQDSLSSTASALGKLQDVVNQNAQALNTLVKQLSSNFGAISSVLNDILSRLDKVEAEVQIDRLITGRLQSLQTYVTQQLIRAAEIRASANLAATKMSECVLGQSKRVDFCGKGCHLMSFPQSAPHGVVFLHVTYVPAQEKNFTTAPAICHDGKAHFPREGVFVSNGTHWFVTQRNFYEPQIITTDNTFVSGNCDVVIGIVNNTVYDPLQPELDSGGSGYIPEAPRDGQAYVRKDGEWVLLSTFL

SEQ ID NO: 10274 - protein, 1177 aa, Artificial Sequence
  SARS-CoV-2/Hong Kong/case85_VM20002868/2020__EPI_ISL_414519 spike protein (1-1147)(I909C_Y1047C) Foldon construct
MFVFLVLVPLVSSQCVNLTTRTQLPPAYTNSFTRGVYYPDKVFRSSVLHSTQDLFLPFFSNVTWFHAIHVSGTNGTKRFDNPVLPFNDGVYFASTEKSNIIRGWIFGTTLDSKTQSLLIVNNATNVVIKVCEFQFCNDPFLGVYYHKNNKSWMESEFRVYSSANNCTFEYVSQPFLMDLEGKQGNFKNLREFVFKNIDGYFKIYSKHTPINLVRDLPQGFSALEPLVDLPIGINITRFQTLLALHRSYLTPGDSSSGWTAGAAAYYVGYLQPRTFLLKYNENGTITDAVDCALDPLSETKCTLKSFTVEKGIYQTSNFRVQPTESIVRFPNITNLCPFGEVFNATRFASVYAWNRKRISNCVADYSVLYNSASFSTFKCYGVSPTKLNDLCFTNVYADSFVIRGDEVRQIAPGQTGKIADYNYKLPDDFTGCVIAWNSNNLDSKVGGNYNYLYRLFRKSNLKPFERDISTEIYQAGSTPCNGVEGFNCYFPLQSYGFQPTNGVGYQPYRVVVLSFELLHAPATVCGPKKSTNLVKNKCVNFNFNGLTGTGVLTESNKKFLPFQQFGRDIADTTDAVRDPQTLEILDITPCSFGGVSVITPGTNTSNQVAVLYQDVNCTEVPVAIHADQLTPTWRVYSTGSNVFQTRAGCLIGAEHVNNSYECDIPIGAGICASYQTQTNSPRRARSVASQSIIAYTMSLGAENSVAYSNNSIAIPTNFTISVTTEILPVSMTKTSVDCTMYICGDSTECSNLLLQYGSFCTQLNRALTGIAVEQDKNTQEVFAQVKQIYKTPPIKDFGGFNFSQILPDPSKPSKRSFIEDLLFNKVTLADAGFIKQYGDCLGDIAARDLICAQKFNGLTVLPPLLTDEMIAQYTSALLAGTITSGWTFGAGAALQIPFAMQMAYRFNGCGVTQNVLYENQKLIANQFNSAIGKIQDSLSSTASALGKLQDVVNQNAQALNTLVKQLSSNFGAISSVLNDILSRLDKVEAEVQIDRLITGRLQSLQTYVTQQLIRAAEIRASANLAATKMSECVLGQSKRVDFCGKGCHLMSFPQSAPHGVVFLHVTYVPAQEKNFTTAPAICHDGKAHFPREGVFVSNGTHWFVTQRNFYEPQIITTDNTFVSGNCDVVIGIVNNTVYDPLQPELDSGGSGYIPEAPRDGQAYVRKDGEWVLLSTFL

SEQ ID NO: 10275 - protein, 1177 aa, Artificial Sequence; identical to SEQ ID NO: 10265
  SARS-CoV-2/England/200990660/2020__EPI_ISL_414523 spike protein (1-1147)(I909C_Y1047C) Foldon construct

SEQ ID NO: 10276 - protein, 1177 aa, Artificial Sequence
  SARS-CoV-2/Australia/NSW09/2020__EPI_ISL_413595 spike protein (1-1147)(I909C_Y1047C) Foldon construct
MFVFLVLLPLVSSQCVNLTTRTQLPPAYTNSFTRGVYYPDKVFRSSVLHSTQDLFLPFFSNVTWFHAIHVSGTNGTKRFDNPVLPFNDGVYFASTEKSNIIRGWIFGTTLDSKTQSLLIVNNATNVVIKVCEFQFCNDPFLGVYYHKNNKSWMESEFRVYSSANNCTFEYVSQPFLMDLEGKQGNFKNLREFVFKNIDGYFKIYSKHTPINLVRDLPQGFSALEPLVDLPIGINITRFQTLLALHRSYLTPGDSSSGWTAGAAAYYVGYLQPRTFLLKYNENGTITDAVDCALDPLSETKCTLKSFTVEKGIYQTSNFRVQPTESIVRFPNITNLCPFGEVFNATRFASVYAWNRKRISNCVADYSVLYNSASFSTFKCYGVSPTKLNDLCFTNVYADSFVIRGDEVRQIAPGQTGKIADYNYKLPDDFTGCVIAWNSNNLDSKVGGNYNYLYRLFRKSNLKPFERDISTEIYQAGSTPCNGVEGFNCYFPLQSYGFQPTNGVGYQPYRVVVLSFELLHAPATVCGPKKSTNLVKNKCVNFNFNGLTGTGVLTESNKKFLPFQQFGRDIADTTDAVRDPQTLEILDITPCSFGGVSVITPGTNTSNQVAVLYQDVNCTEVPVAIHADQLTPTWRVYSTGSNVFQTRAGCLIGAEHVNNSYECDIPIGAGICASYQTQTNSPRRARSVASQSIIAYTMSLGAENSVAYSNNSIAIPTNFTISVTTEILPVSMTKTSVDCTMYICGDSTECSNLLLQYGSFCTQLNRALTGIAVEQDKNTQEVFAQVKQIYKTPPIKDFGGFNFSQILPDPSKPSKRSFIEDLLFNKVTLADAGFIKQYGDCLGDIAARDLICAQKFNGLTVLPPLLTDEMIAQYTSALLAGTITSGWTFGAGAALQIPFAMQMAYRFNGCGVTQNVLYENQKLIANQFNSAIGKIQDSLSFTASALGKLQDVVNQNAQALNTLVKQLSSNFGAISSVLNDILSRLDKVEAEVQIDRLITGRLQSLQTYVTQQLIRAAEIRASANLAATKMSECVLGQSKRVDFCGKGCHLMSFPQSAPHGVVFLHVTYVPAQEKNFTTAPAICHDGKAHFPREGVFVSNGTHWFVTQRNFYEPQIITTDNTFVSGNCDVVIGIVNNTVYDPLQPELDSGGSGYIPEAPRDGQAYVRKDGEWVLLSTFL

SEQ ID NO: 10277 - protein, 1177 aa, Artificial Sequence; identical to SEQ ID NO: 10257
  SARS-CoV-2/Australia/NSW10/2020__EPI_ISL_413596 spike protein (1-1147)(I909C_Y1047C) Foldon construct

SEQ ID NO: 10278 - protein, 1177 aa, Artificial Sequence
  SARS-CoV-2/Switzerland/1000477797/2020__EPI_ISL_413023 spike protein (1-1147)(I909C_Y1047C) Foldon construct
MFVFLVLLPLVSSQCVNLTTRTQLPPAYTNSFTRGVYYPDKVFRSSVLHSTQDLFLPFFSNVTWFHAIHVSGTNGTKRFDNPVLPFNDGVYFASTEKSNIIRGWIFGTTLDSKTQSLLIVNNATNVVIKVCEFQFCNDPFLGVYYHKNNKSWMESEFRVYSSANNCTFEYVSQPFLMDLEGKQGNFKNLREFVFKNIDGYFNIYSKHTPINLVRDLPQGFSALEPLVDLPIGINITRFQTLLALHRSYLTPGDSSSGWTAGAAAYYVGYLQPRTFLLKYNENGTITDAVDCALDPLSETKCTLKSFTVEKGIYQTSNFRVQPTESIVRFPNITNLCPFGEVFNATRFASVYAWNRKRISNCVADYSVLYNSASFSTFKCYGVSPTKLNDLCFTNVYADSFVIRGDEVRQIAPGQTGKIADYNYKLPDDFTGCVIAWNSNNLDSKVGGNYNYLYRLFRKSNLKPFERDISTEIYQAGSTPCNGVEGFNCYFPLQSYGFQPTNGVGYQPYRVVVLSFELLHAPATVCGPKKSTNLVKNKCVNFNFNGLTGTGVLTESNKKFLPFQQFGRDIADTTDAVRDPQTLEILDITPCSFGGVSVITPGTNTSNQVAVLYQGVNCTEVPVAIHADQLTPTWRVYSTGSNVFQTRAGCLIGAEHVNNSYECDIPIGAGICASYQTQTNSPRRARSVASQSIIAYTMSLGAENSVAYSNNSIAIPTNFTISVTTEILPVSMTKTSVDCTMYICGDSTECSNLLLQYGSFCTQLNRALTGIAVEQDKNTQEVFAQVKQIYKTPPIKDFGGFNFSQILPDPSKPSKRSFIEDLLFNKVTLADAGFIKQYGDCLGDIAARDLICAQKFNGLTVLPPLLTDEMIAQYTSALLAGTITSGWTFGAGAALQIPFAMQMAYRFNGCGVTQNVLYENQKLIANQFNSAIGKIQDSLSSTASALGKLQDVVNQNAQALNTLVKQLSSNFGAISSVLNDILSRLDKVEAEVQIDRLITGRLQSLQTYVTQQLIRAAEIRASANLAATKMSECVLGQSKRVDFCGKGCHLMSFPQSAPHGVVFLHVTYVPAQEKNFTTAPAICHDGKAHFPREGVFVSNGTHWFVTQRNFYEPQIITTDNTFVSGNCDVVIGIVNNTVYDPLQPELDSGGSGYIPEAPRDGQAYVRKDGEWVLLSTFL

SEQ ID NO: 10279 - protein, 1177 aa, Artificial Sequence
  SARS-CoV-2/Belgium/BA-02291/2020__EPI_ISL_415159 spike protein (1-1147)(I909C_Y1047C) Foldon construct
MFVFLVLLPLVSSQCVNLTTRTQLPPAYTNSFTRGVYYPDKVFRSSVLHSTQDLFLPFFSNVTWFHAIHVSGTNGTKRFDNPVLPFNDGVYFASTEKSNIIRGWIFGTTLDSKTQSLLIVNNATNVVIKVCEFQFCNDPFLGVYYHKNNKSWMESEFRVYSSANNCTFEYVSQPFLMDLEGKQGNFKNLREFVFKNIDGYFKIYSKHTPINLVRDLPQGFSALEPLVDLPIGINITRFQTLLALHRSYLTPGDSSSGWTAGAAAYYVGYLQPRTFLLKYNENGTITDAVDCALDPLSETKCTLKSFTVEKGIYQTSNFRVQPTESIVRFPNITNLCPFGEVFNATRFASVYAWNRKRISNCVADYSVLYNSASFSTFKCYGVSPTKLNDLCFTNVYADSFVIRGDEVRQIAPGQTGKIADYNYKLPDDFTGCVIAWNSNNLDSKVGGNYNYLYRLFRRSNLKPFERDISTEIYQAGSTPCNGVEGFNCYFPLQSYGFQPTNGVGYQPYRVVVLSFELLPAPATVCGPKKSTNLVKNKCVNFNFNGLTGTGVLTESNKKFLPFQQFGRDIADTTDAVRDPQTLEILDITPCSFGGVSVITPGTNTSNQVAVLYQGVNCTEVPVAIHADQLTPTWRVYSTGSNVFQTRAGCLIGAEHVNNSYECDIPIGAGICASYQTQTNSPRRARSVASQSIIAYTMSLGAENSVAYSNNSIAIPTNFTISVTTEILPVSMTKTSVDCTMYICGDSTECSNLLLQYGSFCTQLNRALTGIAVEQDKNTQEVFAQVKQIYKTPPIKDFGGFNFSQILPDPSKPSKRSFIEDLLFNKVTLADAGFIKQYGDCLGDIAARDLICAQKFNGLTVLPPLLTDEMIAQYTSALLAGTITSGWTFGAGAALQIPFAMQMAYRFNGCGVTQNVLYENQKLIANQFNSAIGKIQDSLSSAAPALGKLQDVVNQNAQALNTLVKQLSSNFGAISSVLNDILSRLDKVEAEVQIDRLITGRLQSLQTYVTQQLIRAAEIRASANLAATKMSECVLGQSKRVDFCGKGCHLMSFPQSAPHGVVFLHVTYVPAQEKNFTTAPAICHDGKAHFPREGVFVSNGTHWFVTQRNFYEPQIITTDNTFVSGNCDVVIGIVNNTVYDPLQPELDSGGSGYIPEAPRDGQAYVRKDGEWVLLSTFL

SEQ ID NO: 10280 - protein, 1177 aa, Artificial Sequence
  SARS-CoV-2/USA/WA8-UW5/2020__EPI_ISL_413486 spike protein (1-1147)(I909C_Y1047C) Foldon construct
MFVFLVLLPLVSSQCVNLTTRTQLPPAYTNSFTRGVYYPDKVFRSSVLHSTQDLFLPFFSNVTWFHAIHVSGTNGTKRFDNPVLPFNDGVYFASTEKSNIIRGWIFGTTLDSKTQSLLIVNNATNVVIKVCEFQFCNDPFLGVYYHKNNKSWMESEFRVYSSANNCTFEYVSQPFLMDLEGKQGNFKNLREFVFKNIDGYFKIYSKHTPINLVRDLPQGFSALEPLVDLPIGINITRFQTLLALHRSYLTPGDSSSGWTAGAAAYYVGYLQPRTFLLKYNENGTITDAVDCALDPLSETKCTLKSFTVEKGIYQTSNFRVQPTESIVRFPNITNLCPFGEVFNATRFASVYAWNRKRISNCVADYSVLYNSASFSTFKCYGVSPTKLNDLCFTNVYADSFVIRGDEVRQIAPGQTGKIADYNYKLPDDFTGCVIAWNSNNLDSKVGGNYNYLYRLFRKSNLKPFERDISTEIYQAGSTPCNGVEGFNCYFPLQSYGFQPTNGVGYQPYRVVVLSFELLHAPATVCGPKKSTNLVKNKCVNFNFNGLTGTGVLTESNKKFLPFQQFGRDIADTTDAVRDPQTLEILDITPCSFGGVSVITPGTNTSNQVAVLYQDVNCTEVPVAIHADQLTPTWRVYSTGSNVFQTRAGCLIGAEYVNNSYECDIPIGAGICASYQTQTNSPRRARSVASQSIIAYTMSLGAENSVAYSNNSIAIPTNFTISVTTEILPVSMTKTSVDCTMYICGDSTECSNLLLQYGSFCTQLNRALTGIAVEQDKNTQEVFAQVKQIYKTPPIKDFGGFNFSQILPDPSKPSKRSFIEDLLFNKVTLADAGFIKQYGDCLGDIAARDLICAQKFNGLTVLPPLLTDEMIAQYTSALLAGTITSGWTFGAGAALQIPFAMQMAYRFNGCGVTQNVLYENQKLIANQFNSAIGKIQDSLSSTASALGKLQDVVNQNAQALNTLVKQLSSNFGAISSVLNDILSRLDKVEAEVQIDRLITGRLQSLQTYVTQQLIRAAEIRASANLAATKMSECVLGQSKRVDFCGKGCHLMSFPQSAPHGVVFLHVTYVPAQEKNFTTAPAICHDGKAHFPREGVFVSNGTHWFVTQRNFYEPQIITTDNTFVSGNCDVVIGIVNNTVYDPLQPELDSGGSGYIPEAPRDGQAYVRKDGEWVLLSTFL

SEQ ID NO: 10281 - protein, 1177 aa, Artificial Sequence
  SARS-CoV-2/England/20102000506/2020__EPI_ISL_415147 spike protein (1-1147)(I909C_Y1047C) Foldon construct
MFVFLVLLPLVSSQCVNLTTRTQLPPAYTNSFTRGVYYPDKVFRSSVLHSTQDLFLPFFSNVTWFHAIHVSGTNGTKRFDNPVLPFNDGVYFASTEKSNIIRGWIFGTTLDSKTQSLLIVNNATNVVIKVCEFQFCNDPFLGVYYHKNNKSWMESEFRVYSSANNCTFEYVSQPFLMDLEGKQGNFKNLREFVFKNIDGYFKIYSKHTPINLVRDLPQGFSALEPLVDLPIGINITRFQTLLALHRSYLTPGDSSSGWTAGAAAYYVGYLQPRTFLLKYNENGTITDAVDCALDPLSETKCTLKSFTVEKGIYQTSNFRVQPTESIVRFPNITNLCPFGEVFNATRFASVYAWNRKRISNCVADYSVLYNSASFSTFKCYGVSPTKLNDLCFTNVYADSFVIRGDEVRQIAPGQTGKIADYNYKLPDDFTGCVIAWNSNNLDSKVGGNYNYLYRLFRKSNLKPFERDISTEIYQAGSTPCNGVEGFNCYFPLQSYGFQPTNGVGYQPYRVVVLSFELLHAPATVCGPKKSTNLVKNKCVNFNFNGLTGTGVLTESNKKFLPFQQFGRDIADTTDAVRDPQTLEILDITPCSFGGVSVITPGTNTSNQVAVLYQGVNCTEVPVAIHADQLTPTWRVYSTGSNVFQTRAGCLIGAEHVNNSYECDIPIGAGICASYQTQTNSPRRARSVASQSIIAYTMSLGAENSVAYSNNSIAIPTNFTISVTTEILPVSMTKTSVDCTMYICGDSTECSNLLLQYGSFCTQLNRALTGIAVEQDKNTQEVFAQVKQIYKTPPIKDFGGFNFSQILPDPSKPSKRSFIEDLLFNKVTLADAGFIKQYGYCLGDIAARDLICAQKFNGLTVLPPLLTDEMIAQYTSALLAGTITSGWTFGAGAALQIPFAMQMAYRFNGCGVTQNVLYENQKLIANQFNSAIGKIQDSLSSTASALGKLQDVVNQNAQALNTLVKQLSSNFGAISSVLNDILSRLDKVEAEVQIDRLITGRLQSLQTYVTQQLIRAAEIRASANLAATKMSECVLGQSKRVDFCGKGCHLMSFPQSAPHGVVFLHVTYVPAQEKNFTTAPAICHDGKAHFPREGVFVSNGTHWFVTQRNFYEPQIITTDNTFVSGNCDVVIGIVNNTVYDPLQPELDSGGSGYIPEAPRDGQAYVRKDGEWVLLSTFL

SEQ ID NO: 10282 - protein, 1177 aa, Artificial Sequence
  SARS-CoV-2/Belgium/VAG-03013/2020__EPI_ISL_415155 spike protein (1-1147)(I909C_Y1047C) Foldon construct
MFVFLVLLPLVSSQCVNLTTRTQLPPAYTNSFTRGVYYPDKVFRSSVLHSTQDLFLPFFSNVTWFHAIHVSGTNGTKRFDNPVLPFNDGVYFASTEKSNIIRGWIFGTTLDSKTQSLLIVNNATNVVIKVCEFQFCNDPFLGVYYHKNNKSWMESEFRVYSSANNCTFEYVSQPFLMDLEGKQGNFKNLREFVFKNIDGYFKIYSKHTPINLVRDLPQGFSALEPLVDLPIGINITRFQTLLALHRSYLTPGDSSSGWTAGAAAYYVGYLQPRTFLLKYNENGTITDAVDCALDPLSETKCTLKSFTVEKGIYQTSNFRVQPTESIVRFPNITNLCPFGEVFNATRFASVYAWNRKRISNCVADYSVLYNSASFSTFKCYGVSPTKLNDLCFTNVYADSFVIRGDEVRQIAPGQTGKIADYNYKLPDDFTGCVIAWNSNNLDSKVGGNYNYLYRLFRKSNLKPFERDISTEIYQAGSTPCNGVEGFNCYFPLQSYGFQPTNGVGYQPYRVVVLSFELLHAPATVCGPKKSTNLVKNKCVNFNFNGLTGTGVLTESNKKFLPFQQFGRDIADTTDAVRDPQTLEILDITPCSFGGVSVITPGTNTSNQVAVLYQGVNCTEVPVAIHADQLTPTWRVYSTGSNVFQTRAGCLIGAEHVNNSYECDIPIGAGICASYQTQTNSPRRARSVASQSIIAYTMSLGAENSVAYSNNSIAIPTNFTISVTTEILPVSMTKTSVDCTMYICGDSTECSNLLLQYGSFCTQLNRALTGIAVEQDKNTQEVFAQVKQIYKTPPIKDFGGFNFSQILPDPSKPSKRSFIEDLLFNKVTLADAGFIKQYGDCLGDIAARDLICAQKFNGLTVLPPLLTDEMIAQYTSALLAGTITSGWTFGAGAALQIPFAMQMAYRFNGCGVTQNVLYENQKLIANQFNSAIGKIQDSLSSTATALGKLQDVVNQNAQALNTLVKQLSSNFGAISSVLNDILSRLDKVEAEVQIDRLITGRLQSLQTYVTQQLIRAAEIRASANLAATKMSECVLGQSKRVDFCGKGCHLMSFPQSAPHGVVFLHVTYVPAQEKNFTTAPAICHDGKAHFPREGVFVSNGTHWFVTQRNFYEPQIITTDNTFVSGNCDVVIGIVNNTVYDPLQPELDSGGSGYIPEAPRDGQAYVRKDGEWVLLSTFL

SEQ ID NO: 10283 - protein, 1177 aa, Artificial Sequence
  SARS-CoV-2/Belgium/BC-03016/2020__EPI_ISL_415157 spike protein (1-1147)(I909C_Y1047C) Foldon construct
MFVFLVLLPLVSSQCVNLTTRTQLPPAYTNSFTRGVYYPDKVFRSSVLHSTQDLFLPFFSNVTWFHAIHVSGTNGTKRFDNPVLPFNDGVYFASTEKSNIIRGWIFGTTLDSKTQSLLIVNNATNVVIKVCEFQFCNDPFLGVYYHKNNKSWMESEFRVYSSANNCTFEYVSQPFLMDLEGKQGNFKNLREFVFKNIDGYFKIYSKHTPINLVRDLPQGFSALEPLVDLPIGINITRFQTLLALHRSYLTPGDSSSGWTAGAAAYYVGYLQPRTFLLKYNENGTITDAVDCALDPLSETKCTLKSFTVEKGIYQTSNFRVQPTESIVRFPNITNLCPFGEVFNATRFASVYAWNRKRISNCVADYSVLYNSASFSTFKCYGVSPTKLNDLCFTNVYADSFVIRGDEVRQIAPGQTGKIADYNYKLPDDFTGCVIAWNSNNLDSKVGGNYNYLYRLFRKSNLKPFERDISTEIYQAGSTPCNGVEGFNCYFPLQSYGFQPTNGVGYQPYRVVVLSFELLHAPATVCGPKKSTNLVKNKCVNFNFNGLTGTGVLTESNKKFLPFQQFGRDIADTTDAVRDPQTLEILDITPCSFGGVSVITPGTNTSNQVAVLYQGVNCTEVPVAIHADQLTPTWRVYSTGSNVFQTRAGCLIGAEHVNNSYECDIPIGAGICASYQTQTNSPRRARSVASQSIIAYTMSLGAENSVAYSNNSIAIPTNFTISVTTEILPVSMTKTSVDCTMYICGDSTECSNLLLQYGSFCTQLNRALTGIAVEQDKNTQEVFAQVKQIYKTPPIKDFGGFNFSQILPDPSKPSKRSFIEDLLFNKVTLADAGFIKQYGDCLGDIAARDLICAQKFNGLTVLPPLLTDEMIAQYTSALLAGTITSGWTFGAGAALQIPFAMQMAYRFNGCGVTQNVLYENQKLIANQFNSAIGKIQDSLSSTAPALGKLQDVVNQNAQALNTLVKQLSSNFGAISSVLNDILSRLDKVEAEVQIDRLITGRLQSLQTYVTQQLIRAAEIRASANLAATKMSECVLGQSKRVDFCGKGCHLMSFPQSAPHGVVFLHVTYVPAQEKNFTTAPAICHDGKAHFPREGVFVSNGTHWFVTQRNFYEPQIITTDNTFVSGNCDVVIGIVNNTVYDPLQPELDSGGSGYIPEAPRDGQAYVRKDGEWVLLSTFL

SEQ ID NO: 10284 - protein, 1177 aa, Artificial Sequence
  SARS-CoV-2/Germany/BavPat3/2020__EPI_ISL_414521 spike protein (1-1147)(I909C_Y1047C) Foldon construct
MFVFLVLLPLVSSQCVNLTTRTQLPPAYTNSFTRGVYYPDKVFRSSVLHSTQDLFLPFFSNVTWFHAIHVSGTNGTKRFDNPVLPFNDGVYFASTEKSNIIRGWIFGTTLDSKTQSLLIVNNATNVVIKVCEFQFCNDPFLGVYYHKNNKSWMESEFRVYSSANNCTFEYVSQPFLMDLEGKQGNFKNLREFVFKNIDGYFKIYSKHTPINLVRDLPQGFSALEPLVDLPIGINITRFQTLLALHRSYLTPGDSSSGWTAGAAAYYVGYLQPRTFLLKYNENGTITDAVDCALDPLSETKCTLKSFTVEKGIYQTSNFRVQPTESIVRFPNITNLCPFGEVFNATRFASVYAWNRKRISNCVADYSVLYNSASFSTFKCYGVSPTKLNDLCFTNVYADSFVIRGDEVRQIAPGQTGKIADYNYKLPDDFTGCVIAWNSNNLDSKVGGNYNYLYRLFRKSNLKPFERDISTEIYQAGSTPCNGVEGFNCYFPLQSYGFQPTNGVGYQPYRVVVLSFELLHAPATVCGPKKSTNLVKNKCVNFNFNGLTGTGVLTESNKKFLPFQQFGRDIADTTDAVRDPQTLEILDITPCSFGGVSVITPGTNTSNQVAVLYQDVNCTEVPVAIHADQLTPTWRVYSTGSNVFQTRAGCLIGAEHVNNSYECDIPIGAGICASYQTQTNSPRRARSVASQSIIAYTMSLGAENSVAYSNNSIAIPTNFTISVTTEILPVSMTKTSVDCTMYICGDSTECSNLLLQYGSFCTQLNRALTGIAVEQDKNTQQVFAQVKQIYKTPPIKDFGGFNFSQILPDPSKPSKRSFIEDLLFNKVTLADAGFIKQYGDCLGDIAARDLICAQKFNGLTVLPPLLTDEMIAQYTSALLAGTITSGWTFGAGAALQIPFAMQMAYRFNGCGVTQNVLYENQKLIANQFNSAIGKIQDSLSSTASALGKLQDVVNQNAQALNTLVKQLSSNFGAISSVLNDILSRLDKVEAEVQIDRLITGRLQSLQTYVTQQLIRAAEIRASANLAATKMSECVLGQSKRVDFCGKGCHLMSFPQSAPHGVVFLHVTYVPAQEKNFTTAPAICHDGKAHFPREGVFVSNGTHWFVTQRNFYEPQIITTDNTFVSGNCDVVIGIVNNTVYDPLQPELDSGGSGYIPEAPRDGQAYVRKDGEWVLLSTFL

SEQ ID NO: 10285 - protein, 1177 aa, Artificial Sequence
  SARS-CoV-2/France/HF1805/2020__EPI_ISL_414628 spike protein (1-1147)(I909C_Y1047C) Foldon construct
MFVFLVLLPLVSSQCVNLTTRTQLPPAYTNSFTRGVYYPDKVFRSSVLHSTQDLFLPFFSNVTWFHAIHVSGTNGTKRFDNPVLPFNDGVYFASTEKSNIIRGWIFGTTLDSKTQSLLIVNNATNVVIKVCEFQFCNDPFLGVYYHKNNKSWMESEFRVYSSANNCTFEYVSQPFLMDLEGKQGNFKNLREFVFKNIDGYFKIYSKHTPINLVRDLPQGFSALEPLVDLPIGINITRFQTLLALHRSYLTPGDSSSGWTAGAAAYYVGYLQPRTFLLKYNENGTITDAVDCALDPLSETKCTLKSFTVEKGIYQTSNFRVQPTESIVRFPNITNLCPFGEVFNATRFASVYAWNRKRISNCVADYSVLYNSASFSTFKCYGVSPTKLNDLCFTNVYADSFVIRGDEVRQIAPGQTGKIADYNYKLPDDFTGCVIAWNSNNLDSKVGGNYNYLYRLFRKSNLKPFERDISTEIYQAGSTPCNGVEGFNCYFPLQSYGFQPTNGVGYQPYRVVVLSFELLHAPATVCGPKKSTNLVKNKCVNFNFNGLTGTGVLTESNKKFLPFQQFGRDIADTTDAVRDPQTLEILDITPCSFGGVSVITPGTNTSNQVAVLYQGVNCTEVPVAIHADQLTPTWRVYSTGSNVFQTRAGCLIGAEHVNNSYECDIPIGAGICASYQTQTNSPRRARSVASQSIIAYTMSLGAENSVAYSNNSIAIPTNFTISVTTEILPVSMTKTSVDCTMYICGDSTECSNLLLQYGSFCTQLNRALTGIAVEQDKNTQEVFAQVKQIYKTPPIKDFGGFNFSQILPDPSKPSKRSFIEDLLFNKVTLADAGFIKQYGDCLGDIAARDLICAQKFNGLTVLPPLLTDEMIAQYTSALLAGTITSGWTFGAGAALQIPFAMQMAYRFNGCGVTQNVLYENQKLIANQFNSAIGKIQDSLSSTASALGKLQDVVNQNAQALNTLVKQLSSNFGAISSVLNDILSRLDKVEAEVQIDRLITGRLQSLQTYVTQQLIRAAEIRASANLAATKMSECVLGQSKRVDFCGKGCHLMSFPQSAPHGVVFLHVTYVPAQEKNFTTAPAICHDGKAHFPREGVFVSNGTHWFVTQRNFYEPQIITTDNTFVSGNCDVVIGVVNNTVYDPLQPELDSGGSGYIPEAPRDGQAYVRKDGEWVLLSTFL

SEQ ID NO: 10286 - protein, 1177 aa, Artificial Sequence
  SARS-CoV-2/Netherlands/ZuidHolland_9/2020__EPI_ISL_414445 spike protein (1-1147)(I909C_Y1047C) Foldon construct
MFVFLVLLPLVSSQCVNLTTRTQLPPAYTNSFTRGVYYPDKVFRSSVLHSTQDLFLPFFSNVTWFHAIHVSGTNGTKRFDNPVLPFNDGVYFASTEKSNIIRGWIFGTTLDSKTQSLLIVNNATNVVIKVCEFQFCNDPFLGVYYHKNNKSWMESEFRVYSSANNCTFEYVSQPFLMDLEGKQGNFKNLREFVFKNIDGYFKIYSKHTPINLVRDLPQGFSALEPLVDLPIGINITRFQTLLALHRSYLTPGDSSSGWTAGAAAYYVGYLQPRTFLLKYNENGTITDAVDCALDPLSETKCTLKSFTVEKGIYQTSNFRVQPTESIVRFPNITNLCPFGEVFNATRFASVYAWNRKRISNCVADYSVLYNSASFSTFKCYGVSPTKLNDLCFTNVYADSFVIRGDEVRQIAPGQTGKIADYNYKLPDDFTGCVIAWNSNNLDSKVGGNYNYLYRLFRKSNLKPFERDISTEIYQAGSTPCNGVEGFNCYFPLQSYGFQPTNGVGYQPYRVVVLSFELLHAPATVCGPKKSTNLVKNKCVNFNFNGLTGTGVLTESNKKFLPFQQFGRDIADTTDAVRDPQTLEILDITPCSFGGVSVITPGTNTSNQVAVLYQGVNCTEVPVAIHADQLTPTWRVYSTGSNVFQTRAGCLIGAEHVNNSYECDIPIGAGICASYQTQTNSPRRARSVASQSIIAYTMSLGAENSVAYSNNSIAIPTNFTISVTTEILPVSMTKTSVDCTMYICGDSTECSNLLLQYGSFCTQLNRALTGIAVEQDKNTQEVFAQVKQIYKTPPIKDFGGFNFSQILPDPSKPSKRSFIEDLLFNKVTLADAGFIKQYGDCLGDIAARDLICVQKFNGLTVLPPLLTDEMIAQYTSALLAGTITSGWTFGAGAALQIPFAMQMAYRFNGCGVTQNVLYENQKLIANQFNSAIGKIQDSLSSTASALGKLQDVVNQNAQALNTLVKQLSSNFGAISSVLNDILSRLDKVEAEVQIDRLITGRLQSLQTYVTQQLIRAAEIRASANLAATKMSECVLGQSKRVDFCGKGCHLMSFPQSAPHGVVFLHVTYVPAQEKNFTTAPAICHDGKAHFPREGVFVSNGTHWFVTQRNFYEPQIITTDNTFVSGNCDVVIGIVNNTVYDPLQPELDSGGSGYIPEAPRDGQAYVRKDGEWVLLSTFL

SEQ ID NO: 10287 - protein, 1177 aa, Artificial Sequence
  SARS-CoV-2/Finland/FIN03032020A/2020__EPI_ISL_413602 spike protein (1-1147)(I909C_Y1047C) Foldon construct
MFVFLVLLPLVSSQCVNLTTRTQLPPAYTNSFTRGVYYPDKVFRSSVLHSTQDLFLPFFSNVTWFHAIHVSGTNGTKRFDNPVLPFNDGVYFASTEKSNIIRGWIFGTTLDSKTQSLLIVNNATNVVIKVCEFQFCNDPFLGVYYHKNNKSWMESEFRVYSSANNCTFEYVSQPFLMDLEGKQGNFKNLREFVFKNIDGYFKIYSKHTPINLVRDLPQGFSALEPLVDLPIGINITRFQTLLALHRSYLTPGDSSSGWTAGAAAYYVGYLQPRTFLLKYNENGTITDAVDCALDPLSETKCTLKSFTVEKGIYQTSNFRVQPTESIVRFPNITNLCPFGEVFNATRFASVYAWNRKRISNCVADYSVLYNSASFSTFKCYGVSPTKLNDLCFTNVYADSFVIRGDEVRQIAPGQTGKIADYNYKLPDDFTGCVISWNSNNLDSKVGGNYNYLYRLFRKSNLKPFERDISTEIYQAGSTPCNGVEGFNCYFPLQSYGFQPTNGVGYQPYRVVVLSFELLHAPATVCGPKKSTNLVKNKCVNFNFNGLTGTGVLTESNKKFLPFQQFGRDIADTTDAVRDPQTLEILDITPCSFGGVSVITPGTNTSNQVAVLYQGVNCTEVPVAIHADQLTPTWRVYSTGSNVFQTRAGCLIGAEHVNNSYECDIPIGAGICASYQTQTNSPRRARSVASQSIIAYTMSLGAENSVAYSNNSIAIPTNFTISVTTEILPVSMTKTSVDCTMYICGDSTECSNLLLQYGSFCTQLNRALTGIAVEQDKNTQEVFAQVKQIYKTPPIKDFGGFNFSQILPDPSKPSKRSFIEDLLFNKVTLADAGFIKQYGDCLGDIAARDLICAQKFNGLTVLPPLLTDEMIAQYTSALLAGTITSGWTFGAGAALQIPFAMQMAYRFNGCGVTQNVLYENQKLIANQFNSAIGKIQDSLSSTASALGKLQDVVNQNAQALNTLVKQLSSNFGAISSVLNDILSRLDKVEAEVQIDRLITGRLQSLQTYVTQQLIRAAEIRASANLAATKMSECVLGQSKRVDFCGKGCHLMSFPQSAPHGVVFLHVTYVPAQEKNFTTAPAICHDGKAHFPREGVFVSNGTHWFVTQRNFYEPQIITTDNTFVSGNCDVVIGIVNNTVYDPLQPELDSGGSGYIPEAPRDGQAYVRKDGEWVLLSTFL

SEQ ID NO: 10288 - protein, 1177 aa, Artificial Sequence
  SARS-CoV-2/France/GE1977/2020__EPI_ISL_414632 spike protein (1-1147)(I909C_Y1047C) Foldon construct
MFVFLVLLPLVSSQCVNLTTRTQLPPAYTNSFTRGVYYPDKVFRSSVLHSTQDLFLPFFSNVTWFHAIHVSGTNGTKRFDNPVLPFNDGVYFASTEKSNIIRGWIFGTTLDSKTQSLLIVNNATNVVIKVCEFQFCNDPFLGVYYHKNNKSWMESEFRVYSSANNCTFEYVSQPFLMDLEGKQGNFKNLREFVFKNIDGYFKIYSKHTPINLVRDLPQGFSALEPLVDLPIGINITRFQTLLALHRSYLTPGDSSSGWTAGAAAYYVGYLQPRTFLLKYNENGTITDAVDCALDPLSETKCTLKSFTVEKGIYQTSNFRVQPTESIVRFPNITNLCPFGEVFNATRFASVYAWNRKRISNCVADYSVLYNSASFSTFKCYGVSPTKLNDLCFTNVYADSFVIRGDEVRQIAPGQTGKIADYNYKLPDDFTGCVIAWNSNNLDSKVGGNYNYLYRLFRKSNLKPFERDISTEIYQAGSTPCNGVEGFNCYFPLQSYGFQPTNGVGYQPYRVVVLSFELLHAPATVCGPKKSTNLVKNKCVNFNFNGLTGTGVLTESNKKFLPFQQFGRDIADTTDAVRDPQTLEILDITPCSFGGVSVITPGTNTSNQVAVLYQGVNCTEVPVAIHADQLTPTWRVYSTGSNVFQTRAGCLIGAEHVNNSYECDIPIGAGICASYQTQTNSPRRARSVASQSIIAYTMSLGAENSVAYSNNSIAIPTNFTISVTTEILPVSMTKTSVDCTMYICGDSTECSNLLLQYGSFCTQLNRALTGIAVEQDKNTQEVFAQVKQIYKTPPIKDFGGFNFSQILPDPSKPSKRSFIEDLLFNKVTLADAGFIKQYGDCLGDIAARDLICAQKFNGLTVLPPLLTDEMIAQYTSALLAGTITSGWTFGAGAALQIPFAMQMAYRFNGCGVTQNVLYENQKLIANQFNSAIGKIQDSLFSTASALGKLQDVVNQNAQALNTLVKQLSSNFGAISSVLNDILSRLDKVEAEVQIDRLITGRLQSLQTYVTQQLIRAAEIRASANLAATKMSECVLGQSKRVDFCGKGCHLMSFPQSAPHGVVFLHVTYVPAQEKNFTTAPAICHDGKAHFPREGVFVSNGTHWFVTQRNFYEPQIITTDNTFVSGNCDVVIGIVNNTVYDPLQPELDSGGSGYIPEAPRDGQAYVRKDGEWVLLSTFL

SEQ ID NO: 10289 - protein, 1177 aa, Artificial Sequence
  SARS-CoV-2/Finland/FIN-313/2020__EPI_ISL_414641 spike protein (1-1147)(I909C_Y1047C) Foldon construct
MFVFLVLLPLVSSQCVNLTTRTQLPPAYTNSFTRGVYYPDKVFRSSVLHSTQDLFLPFFSNVTWFHAIHVSGTNGTKRFDNPVLPFNDGVYFASTEKSNIIRGWIFGTTLDSKTQSLLIVNNATNVVIKVCEFQFCNDPFLGVYYHKNNKSWMESEFRVYSSANNCTFEYVSQPFLMDLEGKQGNFKNLREFVFKNIDGYFKIYSKHTPINLVRDLPQGFSALEPLVDLPIGINITRFKTLLALHRSYLTPGDSSSGWTAGAAAYYVGYLQPRTFLLKYNENGTITDAVDCALDPLSETKCTLKSFTVEKGIYQTSNFRVQPTESIVRFPNITNLCPFGEVFNATRFASVYAWNRKRISNCVADYSVLYNSASFSTFKCYGVSPTKLNDLCFTNVYADSFVIRGDEVRQIAPGQTGKIADYNYKLPDDFTGCVIAWNSNNLDSKVGGNYNYLYRLFRKSNLKPFERDISTEIYQAGSTPCNGVEGFNCYFPLQSYGFQPTNGVGYQPYRVVVLSFELLHAPATVCGPKKSTNLVKNKCVNFNFNGLTGTGVLTESNKKFLPFQQFGRDIADTTDAVRDPQTLEILDITPCSFGGVSVITPGTNTSNQVAVLYQGVNCTEVPVAIHADQLTPTWRVYSTGSNVFQTRAGCLIGAEHVNNSYECDIPIGAGICASYQTQTNSPRRARSVASQSIIAYTMSLGAENSVAYSNNSIAIPTNFTISVTTEILPVSMTKTSVDCTMYICGDSTECSNLLLQYGSFCTQLNRALTGIAVEQDKNTQEVFAQVKQIYKTPPIKDFGGFNFSQILPDPSKPSKRSFIEDLLFNKVTLADAGFIKQYGDCLGDIAARDLICAQKFNGLTVLPPLLTDEMIAQYTSALLAGTITSGWTFGAGAALQIPFAMQMAYRFNGCGVTQNVLYENQKLIANQFNSAIGKIQDSLSSTASALGKLQDVVNQNAQALNTLVKQLSSNFGAISSVLNDILSRLDKVEAEVQIDRLITGRLQSLQTYVTQQLIRAAEIRASANLAATKMSECVLGQSKRVDFCGKGCHLMSFPQSAPHGVVFLHVTYVPAQEKNFTTAPAICHDGKAHFPREGVFVSNGTHWFVTQRNFYEPQIITTDNTFVSGNCDVVIGIVNNTVYDPLQPELDSGGSGYIPEAPRDGQAYVRKDGEWVLLSTFL

SEQ ID NO: 10290 - protein, 1177 aa, Artificial Sequence
  SARS-CoV-2/Netherlands/ZuidHolland_2/2020__EPI_ISL_414556 spike protein (1-1147)(I909C_Y1047C) Foldon construct
MFVFLVLLPLVSSQCVNLTTRTQLPPAYTNSFTRGVYYPDKVFRSSVLHSTQDLFLPFFSNVTWFHAIHVSGTNGTKRFDNPVLPFNDGVYFASTEKSNIIRGWIFGTTLDSKTQSLLIVNNATNVVIKVCEFQFCNDPFLGVYYHKNNKSWMESEFRVYSSANNCTFEYVSQPFLMDLEGKQGNFKNLREFVFKNIDGYFKIYSKHTPINLVRDLPQGFSALEPLVDLPIGINITRFQTLLALHRSYLTPGDSSSGWTAGAAAYYVGYLQPRTFLLKYNENGTITDAVDCALDPLSETKCTLKSFTVEKGIYQTSNFRVQPTESIVRFPNITNLCPFGEVFNATRFASVYAWNRKRISNCVADYSVLYNSASFSTFKCYGVSPTKLNDLCFTNVYADSFVIRGDEVRQIAPGQTGKIADYNYKLPDDFTGCVIAWNSNNLDSKVGGNYNYLYRLFRKSNLKPFERDISTEIYQAGSTPCNGVEGFNCYFPLQSYGFQPTNGVGYQPYRVVVLSFELLHAPATVCGPKKSTNLVKNKCVNFNFNGLTGTGVLTESNKKFLPFQQFGRDIADTTDAVRDPQTLEILDITPCSFGGVSVITPGTNTSNQVAVLYQGVNCTEVPVAIHADQLTPTWRVYSTGSNVFQTRAGCLIGAEHVNNSYECDIPIGAGICASYQTQTNSPRRARSVASQSIIAYTMSLGAENSVAYSNNSIAIPTNFTISVTTEILPVSMTKTSVDCTMYICGDSTECSNLLLQYGSFCTQLNRALTGIALEQDKNTQEVFAQVKQIYKTPPIKDFGGFNFSQILPDPSKPSKRSFIEDLLFNKVTLADAGFIKQYGDCLGDIAARDLICAQKFNGLTVLPPLLTDEMIAQYTSALLAGTITSGWTFGAGAALQIPFAMQMAYRFNGCGVTQNVLYENQKLIANQFNSAIGKIQDSLSSTASALGKLQDVVNQNAQALNTLVKQLSSNFGAISSVLNDILSRLDKVEAEVQIDRLITGRLQSLQTYVTQQLIRAAEIRASANLAATKMSECVLGQSKRVDFCGKGCHLMSFPQSAPHGVVFLHVTYVPAQEKNFTTAPAICHDGKAHFPREGVFVSNGTHWFVTQRNFYEPQIITTDNTFVSGNCDVVIGIVNNTVYDPLQPELDSGGSGYIPEAPRDGQAYVRKDGEWVLLSTFL

SEQ ID NO: 10291 - protein, 1177 aa, Artificial Sequence
  SARS-CoV-2/USA/WA-UW31/2020__EPI_ISL_414618 spike protein (1-1147)(I909C_Y1047C) Foldon construct
MFVFLVLLPLVSSQCVNLTTRTQLPPAYTNSFTRGVYYPDKVFRSSVLHSTQDLFLPFFSNVTWFHAIHVSGTNGTKRFDNPVLPFNDGVYFASTEKSNIIRGWIFGTTLDSKTQSLLIVNNATNVVIKVCEFQFCNDPFLGVYYHKNNKSWMESEFRVYSSANNCTFEYVSQPFLMDLEGKQGNFKNLREFVFKNIDGYFKIYSKHTPINLVRDLPQGFSALEPLVDLPIGINITRFQTLLALHRSYLTPGDSSSGWTAGAAAYYVGYLQPRTFLLKYNENGTITDAVDCALDPLSETKCTLKSFTVEKGIYQTSNFRVQPTESIVRFPNITNLCPFGEVFNATRFASVYAWNRKRISNCVADYSVLYNSASFSTFKCYGVSPTKLNDLCFTNVYADSFVIRGDEVRQIAPGQTGKIADYNYKLPDDFTGCVIAWNSNNLDSKVGGNYNYLYRLFRKSNLKPFERDISTEIYQAGSTPCNGAEGFNCYFPLQSYGFQPTNGVGYQPYRVVVLSFELLHAPATVCGPKKSTNLVKNKCVNFNFNGLTGTGVLTESNKKFLPFQQFGRDIADTTDAVRDPQTLEILDITPCSFGGVSVITPGTNTSNQVAVLYQDVNCTEVPVAIHADQLTPTWRVYSTGSNVFQTRAGCLIGAEHVNNSYECDIPIGAGICASYQTQTNSPRRARSVASQSIIAYTMSLGAENSVAYSNNSIAIPTNFTISVTTEILPVSMTKTSVDCTMYICGDSTECSNLLLQYGSFCTQLNRALTGIAVEQDKNTQEVFAQVKQIYKTPPIKDFGGFNFSQILPDPSKPSKRSFIEDLLFNKVTLADAGFIKQYGDCLGDIAARDLICAQKFNGLTVLPPLLTDEMIAQYTSALLAGTITSGWTFGAGAALQIPFAMQMAYRFNGCGVTQNVLYENQKLIANQFNSAIGKIQDSLSSTASALGKLQDVVNQNAQALNTLVKQLSSNFGAISSVLNDILSRLDKVEAEVQIDRLITGRLQSLQTYVTQQLIRAAEIRASANLAATKMSECVLGQSKRVDFCGKGCHLMSFPQSAPHGVVFLHVTYVPAQEKNFTTAPAICHDGKAHFPREGVFVSNGTHWFVTQRNFYEPQIITTDNTFVSGNCDVVIGIVNNTVYDPLQPELDSGGSGYIPEAPRDGQAYVRKDGEWVLLSTFL

SEQ ID NO: 10292 - protein, 1177 aa, Artificial Sequence
  SARS-CoV-2/South Korea/SNU01/2020__EPI_ISL_411929 spike protein (1-1147)(I909C_Y1047C) Foldon construct
MFVFLVLLPLVSSQCVNLTTRTQLPPAYTNSFTRGVYYPDKVFRSSVLHSTQDLFLPFFSNVTWFHAIHVSGTNGTKRFDNPVLPFNDGVYFASTEKSNIIRGWIFGTTLDSKTQSLLIVNNATNVVIKVCEFQFCNDPFLGVYYHKNNKSWMESEFRVYSSANNCTFEYVSQPFLMDLEGKQGNFKNLREFVFKNIDGYFKIYSKHTPINLVRDLPQGFWALEPLVDLPIGINITRFQTLLALHRSYLTPGDSSSGWTAGAAAYYVGYLQPRTFLLKYNENGTITDAVDCALDPLSETKCTLKSFTVEKGIYQTSNFRVQPTESIVRFPNITNLCPFGEVFNATRFASVYAWNRKRISNCVADYSVLYNSASFSTFKCYGVSPTKLNDLCFTNVYADSFVIRGDEVRQIAPGQTGKIADYNYKLPDDFTGCVIAWNSNNLDSKVGGNYNYLYRLFRKSNLKPFERDISTEIYQAGSTPCNGVEGFNCYFPLQSYGFQPTNGVGYQPYRVVVLSFELLHAPATVCGPKKSTNLVKNKCVNFNFNGLTGTGVLTESNKKFLPFQQFGRDIADTTDAVRDPQTLEILDITPCSFGGVSVITPGTNTSNQVAVLYQDVNCTEVPVAIHADQLTPTWRVYSTGSNVFQTRAGCLIGAEHVNNSYECDIPIGAGICASYQTQTNSPRRARSVASQSIIAYTMSLGAENSVAYSNNSIAIPTNFTISVTTEILPVSMTKTSVDCTMYICGDSTECSNLLLQYGSFCTQLNRALTGIAVEQDKNTQEVFAQVKQIYKTPPIKDFGGFNFSQILPDPSKPSKRSFIEDLLFNKVTLADAGFIKQYGDCLGDIAARDLICAQKFNGLTVLPPLLTDEMIAQYTSALLAGTITSGWTFGAGAALQIPFAMQMAYRFNGCGVTQNVLYENQKLIANQFNSAIGKIQDSLSSTASALGKLQDVVNQNAQALNTLVKQLSSNFGAISSVLNDILSRLDKVEAEVQIDRLITGRLQSLQTYVTQQLIRAAEIRASANLAATKMSECVLGQSKRVDFCGKGCHLMSFPQSAPHGVVFLHVTYVPAQEKNFTTAPAICHDGKAHFPREGVFVSNGTHWFVTQRNFYEPQIITTDNTFVSGNCDVVIGIVNNTVYDPLQPELDSGGSGYIPEAPRDGQAYVRKDGEWVLLSTFL

SEQ ID NO: 10293 - protein, 1177 aa, Artificial Sequence
  SARS-CoV-2/China/WF0004/2020__EPI_ISL_413694 spike protein (1-1147)(I909C_Y1047C) Foldon construct
MFVFLVLLPLVSSQCVNLTTRTQLPPAYTNSFTRGVYYPDKVFRSSVLHSTQDLFLPFFSNVTWFHAIHVSGTNGTKRFDNPVLPFNDGVYFASTEKSNIIRGWIFGTTLDSKTQSLLIVNNATNVVIKVCEFQFCNDPFLGVYYHKNNKSWTESEFRVYSSANNCTFEYVSQPFLMDLEGKQGNFKNLREFVFKNIDGYFKIYSKHTPINLVRDLPQGFSALEPLVDLPIGINITRFQTLLALHRSYLTPGDSSSGWTAGAAAYYVGYLQPRTFLLKYNENGTITDAVDCALDPLSETKCTLKSFTVEKGIYQTSNFRVQPTESIVRFPNITNLCPFGEVFNATRFASVYAWNRKRISNCVADYSVLYNSASFSTFKCYGVSPTKLNDLCFTNVYADSFVIRGDEVRQIAPGQTGKIADYNYKLPDDFTGCVIAWNSNNLDSKVGGNYNYLYRLFRKSNLKPFERDISTEIYQAGSTPCNGVEGFNCYFPLQSYGFQPTNGVGYQPYRVVVLSFELLHAPATVCGPKKSTNLVKNKCVNFNFNGLTGTGVLTESNKKFLPFQQFGRDIADTTDAVRDPQTLEILDITPCSFGGVSVITPGTNTSNQVAVLYQDVNCTEVPVAIHADQLTPTWRVYSTGSNVFQTRAGCLIGAEHVNNSYECDIPIGAGICASYQTQTNSPRRARSVASQSIIAYTMSLGAENSVAYSNNSIAIPTNFTISVTTEILPVSMTKTSVDCTMYICGDSTECSNLLLQYGSFCTQLNRALTGIAVEQDKNTQEVFAQVKQIYKTPPIKDFGGFNFSQILPDPSKPSKRSFIEDLLFNKVTLADAGFIKQYGDCLGDIAARDLICAQKFNGLTVLPPLLTDEMIAQYTSALLAGTITSGWTFGAGAALQIPFAMQMAYRFNGCGVTQNVLYENQKLIANQFNSAIGKIQDSLSSTASALGKLQDVVNQNAQALNTLVKQLSSNFGAISSVLNDILSRLDKVEAEVQIDRLITGRLQSLQTYVTQQLIRAAEIRASANLAATKMSECVLGQSKRFDFCGKGCHLMSFPQSAPHGVVFLHVTYVPAQEKNFTTAPAICHDGKAHFPREGVFVSNGTHWFVTQRNFYEPQIITTDNTFVSGNCDVVIGIVNNTVYDPLQPELDSGGSGYIPEAPRDGQAYVRKDGEWVLLSTFL

SEQ ID NO: 10294 - protein, 1177 aa, Artificial Sequence
  SARS-CoV-2/China/WF0028/2020__EPI_ISL_413791 spike protein (1-1147)(I909C_Y1047C) Foldon construct
MFVFLVLLPLVSSQCVNLTTRTQLPPAYTNSFTRGVYYPDKVFRSSVLHSTQDLFLPFFSNVTWFHAIHVSGTNGTKRFDNPVLPFNDGVYFASTEKSNIIRGWIFGTTLDSKTQSLLIVNNATNVVIKVCEFQFCNDPFLGVYYHKNNKSWMESEFRVYSSANNCTFEYVSQPFLMDLEGKQGNFKNLREFVFKNIDGYFKIYSKHTPINLVRDLPQGFSALEPLVDLPIGINITRFQTLLALHRSYLTPGDSSSGWTAGAAAYYVGYLQPRTFLLKYNENGTITDAVDCALDPLSETKCTLKSFTVEKGIYQTSNFRVQPTESIVRFPNITNLCPFGEVFNATRFASVYAWNRKRISNCVADYSVLYNSASFSTFKCYGVSPTKLNDLCFTNVYADSFVIRGDEVRQIAPGQTGKIADYNYKLPDDFTGCVIAWNSNNLDSKVGGNYNYLYRLFRKSNLKPFERDISTEIYQAGSTPCNGVEGFNCYFPLQSYGFQPTNGVGYQPYRVVVLSFELLHAPATVCGPKKSTNLVKNKCVNFNFNGLTGTGVLTESNKKFLPFQQFGRDIADTTDAVRDPQTLEILDITPCSFGGVSVITPGTNTSNQVAVLYQDVNCTEVPVAIHADQLTPTWRVYSTGSNVFQTRAGCLIGAEHVNNSYECDIPIGAGICASYQTQTNSPRRARSVASQSIIAYTMSLGAENSVAYSNNSIAIPTNFTISVTTEILPVSMTKTSVDCTMYICGDSTECSNLLLQYGSFCTQLNRALTGIAVEQDKNTQEVFAQVKQIYKTPPIKDFGGFNFSQILPDPSKPSKRSFIEDLLFNKVTLADAGFIKQYGDCLGDIAARDLICAQKFNGLTVLPPLLTDEMIAQYTSALLAGTITSGWTFGAGAALQIPFAMQMAYRFNGCGVTQNVLYENQKLIANQFNSAIGKIQDSLSSTASALGKLQDVVNQNAQALNTLVKQLSSNFGAISSVLNDILSRLDKVEAEVQIDRLITGRLQSLQTYVTQQLIRAAEIRASANLAATKMSECVLGQSKRVDFCGKGCHLMSFPQSAPHGVVFLHVTYVPAQEKNFTTAPAICHDGKAHFPREGVFVSNGTHWFVTQRNFYEPQIITTDNTFVSGNCDVVIGIVNNTVYDPLQPELESGGSGYIPEAPRDGQAYVRKDGEWVLLSTFL

SEQ ID NO: 10295 - protein, 1177 aa, Artificial Sequence
  SARS-CoV-2/2019-nCoV/USA-CruiseA-18/2020__MT159716.1 spike protein (1-1147)(I909C_Y1047C) Foldon construct
MFVFLVLLPLVSSQCVNLTTRTQLPPAYTNSFTRGVYYPDKVFRSSVLHSTQDLFLPFFSNVTWFHAIHVSGTNGTKRFDNPVLPFNDGVYFASTEKSNIIRGWIFGTTLDSKTQSLLIVNNATNVVIKVCEFQFCNDPFLGVYYHKNNKSWMESELRVYSSANNCTFEYVSQPFLMDLEGKQGNFKNLREFVFKNIDGYFKIYSKHTPINLVRDLPQGFSALEPLVDLPIGINITRFQTLLALHRSYLTPGDSSSGWTAGAAAYYVGYLQPRTFLLKYNENGTITDAVDCALDPLSETKCTLKSFTVEKGIYQTSNFRVQPTESIVRFPNITNLCPFGEVFNATRFASVYAWNRKRISNCVADYSVLYNSASFSTFKCYGVSPTKLNDLCFTNVYADSFVIRGDEVRQIAPGQTGKIADYNYKLPDDFTGCVIAWNSNNLDSKVGGNYNYLYRLFRKSNLKPFERDISTEIYQAGSTPCNGVEGFNCYFPLQSYGFQPTNGVGYQPYRVVVLSFELLHAPATVCGPKKSTNLVKNKCVNFNFNGLTGTGVLTESNKKFLPFQQFGRDIADTTDAVRDPQTLEILDITPCSFGGVSVITPGTNTSNQVAVLYQDVNCTEVPVAIHADQLTPTWRVYSTGSNVFQTRAGCLIGAEHVNNSYECDIPIGAGICASYQTQTNSPRRARSVASQSIIAYTMSLGAENSVAYSNNSIAIPTNFTISVTTEILPVSMTKTSVDCTMYICGDSTECSNLLLQYGSFCTQLNRALTGIAVEQDKNTQEVFAQVKQIYKTPPIKDFGGFNFSQILPDPSKPSKRSFIEDLLFNKVTLADAGFIKQYGDCLGDIAARDLICAQKFNGLTVLPPLLTDEMIAQYTSALLAGTITSGWTFGAGAALQIPFAMQMAYRFNGCGVTQNVLYENQKLIANQFNSAIGKIQDSLSSTASALGKLQDVVNQNAQALNTLVKQLSSNFGAISSVLNDILSRLDKVEAEVQIDRLITGRLQSLQTYVTQQLIRAAEIRASANLAATKMSECVLGQSKRVDFCGKGCHLMSFPQSAPHGVVFLHVTYVPAQEKNFTTAPAICHDGKAHFPREGVFVSNGTHWFVTQRNFYEPQIITTDNTFVSGNCDVVIGIVNNTVYDPLQPELDSGGSGYIPEAPRDGQAYVRKDGEWVLLSTFL

SEQ ID NO: 10296 - protein, 1177 aa, Artificial Sequence
  SARS-CoV-2/SARS-CoV-2/Yunnan-01/human/2020/CHN__MT049951.1 spike protein (1-1147)(I909C_Y1047C) Foldon construct
MFVFLVLLPLVSSQCVNLTTRTQLPPANTNSFTRGVYYPDKVFRSSVLHSTQDLFLPFFSNVTWFHAIHVSGTNGTKRFDNPVLPFNDGVYFASTEKSNIIRGWIFGTTLDSKTQSLLIVNNATNVVIKVCEFQFCNDPFLGVYYHKNNKSWMESEFRVYSSANNCTFEYVSQPFLMDLEGKQGNFKNLREFVFKNIDGYFKIYSKHTPINLVRDLPQGFSALEPLVDLPIGINITRFQTLLALHRSYLTPGDSSSGWTAGAAAYYVGYLQPRTFLLKYNENGTITDAVDCALDPLSETKCTLKSFTVEKGIYQTSNFRVQPTESIVRFPNITNLCPFGEVFNATRFASVYAWNRKRISNCVADYSVLYNSASFSTFKCYGVSPTKLNDLCFTNVYADSFVIRGDEVRQIAPGQTGKIADYNYKLPDDFTGCVIAWNSNNLDSKVGGNYNYLYRLFRKSNLKPFERDISTEIYQAGSTPCNGVEGFNCYFPLQSYGFQPTNGVGYQPYRVVVLSFELLHAPATVCGPKKSTNLVKNKCVNFNFNGLTGTGVLTESNKKFLPFQQFGRDIADTTDAVRDPQTLEILDITPCSFGGVSVITPGTNTSNQVAVLYQDVNCTEVPVAIHADQLTPTWRVYSTGSNVFQTRAGCLIGAEHVNNSYECDIPIGAGICASYQTQTNSPRRARSVASQSIIAYTMSLGAENSVAYSNNSIAIPTNFTISVTTEILPVSMTKTSVDCTMYICGDSTECSNLLLQYGSFCTQLNRALTGIAVEQDKNTQEVFAQVKQIYKTPPIKDFGGFNFSQILPDPSKPSKRSFIEDLLFNKVTLADAGFIKQYGDCLGDIAARDLICAQKFNGLTVLPPLLTDEMIAQYTSALLAGTITSGWTFGAGAALQIPFAMQMAYRFNGCGVTQNVLYENQKLIANQFNSAIGKIQDSLSSTASALGKLQDVVNQNAQALNTLVKQLSSNFGAISSVLNDILSRLDKVEAEVQIDRLITGRLQSLQTYVTQQLIRAAEIRASANLAATKMSECVLGQSKRVDFCGKGCHLMSFPQSAPHGVVFLHVTYVPAQEKNFTTAPAICHDGKAHFPREGVFVSNGTHWFVTQRNFYEPQIITTDNTFVSGNCDVVIGIVNNTVYDPLQPELDSGGSGYIPEAPRDGQAYVRKDGEWVLLSTFL

SEQ ID NO: 10297 - protein, 1177 aa, Artificial Sequence
  SARS-CoV-2/USA/WA-UW292/2020__EPI_ISL_418077 spike protein (1-1147)(I909C_Y1047C) Foldon construct
MFVFLVLLPLVSSQCVNLTTRTQLPPAYTNSFTRGVYYPDKVFRSSVLHSTQDLFLPFFSNVTWFHAIHVSGTNGTKRFDNPVLPFNDGVYFASTEKSNIIRGWIFGTTLDSKTQSLLIVNNATNVVIKVCEFQFCNDPFLGVYYHKNNKSWMESEFRVYSSANNCTFEYVSQPFLMDLEGKQGNFKNLREFVFKNIDGYFKIYSKHTPINLVRDLPQGFSALEPLVDLPIGINITRFQTLLALHRSYLTPGDSSSGWTAGAAAYYVGYLQPRTFLLKYNENGTITDAVDCALDPLSETKCTLKSFTVEKGIYQTSNFRVQPTESIVRFPNITNLCPFGEVFNATRFASVYAWNRKRISNCVADYSVLYNSASFSTFKCYGVSPTKLNDLCFTNVYADSFVIRGDEVRQIAPGQTGKIADYNYKLPDDFTGCVIAWNSNNLDSKVGGNYNYLYRLFRKSNLKPFERDISTEIYQASSTPCNGVEGFNCYFPLQSYGFQPTNGVGYQPYRVVVLSFELLHAPATVCGPKKSTNLVKNKCVNFNFNGLTGTGVLTESNKKFLPFQQFGRDIADTTDAVRDPQTLEILDITPCSFGGVSVITPGTNTSNQVAVLYQDVNCTEVPVAIHADQLTPTWRVYSTGSNVFQTRAGCLIGAEHVNNSYECDIPIGAGICASYQTQTNSPRRARSVASQSIIAYTMSLGAENSVAYSNNSIAIPTNFTISVTTEILPVSMTKTSVDCTMYICGDSTECSNLLLQYGSFCTQLNRALTGIAVEQDKNTQEVFAQVKQIYKTPPIKDFGGFNFSQILPDPSKPSKRSFIEDLLFNKVTLADAGFIKQYGDCLGDIAARDLICAQKFNGLTVLPPLLTDEMIAQYTSALLAGTITSGWTFGAGAALQIPFAMQMAYRFNGCGVTQNVLYENQKLIANQFNSAIGKIQDSLSSTASALGKLQDVVNQNAQALNTLVKQLSSNFGAISSVLNDILSRLDKVEAEVQIDRLITGRLQSLQTYVTQQLIRAAEIRASANLAATKMSECVLGQSKRVDFCGKGCHLMSFPQSAPHGVVFLHVTYVPAQEKNFTTAPAICHDGKAHFPREGVFVSNGTHWFVTQRNFYEPQIITTDNTFVSGNCDVVIGIVNNTVYDPLQPELDSGGSGYIPEAPRDGQAYVRKDGEWVLLSTFL

SEQ ID NO: 10298 - protein, 1177 aa, Artificial Sequence
  SARS-CoV-2/Iceland/192/2020__EPI_ISL_417819 spike protein (1-1147)(I909C_Y1047C) Foldon construct
MFVFFVLLPLVSSQCVNLTTRTQLPPAYTNSFTRGVYYPDKVFRSSVLHSTQDLFLPFFSNVTWFHAIHVSGTNGTKRFDNPVLPFNDGVYFASTEKSNIIRGWIFGTTLDSKTQSLLIVNNATNVVIKVCEFQFCNDPFLGVYYHKNNKSWMESEFRVYSSANNCTFEYVSQPFLMDLEGKQGNFKNLREFVFKNIDGYFKIYSKHTPINLVRDLPQGFSALEPLVDLPIGINITRFQTLLALHRSYLTPGDSSSGWTAGAAAYYVGYLQPRTFLLKYNENGTITDAVDCALDPLSETKCTLKSFTVEKGIYQTSNFRVQPTESIVRFPNITNLCPFGEVFNATRFASVYAWNRKRISNCVADYSVLYNSASFSTFKCYGVSPTKLNDLCFTNVYADSFVIRGDEVRQIAPGQTGKIADYNYKLPDDFTGCVIAWNSNNLDSKVGGNYNYLYRLFRKSNLKPFERDISTEIYQAGSTPCNGVEGFNCYFPLQSYGFQPTNGVGYQPYRVVVLSFELLHAPATVCGPKKSTNLVKNKCVNFNFNGLTGTGVLTESNKKFLPFQQFGRDIADTTDAVRDPQTLEILDITPCSFGGVSVITPGTNTSNQVAVLYQGVNCTEVPVAIHADQLTPTWRVYSTGSNVFQTRAGCLIGAEHVNNSYECDIPIGAGICASYQTQTNSPRRARSVASQSIIAYTMSLGAENSVAYSNNSIAIPTNFTISVTTEILPVSMTKTSVDCTMYICGDSTECSNLLLQYGSFCTQLNRALTGIAVEQDKNTQEVFAQVKQIYKTPPIKDFGGFNFSQILPDPSKPSKRSFIEDLLFNKVTLADAGFIKQYGDCLGDIAARDLICAQKFNGLTVLPPLLTDEMIAQYTSALLAGTITSGWTFGAGAALQIPFAMQMAYRFNGCGVTQNVLYENQKLIANQFNSAIGKIQDSLSSTASALGKLQDVVNQNAQALNTLVKQLSSNFGAISSVLNDILSRLDKVEAEVQIDRLITGRLQSLQTYVTQQLIRAAEIRASANLAATKMSECVLGQSKRVDFCGKGCHLMSFPQSAPHGVVFLHVTYVPAQEKNFTTAPAICHDGKAHFPREGVFVSNGTHWFVTQRNFYEPQIITTDNTFVSGNCDVVIGIVNNTVYDPLQPELDSGGSGYIPEAPRDGQAYVRKDGEWVLLSTFL

SEQ ID NO: 10299 - protein, 1177 aa, Artificial Sequence
  SARS-CoV-2/Belgium/ULG-6939/2020__EPI_ISL_417020 spike protein (1-1147)(I909C_Y1047C) Foldon construct
MFVFLVLLPLVSSQCVNLTTRTQLPPAYTNSFTRGVYYPDKVFRSSVLHSTQDLFLPFFSNVTWFHAIHVSGTNGTKRFDNPVLPFNDGVYFASTEKSNIIRGWIFGTTLDSKTQSLLIVNNATNVVIKVCEFQFCNDPFLGVYYHKNNKSWMESEFRVYSSANNCTFEYVSQPFLMDLEGKQGNFKNLREFVFKNIDGYFKIYSKHTPINLVRDLPQGFSALEPLVDLPIGINITRFQTLLALHRSYLTPGDSSSGWTAGAAAYYVGYLQPRTFLLKYNENGTITDAVDCALDPLSETKCTLKSFTVEKGIYQTSNFRVQPTESIVRFPNITNLCPFGEVFNATRFASVYAWNRKRISNCVADYSVLYNSASFSTFKCYGVSPTKLNDLCFTNVYADSFVIRGDEVRQIAPGQTGKIADYNYKLPDDFTGCVIAWNSNNLDSKVGGNYNYLYRLFRKSNLKPFERDISTEIYQAGSTPCNGVEGFNCYFPLQSYGFQPTNGVGYQPYRVVVLSFELLHAPATVCGPKKSTNLVKNKCVNFNFNGLTGTGVLTESNKKFLPFQQFGRDIADTTDAVRDPQTLEILDITPCSFGGVSVITPGTNTSNQVAVLYQGVNCTEVPVAIHADQLTPTWRVYSTGSNVFQTRAGCLIGAEHVNNSYECDIPIGAGICASYQTQTNSPRRARSVASQSIIAYTMSLGAENSVVYSNNSIAIPTNFTISVTTEILPVSMTKTSVDCTMYICGDSTECSNLLLQYGSFCTQLNRALTGIAVEQDKNTQEVFAQVKQIYKTPPIKDFGGFNFSQILPDPSKPSKRSFIEDLLFNKVTLADAGFIKQYGDCLGDIAARDLICAQKFNGLTVLPPLLTDEMIAQYTSALLAGTITSGWTFGAGAALQIPFAMQMAYRFNGCGVTQNVLYENQKLIANQFNSAIGKIQDSLSSTASALGKLQDVVNQNAQALNTLVKQLSSNFGAISSVLNDILSRLDKVEAEVQIDRLITGRLQSLQTYVTQQLIRAAEIRASANLAATKMSECVLGQSKRVDFCGKGCHLMSFPQSAPHGVVFLHVTYVPAQEKNFTTAPAICHDGKAHFPREGVFVSNGTHWFVTQRNFYEPQIITTDNTFVSGNCDVVIGIVNNTVYDPLQPELDSGGSGYIPEAPRDGQAYVRKDGEWVLLSTFL

SEQ ID NO: 10300 - protein, 1177 aa, Artificial Sequence
  SARS-CoV-2/France/HF2496/2020__EPI_ISL_418231 spike protein (1-1147)(I909C_Y1047C) Foldon construct
MFVFLVLLPLVSSQCVNLTTRTQLPPAYTNSFTRGVYYPDKVFRSSVLHSTQDLFLPFFSNVTWFHAIHVSGTNGTKRFDNPVLPFNDGVYFASTEKSNIIRGWIFGTTLDSKTQSLLIVNNATNVVIKVCEFQFCNDPFLGVYYHKNNKSWMESEFRVYSSANNCTFEYVSQPFLMDLEGKQGNFKNLREFVFKNIDGYFKIYSKHTPINLVRDLPQGFSALEPLVDLPIGINITRFQTLLALHRSYLTPGDSSSGWTAGAAAYYVGYLQPRTFLLKYNENGTITDAVDCALDPLSETKCTLKSFTVEKGIYQTSNFRVQPTESIVRFPNITNLCPFGEVFNATRFASVYAWNRKRISNCVADYSVLYNSASFSTFKCYGVSPTKLNDLCFTNVYADSFVIRGDEVRQIAPGQTGKIADYNYKLPDDFTGCVIAWNSNNLDSKVGGNYNYLYRLFRKSNLKPFERDISTEIYQAGSTPCNGVEGFNCYFPLQSYGFQPTNGVGYQPYRVVVLSFELLHAPATVCGPKKSTNLVKNKCVNFNFNGLTGTGVLTESNKKFLPFQQFGRDIADTTDAVRDPQTLEILDITPCSFGGVSVITPGTNTSNQVAVLYQGVNCTEVPVAIHADQLTPTWRVYSTGSNVFQTRAGCLIGAEHVNNSYECDIPIGAGICASYQTQTNSPRRARSVASQSIIAYTMSLGAENSVAYSNNSIAIPTNFTISVTTEILPVSMTKTSVDCTMYICGDSTECSNLLLQYGSFCTQLNRALTGIAVEQDKNTQEVFAQVKQIYKTPPIKDFGGFNFSQILPDPSKPSKRSFIEDLLFNKVTLADAGFIKQYGDCLGDIVARDLICAQKFNGLTVLPPLLTDEMIAQYTSALLAGTITSGWTFGAGAALQIPFAMQMAYRFNGCGVTQNVLYENQKLIANQFNSAIGKIQDSLSSTASALGKLQDVVNQNAQALNTLVKQLSSNFGAISSVLNDILSRLDKVEAEVQIDRLITGRLQSLQTYVTQQLIRAAEIRASANLAATKMSECVLGQSKRVDFCGKGCHLMSFPQSAPHGVVFLHVTYVPAQEKNFTTAPAICHDGKAHFPREGVFVSNGTHWFVTQRNFYEPQIITTDNTFVSGNCDVVIGIVNNTVYDPLQPELDSGGSGYIPEAPRDGQAYVRKDGEWVLLSTFL

SEQ ID NO: 10301 - protein, 1177 aa, Artificial Sequence
  SARS-CoV-2/USA/WA-UW291/2020__EPI_ISL_418076 spike protein (1-1147)(I909C_Y1047C) Foldon construct
MFVFLVLLPLVSSQCVNLTTRTQLPPAYTNSFTRGVYYPDKVFRSSVLHSTQDLFLPFFSNVTWFHAIHVSGTNGTKRFDNPVLPFNDGVYFASTEKSNIIRGWIFGTTLDSKTQSLLIVNNATNVVIKVCEFQFCNDPFLGVYYHKNNKSWMESEFRVYSSANNCTFEYVSQPFLMDLEGKQGNFKNLREFVFKNIDGYFKIYSKHTPINLVRDLPQGFSALEPLVDLPIGINITRFQTLLALHRSYLTPGDSSSGWTAGAAAYYVGYLQPRTFLLKYNENGTITDAVDCALDPLSETKCTLKSFTVEKGIYQTSNFRVQPTESIVRFPNITNLCPFGEVFNATRFASVYAWNRKRISNCVADYSVLYNSASFSTFKCYGVSPTKLNDLCFTNVYADSFVIRGDEVRQIAPGQTGKIADYNYKLPDDFTGCVIAWNSNNLDSKVGGNYNYLYRLFRKSNLKPFERDISTEIYQAGSTPCNGVEGFNCYFPLQSYGFQPTNGVGYQPYRVVVLSFELLHAPATVCGPKKSTNLVKNKCVNFNFNGLTGTGVLTESNKKFLPFQQFGRDIADTTDAVRDPQTLEILDITPCSFGGVSVITPGTNTSNQVAVLYQGVNCTEVPVAIHADQLTPTWRVYSTGSNVFQTRAGCLIGAEHVNNSYECDIPIGAGICASYQTQTNSPRRARSVASQSIIAYTMSLGAENSVAYSNNSIAIPTNFTISVTTEILPVSMTKTSVDCTMYICGDSTECSNLLLQYGSFCTQLNRALTGIAVEQDKNTQEVFAQVKQIYKTPPIKDFGGFNFSQILPDPSKPSKRSFIEDLLFNKVTLADAGFIKQYGDCLGDIAARDLICAQKFNGLTVLPPLLTDEMIAQYTSALLAGTITSGWTFGAGAALQIPFAMQMAYRFNGCGVTQNVLYENQKLIANQFNSAIGKIQYSLSSTASALGKLQDVVNQNAQALNTLVKQLSSNFGAISSVLNDILSRLDKVEAEVQIDRLITGRLQSLQTYVTQQLIRAAEIRASANLAATKMSECVLGQSKRVDFCGKGCHLMSFPQSAPHGVVFLHVTYVPAQEKNFTTAPAICHDGKAHFPREGVFVSNGTHWFVTQRNFYEPQIITTDNTFVSGNCDVVIGIVNNTVYDPLQPELDSGGSGYIPEAPRDGQAYVRKDGEWVLLSTFL

SEQ ID NO: 10302 - protein, 1177 aa, Artificial Sequence; identical to SEQ ID NO: 10265
  SARS-CoV-2/Portugal/PT0034/2020__EPI_ISL_418019 spike protein (1-1147)(I909C_Y1047C) Foldon construct

SEQ ID NO: 10303 - protein, 1177 aa, Artificial Sequence; identical to SEQ ID NO: 10257
  SARS-CoV-2/Iceland/202/2020__EPI_ISL_417750 spike protein (1-1147)(I909C_Y1047C) Foldon construct

SEQ ID NO: 10304 - protein, 1177 aa, Artificial Sequence
  SARS-CoV-2/USA/WA-UW261/2020__EPI_ISL_418046 spike protein (1-1147)(I909C_Y1047C) Foldon construct
MFVFLVLLPLVSSQCVNLTTRTQLPPAYTNSFTRGVYYPDKVFRSSVLHSTQDLFLPFFSNVTWFHAIHVSGTNGTKRFDNPVLPFNDGVYFASTEKSNIIRGWIFGTTLDSKTQSLLIVNNATNVVIKVCEFQFCNDPFLGVYYHKNNKSWMESEFRVYSSANNCTFEYVSQPFLMDLEGKQGNFKNLREFVFKNIDGYFKIYSKHTPINLVRDLPQGFSALEPLVDLPIGINITRFQTLLALHRSYLTPGDSSSGWTAGAAAYYVGYLQPRTFLLKYNENGTITDAVDCALDPLSETKCTLKSFTVEKGIYQTSNFRVQPTESIVRFPNITNLCPFGEVFNATRFTSVYAWNRKRISNCVADYSVLYNSASFSTFKCYGVSPTKLNDLCFTNVYADSFVIRGDEVRQIAPGQTGKIADYNYKLPDDFTGCVIAWNSNNLDSKVGGNYNYLYRLFRKSNLKPFERDISTEIYQAGSTPCNGVEGFNCYFPLQSYGFQPTNGVGYQPYRVVVLSFELLHAPATVCGPKKSTNLVKNKCVNFNFNGLTGTGVLTESNKKFLPFQQFGRDIADTTDAVRDPQTLEILDITPCSFGGVSVITPGTNTSNQVAVLYQDVNCTEVPVAIHADQLTPTWRVYSTGSNVFQTRAGCLIGAEHVNNSYECDIPIGAGICASYQTQTNSPRRARSVASQSIIAYTMSLGAENSVAYSNNSIAIPTNFTISVTTEILPVSMTKTSVDCTMYICGDSTECSNLLLQYGSFCTQLNRALTGIAVEQDKNTQEVFAQVKQIYKTPPIKDFGGFNFSQILPDPSKPSKRSFIEDLLFNKVTLADAGFIKQYGDCLGDIAARDLICAQKFNGLTVLPPLLTDEMIAQYTSALLAGTITSGWTFGAGAALQIPFAMQMAYRFNGCGVTQNVLYENQKLIANQFNSAIGKIQDSLSSTASALGKLQDVVNQNAQALNTLVKQLSSNFGAISSVLNDILSRLDKVEAEVQIDRLITGRLQSLQTYVTQQLIRAAEIRASANLAATKMSECVLGQSKRVDFCGKGCHLMSFPQSAPHGVVFLHVTYVPAQEKNFTTAPAICHDGKAHFPREGVFVSNGTHWFVTQRNFYEPQIITTDNTFVSGNCDVVIGIVNNTVYDPLQPELDSGGSGYIPEAPRDGQAYVRKDGEWVLLSTFL

SEQ ID NO: 10305 - protein, 1177 aa, Artificial Sequence
  SARS-CoV-2/Portugal/PT0035/2020__EPI_ISL_418020 spike protein (1-1147)(I909C_Y1047C) Foldon construct
MFVFLVLLPLVSSQCVNLTTRTQLPPAYTNSFTRGVYYPDKVFRSSVLHSTQDLFLPFFSNVTWFHAIHVSGTNGTKRFDNPVLPFNDGVYFASTEKSNIIRGWIFGTTLDSKTQSLLIVNNATNVVIKVCEFQFCNDPFLGVYYHKNNKSWMESEFRVYSSANNCTFEYVSQPFLMDLEGKQGNFKNLREFVFKNIDGYFKIYSKHTPINLVRDLPQGFSALEPLVDLPIGINITRFQTLLALHRSYLTPGDSSSGWTAGAAAYYVGYLQPRTFLLKYNENGTITDAVDCALDPLSETKCTLKSFTVEKGIYQTSNFRVQPTESIVRFPNITNLCPFGEVFNATRFASVYAWNRKRISNCVADYSVLYNSASFSTFKCYGVSPTKLNDLCFTNVYADSFVIRGDEVRQIAPGQTGKIADYNYKLPDDFTGCVIAWNSNNLDSKVGGNYNYLYRLFRKSNLKPFERDISTEIYQAGSTPCNGVEGFNCYFPLQSYGFQPTNGVGYQPYRVVVLSFELLHAPATVCGPKKSTNLVKNKCVNFNFNGLTGTGVLTESNKKFLPFQQFGRDIADTTDAVRDPQTLEILDITPCSFGGVSVITPGTNTSNQVAVLYQDVNCTEVPVAIHADQLTPTWRVYSTGSNVFQTRAGCLIGAEHVNNSYECDIPIGAGICASYQTQTNSPRRARSVASQSIIAYTMSLGAENSVAYSNNSIAIPTNFTISVTTEILPVSMTKTSVDCTMYICGDSTECSNLLLQYGSFCTQLNRALTGIAVEQDKNTQEVFAQVKQIYKTPPIKDFGGFNFSQILPDPSKPSKRSFIEDLLFNKVTLADAGFIKQYGDCLGDISARDLICAQKFNGLTVLPPLLTDEMIAQYTSALLAGTITSGWTFGAGAALQIPFAMQMAYRFNGCGVTQNVLYENQKLIANQFNSAIGKIQDSLSSTASALGKLQDVVNQNAQALNTLVKQLSSNFGAISSVLNDILSRLDKVEAEVQIDRLITGRLQSLQTYVTQQLIRAAEIRASANLAATKMSECVLGQSKRVDFCGKGCHLMSFPQSAPHGVVFLHVTYVPAQEKNFTTAPAICHDGKAHFPREGVFVSNGTHWFVTQRNFYEPQIITTDNTFVSGNCDVVIGIVNNTVYDPLQPELDSGGSGYIPEAPRDGQAYVRKDGEWVLLSTFL

SEQ ID NO: 10306 - protein, 1177 aa, Artificial Sequence
  SARS-CoV-2/USA/NY-NYUMC7/2020__EPI_ISL_418192 spike protein (1-1147)(I909C_Y1047C) Foldon construct
MFVFLVLLPLVSSQCVNLTTRTQLPPAYTNSFTRGVYYPDKVFRSSVLHSTQDLFLPFFSNVTWFHAIHVSGTNGTKRFDNPVLPFNDGVYFASTEKSNIIRGWIFGTTLDSKTQSLLIVNNATNVVIKVCEFQFCNDPFLGVYHHKNNKSWMESEFRVYSSANNCTFEYVSQPFLMDLEGKQGNFKNLREFVFKNIDGYFKIYSKHTPINLVRDLPQGFSALEPLVDLPIGINITRFQTLLALHRSYLTPGDSSSGWTAGAAAYYVGYLQPRTFLLKYNENGTITDAVDCALDPLSETKCTLKSFTVEKGIYQTSNFRVQPTESIVRFPNITNLCPFGEVFNATRFASVYAWNRKRISNCVADYSVLYNSASFSTFKCYGVSPTKLNDLCFTNVYADSFVIRGDEVRQIAPGQTGKIADYNYKLPDDFTGCVIAWNSNNLDSKVGGNYNYLYRLFRKSNLKPFERDISTEIYQAGSTPCNGVEGFNCYFPLQSYGFQPTNGVGYQPYRVVVLSFELLHAPATVCGPKKSTNLVKNKCVNFNFNGLTGTGVLTESNKKFLPFQQFGRDIADTTDAVRDPQTLEILDITPCSFGGVSVITPGTNTSNQVAVLYQGVNCTEVPVAIHADQLTPTWRVYSTGSNVFQTRAGCLIGAEHVNNSYECDIPIGAGICASYQTQTNSPRRARSVASQSIIAYTMSLGAENSVAYSNNSIAIPTNFTISVTTEILPVSMTKTSVDCTMYICGDSTECSNLLLQYGSFCTQLNRALTGIAVEQDKNTQEVFAQVKQIYKTPPIKDFGGFNFSQILPDPSKPSKRSFIEDLLFNKVTLADAGFIKQYGDCLGDIAARDLICAQKFNGLTVLPPLLTDEMIAQYTSALLAGTITSGWTFGAGAALQIPFAMQMAYRFNGCGVTQNVLYENQKLIANQFNSAIGKIQDSLSSTASALGKLQDVVNQNAQALNTLVKQLSSNFGAISSVLNDILSRLDKVEAEVQIDRLITGRLQSLQTYVTQQLIRAAEIRASANLAATKMSECVLGQSKRVDFCGKGCHLMSFPQSAPHGVVFLHVTYVPAQEKNFTTAPAICHDGKAHFPREGVFVSNGTHWFVTQRNFYEPQIITTDNTFVSGNCDVVIGIVNNTVYDPLQPELDSGGSGYIPEAPRDGQAYVRKDGEWVLLSTFL

SEQ ID NO: 10307 - protein, 1177 aa, Artificial Sequence
  SARS-CoV-2/Iceland/189/2020__EPI_ISL_417709 spike protein (1-1147)(I909C_Y1047C) Foldon construct
MFVFLVLLPLVSSQCVNLTTRTQLPPAYTNSFTRGVYYPDKVFRSSVLHSTQDLFLPFFSNVTWFHAIHVSGTNGTKRFDNPVLPFNDGVYFASTEKSNIIRGWIFGTTLDSKTQSLLIVNNATNVVIKVCEFQFCNDPFLGVYYHKNNKSWMESEFRVYSSANNCTFEYVSQPFLMDLEGKQGNFKNLREFVFKNIDGYFKIYSKHTPINLVRDLPQGFSALEPLVDLPIGINITRFQTLLALHRSYLTPGDSSSGWTAGAAAYYVGYLQPRTFLLKYNENGTITDAVDCALDPLSETKCTLKSFTVEKGIYQTSNFRVQPTESIVRFPNITNLCPFGEVFNATRFASVYAWNRKRISNCVADYSVLYNSASFSTFKCYGVSPTKLNDLCFTNVYADSFVIRGDEVRQIAPGQTGKIADYNYKLPDDFTGCVIAWNSNNLDSKVGGNYNYLYRLFRKSNLKPFERDISTEIYQAGSTPCNGVEGFNCYFPLQSYGFQPTNGVGYQPYRVVVLSFELLHAPATVCGPKKSTNLVKNKCVNFNFNGLTGTGVLTESNKKFLPFQQFGRDIADTTDAVRDPQTLEILDITPCSFGGVSVITPGTNTSNQVAVLYQGVNCTEVPVAIHADQLTPTWRVYSTGSNVFQTRAGCLIGAEHVNNSYECDIPIGAGICASYQTQTNSPRRARSVASQSIIAYTMSLGAENSVAYSNNSIAIPTNFTISVTTEILPVSMTKTSVDCTMYICGDSTECSNLLLQYGSFCTQLNRALTGIAVEQDKNTQEVFAQVKQIYKTPPIKDFGGFNFSQILPDPSKPSKRSFIEDLLFNKVTLADAGFTKQYGDCLGDIAARDLICAQKFNGLTVLPPLLTDEMIAQYTSALLAGTITSGWTFGAGAALQIPFAMQMAYRFNGCGVTQNVLYENQKLIANQFNSAIGKIQDSLSSTASALGKLQDVVNQNAQALNTLVKQLSSNFGAISSVLNDILSRLDKVEAEVQIDRLITGRLQSLQTYVTQQLIRAAEIRASANLAATKMSECVLGQSKRVDFCGKGCHLMSFPQSAPHGVVFLHVTYVPAQEKNFTTAPAICHDGKAHFPREGVFVSNGTHWFVTQRNFYEPQIITTDNTFVSGNCDVVIGIVNNTVYDPLQPELDSGGSGYIPEAPRDGQAYVRKDGEWVLLSTFL

SEQ ID NO: 10308 - protein, 1177 aa, Artificial Sequence
  SARS-CoV-2/Australia/NSW56/2020__EPI_ISL_417408 spike protein (1-1147)(I909C_Y1047C) Foldon construct
MFVFLVLLPLVSSQCVNLTTRTQLPPAYTNSFTRGVYYPDKVFRSSVLHSTQDLFLPFFSNVTWFHAIHVSGTNGTKRFDNPVLPFNDGVYFASTEKSNIIRGWIFGTTLDSKTQSLLIVNNATNVVIKVCEFQFCNDPFLGVYYHKNNKSWMESEFRVYSSANNCTFEYVSQPFLMDLEGKQGNFKNLREFVFKNIDGYFKIYSKHTPINLVRDLPQGFSALEPLVDLPIGINITRFQTLLALHRSYLTPGDSSSGWTAGAAAYYVGYLQPRTFLLKYNENGTITDAVDCALDPLSETKCTLKSFTVEKGIYQTSNFRVQPTESIVRFPNITNLCPFGEVFNATRFASVYAWNRKRISNCVADYSVLYNSASFSTFKCYGVSPTKLNDLCFTNVYADSFVIRGDEVRQIAPGQTGKIADYNYKLPDDFTGCVIAWNSNNLDSKVGGNYNYLYRLFRKSNLKPFERDISTEIYQAGSTPCNGVEGFNCYFPLQSYGFQPTNGVGYQPYRVVVLSFELLHAPATVCGPKKSTNLVKNKCVNFNFNGLTGTGVLTESNKKFLPFQQFGRDIADTTDAVRDPQTLEILDITPCSFGGVSVITPGTNTSNQVAVLYQDVNCTEVPVAIHADQLTPTWRVYSTGSNVFQTRAGCLIGAEHVNNSYECDIPIGAGICASYQTQTNSPRRARSVASQSIIAYTMSLGAENSVAYSNNSIAIPTNFTISVTTEILPVSMTKTSVDCTMYICGDSTECSNLLLQYGSFCTQLNRALTGIAVEQDKNTQEVFAQVKQIYKTPPIKDFGGFNFSQILPDSSKPSKRSFIEDLLFNKVTLADAGFIKQYGDCLGDIAARDLICAQKFNGLTVLPPLLTDEMIAQYTSALLAGTITSGWTFGAGAALQIPFAMQMAYRFNGCGVTQNVLYENQKLIANQFNSAIGKIQDSLSSTASALGKLQDVVNQNAQALNTLVKQLSSNFGAISSVLNDILSRLDKVEAEVQIDRLITGRLQSLQTYVTQQLIRAAEIRASANLAATKMSECVLGQSKRVDFCGKGCHLMSFPQSAPHGVVFLHVTYVPAQEKNFTTAPAICHDGKAHFPREGVFVSNGTHWFVTQRNFYEPQIITTDNTFVSGNCDVVIGIVNNTVYDPLQPELDSGGSGYIPEAPRDGQAYVRKDGEWVLLSTFL

SEQ ID NO: 10309 - protein, 1177 aa, Artificial Sequence
  SARS-CoV-2/Iceland/280/2020__EPI_ISL_417608 spike protein (1-1147)(I909C_Y1047C) Foldon construct
MFVFLVLLPLVSSQCVNLTTRTQLPPAYTNSFTRGVYYPDKVFRSSVLHSTQDLFLPFFSNVTWFHAIHVSGTNGTKRFDNPVLPFNDGVYFASTEKSNIIRGWIFGTTLDSKTQSLLIVNNATNVVIKVCEFQFCNDPFLGVYYHKNNKSWMESEFRVYSSANNCTFEYVSQPFLMDLEGKQGNFKNLREFVFKNIDGYFKIYSKHTPINLVRDLPQGFSALEPLVDLPIGINITRFQTLLALHRSYLTPGDSSSGWTAGAAAYYVGYLQPRTFLLKYNENGTITDAVDCALDPLSETKCTLKSFTVEKGIYQTSNFRVQPTESIVRFPNITNLCPFGEVFNATRFASVYAWNRKRISNCVADYSVLYNSASFSTFKCYGVSPTKLNDLCFTNVYADSFVIRGDEVRQIAPGQTGKIADYNYKLPDDFTGCVIAWNSNNLDSKVGGNYNYLYRLFRKSNLKPFERDISTEIYQAGSTPCNGVEGFNCYFPLQSYGFQPTNGVGYQPYRVVVLSFELLHAPATVCGPKKSTNLVKNKCVNFNFNGLTGTGVLTESNKKFLPFQQFGRDIADTTDAVRDPQTLEILDITPCSFGGVSVITPGTNTSNQVAVLYQGVNCTEVPVAIHADQLTPTWRVYSTGSNVFQTRAGCLIGAEHVNNSYECDIPIGAGICASYHTQTNSPRRARSVASQSIIAYTMSLGAENSVAYSNNSIAIPTNFTISVTTEILPVSMTKTSVDCTMYICGDSTECSNLLLQYGSFCTQLNRALTGIAVEQDKNTQEVFAQVKQIYKTPPIKDFGGFNFSQILPDPSKPSKRSFIEDLLFNKVTLADAGFIKQYGDCLGDIAARDLICAQKFNGLTVLPPLLTDEMIAQYTSALLAGTITSGWTFGAGAALQIPFAMQMAYRFNGCGVTQNVLYENQKLIANQFNSAIGKIQDSLSSTASALGKLQDVVNQNAQALNTLVKQLSSNFGAISSVLNDILSRLDKVEAEVQIDRLITGRLQSLQTYVTQQLIRAAEIRASANLAATKMSECVLGQSKRVDFCGKGCHLMSFPQSAPHGVVFLHVTYVPAQEKNFTTAPAICHDGKAHFPREGVFVSNGTHWFVTQRNFYEPQIITTDNTFVSGNCDVVIGIVNNTVYDPLQPELDSGGSGYIPEAPRDGQAYVRKDGEWVLLSTFL

SEQ ID NO: 10310 - protein, 1177 aa, Artificial Sequence; identical to SEQ ID NO: 10265
  SARS-CoV-2/Iceland/247/2020__EPI_ISL_417575 spike protein (1-1147)(I909C_Y1047C) Foldon construct

SEQ ID NO: 10311 - protein, 1177 aa, Artificial Sequence
  SARS-CoV-2/Iceland/238/2020__EPI_ISL_417566 spike protein (1-1147)(I909C_Y1047C) Foldon construct
MFVFLVLLPLVSSQCVNLTTRTQLPPAYTNSFTRGVYYPDKVFRSSVLHSTQDLFLPFFSNVTWFHAIHVSGTNGTKRFDNPVLPFNDGVYFASTEKSNIIRGWIFGTTLDSKTQSLLIVNNATNVVIKVCEFQFCNDPFLGVYYHKNNKSWMESEFRVYSSANNCTFEYVSQPFLMDLEGKQGNFKNLREFVFKNIDGYFKIYSKHTPINLVRDLPQGFSALEPLVDLPIGINITRFQTLLALHRSYLTPGDSSSGWTAGAAAYYVGYLQPRTFLLKYNENGTITDAVDCALDPLSETKCTLKSFTVEKGIYQTSNFRVQPTESIVRFPNITNLCPFGEVFNATRFASVYAWNRKRISNCVADYSVLYNSASFSTFKCYGVSPTKLNDLCFTNVYADSFVIRGDEVRQIAPGQTGKIADYNYKLPDDFTGCVIAWNSNNLDSKVGGNYNYLYRLFRKSNLKPFERDISTEIYQAGSTPCNGVEGFNCYFPLQSYGFQPTNGVGYQPYRVVVLSFELLHAPATVCGPKKSTNLVKNKCVNFNFNGLTGTGVLTESNKKFLPFQQFGRDIADTTDAVRDPQTLEILDITPCSFGGVSVITPGTNTSNQVAVLYQGVNCTEVPVAIHADQLTPTWRVYSTGSNVFQTRAGCLIGAEHVNNSYECDIPIGAGICASYQTQTNSPRRARSVASQSIIAYTMSLGAENSVAYSNNSIAIPTNFTISVTTEILPVSMTKTSVDCTMYICGDSTECSNLLLQYGSFCTQLNRALTGIAVEQDKNTQEVFAQVKQIYKTPPIKDFGGFNFSQILPDPSKPSKRSFIEDLLFNKVTLADVGFIKQYGDCLGDIAARDLICAQKFNGLTVLPPLLTDEMIAQYTSALLAGTITSGWTFGAGAALQIPFAMQMAYRFNGCGVTQNVLYENQKLIANQFNSAIGKIQDSLSSTASALGKLQDVVNQNAQALNTLVKQLSSNFGAISSVLNDILSRLDKVEAEVQIDRLITGRLQSLQTYVTQQLIRAAEIRASANLAATKMSECVLGQSKRVDFCGKGCHLMSFPQSAPHGVVFLHVTYVPAQEKNFTTAPAICHDGKAHFPREGVFVSNGTHWFVTQRNFYEPQIITTDNTFVSGNCDVVIGIVNNTVYDPLQPELDSGGSGYIPEAPRDGQAYVRKDGEWVLLSTFL

SEQ ID NO: 10312 - protein, 1177 aa, Artificial Sequence
  SARS-CoV-2/Greece/16/2020__EPI_ISL_418265 spike protein (1-1147)(I909C_Y1047C) Foldon construct
MFVFLVLLPLVSSQCVNLTTRTQLPPAYTNSFTRGVYYPDKVFRSSVLHSTQDLFLPFFSNVTWFHAIHVSGTNGTKRFDNPVLPFNDGVYFASTEKSNIIRGWIFGTTLDSKTQSLLIVNNATNVVIKVCEFQFCNDPFLGVYYHKNNKSWMESEFRVYSSANNCTFEYVSQPFLMDLEGKQGNFKNLREFVFKNVDGYFKIYSKHTPINLVRDLPQGFSALEPLVDLPIGINITRFQTLLALHRSYLTPGDSSSGWTAGAAAYYVGYLQPRTFLLKYNENGTITDAVDCALDPLSETKCTLKSFTVEKGIYQTSNFRVQPTESIVRFPNITNLCPFGEVFNATRFASVYAWNRKRISNCVADYSVLYNSASFSTFKCYGVSPTKLNDLCFTNVYADSFVIRGDEVRQIAPGQTGKIADYNYKLPDDFTGCVIAWNSNNLDSKVGGNYNYLYRLFRKSNLKPFERDISTEIYQAGSTPCNGVEGFNCYFPLQSYGFQPTNGVGYQPYRVVVLSFELLHAPATVCGPKKSTNLVKNKCVNFNFNGLTGTGVLTESNKKFLPFQQFGRDIADTTDAVRDPQTLEILDITPCSFGGVSVITPGTNTSNQVAVLYQDVNCTEVPVAIHADQLTPTWRVYSTGSNVFQTRAGCLIGAEHVNNSYECDIPIGAGICASYQTQTNSPRRARSVASQSIIAYTMSLGAENSVAYSNNSIAIPTNFTISVTTEILPVSMTKTSVDCTMYICGDSTECSNLLLQYGSFCTQLNRALTGIAVEQDKNTQEVFAQVKQIYKTPPIKDFGGFNFSQILPDPSKPSKRSFIEDLLFNKVTLADAGFIKQYGDCLGDIAARDLICAQKFNGLTVLPPLLTDEMIAQYTSALLAGTITSGWTFGAGAALQIPFAMQMAYRFNGCGVTQNVLYENQKLIANQFNSAIGKIQDSLSSTASALGKLQDVVNQNAQALNTLVKQLSSNFGAISSVLNDILSRLDKVEAEVQIDRLITGRLQSLQTYVTQQLIRAAEIRASANLAATKMSECVLGQSKRVDFCGKGCHLMSFPQSAPHGVVFLHVTYVPAQEKNFTTAPAICHDGKAHFPREGVFVSNGTHWFVTQRNFYEPQIITTDNTFVSGNCDVVIGIVNNTVYDPLQPELDSGGSGYIPEAPRDGQAYVRKDGEWVLLSTFL

SEQ ID NO: 10313 - protein, 1177 aa, Artificial Sequence
  SARS-CoV-2/Iceland/319/2020__EPI_ISL_417648 spike protein (1-1147)(I909C_Y1047C) Foldon construct
MFVFLVLLPLVSSQCVNLTTRTQLPPAYTNSFTRGVYYPDKVFRSSVLHSTQDLFLPFFSNVTWFHAIHVSGTNGTKRFDNPVLPFNDGVYFASTEKSNIIRGWIFGTTLDSKTQSLLIVNNATNVVIKVCEFQFCNDPFLGVYYHKNNKSWMESEFRVYSSANNCTFEYVSQPFLIDLEGKQGNFKNLREFVFKNIDGYFKIYSKHTPINLVRDLPQGFSALEPLVDLPIGINITRFQTLLALHRSYLTPGDSSSGWTAGAAAYYVGYLQPRTFLLKYNENGTITDAVDCALDPLSETKCTLKSFTVEKGIYQTSNFRVQPTESIVRFPNITNLCPFGEVFNATRFASVYAWNRKRISNCVADYSVLYNSASFSTFKCYGVSPTKLNDLCFTNVYADSFVIRGDEVRQIAPGQTGKIADYNYKLPDDFTGCVIAWNSNNLDSKVGGNYNYLYRLFRKSNLKPFERDISTEIYQAGSTPCNGVEGFNCYFPLQSYGFQPTNGVGYQPYRVVVLSFELLHAPATVCGPKKSTNLVKNKCVNFNFNGLTGTGVLTESNKKFLPFQQFGRDIADTTDAVRDPQTLEILDITPCSFGGVSVITPGTNTSNQVAVLYQGVNCTEVPVAIHADQLTPTWRVYSTGSNVFQTRAGCLIGAEHVNNSYECDIPIGAGICASYQTQTNSPRRARSVASQSIIAYTMSLGAENSVAYSNNSIAIPTNFTISVTTEILPVSMTKTSVDCTMYICGDSTECSNLLLQYGSFCTQLNRALTGIAVEQDKNTQEVFAQVKQIYKTPPIKDFGGFNFSQILPDPSKPSKRSFIEDLLFNKVTLADAGFIKQYGDCLGDIAARDLICAQKFNGLTVLPPLLTDEMIAQYTSALLAGTITSGWTFGAGAALQIPFAMQMAYRFNGCGVTQNVLYENQKLIANQFNSAIGKIQDSLSSTASALGKLQDVVNQNAQALNTLVKQLSSNFGAISSVLNDILSRLDKVEAEVQIDRLITGRLQSLQTYVTQQLIRAAEIRASANLAATKMSECVLGQSKRVDFCGKGCHLMSFPQSAPHGVVFLHVTYVPAQEKNFTTAPAICHDGKAHFPREGVFVSNGTHWFVTQRNFYEPQIITTDNTFVSGNCDVVIGIVNNTVYDPLQPELDSGGSGYIPEAPRDGQAYVRKDGEWVLLSTFL

SEQ ID NO: 10314 - protein, 1177 aa, Artificial Sequence
  SARS-CoV-2/Congo/94/2020__EPI_ISL_417947 spike protein (1-1147)(I909C_Y1047C) Foldon construct
MFVFLVLLPLVSSQCVNLTTRTQLPPAYTNSFTRGVYYPDKVFRSSVLHSTQDLFLPFFSNVTWFHAIHVSGTNGTKRFDNPVLPFNDGVYFASTEKSNIIRGWIFGTTLDSKTQSLLIVNNATNVVIKVCEFQFCNDPFLGVYYHKNNKSWMESEFRVYSSANNCTFEYVSQPFLMDLEGKQGNFKNLREFVFKNIDGYFKIYSKHTPINLVRDLPQGFSALEPLVDLPIGINITRFQTLLALHRSYLTPGDSSSGWTAGAAAYYVGYLQPRTFLLKYNENGTITDAVDCALDPLSETKCTLKSFTVEKGIYQTSNFRVQPTESIVRFPNITNLCPFGEVFNATRFASVYAWNRKRISNCVADYSVLYNSASFSTFKCYGVSPTKLNDLCFTNVYADSFVIRGDEVRQIAPGQTGKIADYNYKLPDDFTGCVIAWNSNNLDSKVGGNYNYLYRLFRKSNLKPFERDISTEIYQAGSTPCNGVEGFNCYFPLQSYGFQPTNGVGYQPYRVVVLSFELLHAPATVCGPKKSTNLVKNKCVNFNFNGLTGTGVLTESNKKFLPFQQFGRDIADTTDAVRDPQTLEILDITPCSFGGVSVITPGTNTSNQVAVLYQGVNCTEVPVAIHADQLTPTWRVYSTGSNVFQTRAGCLIGAEHVNNSYECDIPIGAGICASYQTQTNSPRRARSVASQSIIAYTMSLGAENSVAYSNNSIAIPTNFTISVTTEILPVSMTKTSVDCTMYICGDSTECSNLLLQYGSFCTQLNRALTGIAVEQDKNTQEVFAQVKQIYKTPPIKDFGGFNFSQILPDPSKPSKRSFIEDILFNKVTLADAGFIKQYGDCLGDIAARDLICAQKFNGLTVLPPLLTDEMIAQYTSALLAGTITSGWTFGAGAALQIPFAMQMAYRFNGCGVTQNVLYENQKLIANQFNSAIGKIQDSLSSTASALGKLQDVVNQNAQALNTLVKQLSSNFGAISSVLNDILSRLDKVEAEVQIDRLITGRLQSLQTYVTQQLIRAAEIRASANLAATKMSECVLGQSKRVDFCGKGCHLMSFPQSAPHGVVFLHVTYVPAQEKNFTTAPAICHDGKAHFPREGVFVSNGTHWFVTQRNFYEPQIITTDNTFVSGNCDVVIGIVNNTVYDPLQPELDSGGSGYIPEAPRDGQAYVRKDGEWVLLSTFL

SEQ ID NO: 10315 - protein, 1177 aa, Artificial Sequence
  SARS-CoV-2/Congo/158/2020__EPI_ISL_417950 spike protein (1-1147)(I909C_Y1047C) Foldon construct
MFVFLVLLPLVSSQCVNLTTRTQLPPAYTNSFTRGVYYPDKVFRSSVLHSTQDLFLPFFSNVTWFHAIHVSGTNGTKRFDNPVLPFNDGVYFASTEKSNIIRGWIFGTTLDSKTQSLLIVNNATNVVIKVCEFQFCNDPFLGVYYHKNNKSWMESEFRVYSSANNCTFEYVSQPFLMDLEGKQGNFKNLREFVFKNIDGYFKIYSKHTPINLVRDLPQGFSALEPLVDLPIGINITRFQTLLALHRSYLTPGDSSSGWTAGAAAYYVGYLQPRTFLLKYNENGTITDAVDCALDPLSETKCTLKSFTVEKGIYQTSNFRVQPTESIVRFPNITNLCPFGEVFNATRFASVYAWNRKRISNCVADYSVLYNSASFSTFKCYGVSPTKLNDLCFTNVYADSFVIRGDEVRQIAPGQTGKIADYNYKLPDDFTGCVIAWNSNNLDSKVGGNYNYLYRLFRKSNLKPFERDISTEIYQAGSTPCNGVEGFNCYFPLQSYGFQPTNGVGYQPYRVVVLSFELLHAPATVCGPKKSTNLVKNKCVNFNFNGLTGTGVLTESNKKFLPFQQFGRDIADTTDAVRDPQTLEILDITPCSFGGVSVITPGTNTSNQVAVLYQDVNCTEVPVAIHADQLTPTWRVYSTGSNVFQTRAGCLIGAEHVNNSYECDIPIGAGICASYQTQTNSPRRARSVASQSIIAYTMSLGAENSVAYSNNSIAIPTNFTISVTTEILPVSMTKTSVDCTMYICGDSTECSNLLLQYGSFCTQLNRALTGIAVEQDKNTQEVFAQVKQIYKTPPIKDFGGFNFSQILPDPSKPSKRSFIEDLLFNKVTLADAGFIKQYGDCLGDIAARDLICAQKFNGLTVLPPLLTDEMIAQYTSALLAGTITSGWTFGAGAALQIPFAMQMAYRFNGCGVTQNVLYENQKLIANQFNSAIGKIQDSLSSTASALGKLQDVVNQNAQALNTLVKQLSSNFGAISSVLNDILSRLDKVEAEVQIDRLITGRLQSLQTYVTQQLIRAAEIRASANLAATKMSECVLGQSKRVDFCGKGCHLMSFPQSAPHGVVFLHVTYVPAQEKNFTTAPAICHDGKAHFPREGVFVSNGTHWFVTQRNFYEPQIITTDNTFLSGNCDVVIGIVNNTVYDPLQPELDSGGSGYIPEAPRDGQAYVRKDGEWVLLSTFL

SEQ ID NO: 10316 - protein, 1177 aa, Artificial Sequence
  SARS-CoV-2/USA/UT-00034/2020__EPI_ISL_417977 spike protein (1-1147)(I909C_Y1047C) Foldon construct
MFVFLVLLPLVSSQCVNLTTRTQLPPAYTNSFTRGVYYPDKVFRSSVLHSTQDLFLPFFSNVTWFHAIHVSGTNGTKRFDNPVLPFNDGVYFASTEKSNIIRGWIFGTTLDSKTQSLLIVNNATNVVIKVCEFQFCNDPFLGVYYYKNNKSWMESEFRVYSSANNCTFEYVSQPFLMDLEGKQGNFKNLREFVFKNIDGYFKIYSKHTPINLVRDLPQGFSALEPLVDLPIGINITRFQTLLALHRSYLTPGDSSSGWTAGAAAYYVGYLQPRTFLLKYNENGTITDAVDCALDPLSETKCTLKSFTVEKGIYQTSNFRVQPTESIVRFPNITNLCPFGEVFNATRFASVYAWNRKRISNCVADYSVLYNSASFSTFKCYGVSPTKLNDLCFTNVYADSFVIRGDEVRQIAPGQTGKIADYNYKLPDDFTGCVIAWNSNNLDSKVGGNYNYLYRLFRKSNLKPFERDISTEIYQAGSTPCNGVEGFNCYFPLQSYGFQPTNGVGYQPYRVVVLSFELLHAPATVCGPKKSTNLVKNKCVNFNFNGLTGTGVLTESNKKFLPFQQFGRDIADTTDAVRDPQTLEILDITPCSFGGVSVITPGTNTSNQVAVLYQGVNCTEVPVAIHADQLTPTWRVYSTGSNVFQTRAGCLIGAEHVNNSYECDIPIGAGICASYQTQTNSPRRARSVASQSIIAYTMSLGAENSVAYSNNSIAIPTNFTISVTTEILPVSMTKTSVDCTMYICGDSTECSNLLLQYGSFCTQLNRALTGIAVEQDKNTQEVFAQVKQIYKTPPIKDFGGFNFSQILPDPSKPSKRSFIEDLLFNKVTLADAGFIKQYGDCLGDIAARDLICAQKFNGLTVLPPLLTDEMIAQYTSALLAGTITSGWTFGAGAALQIPFAMQMAYRFNGCGVTQNVLYENQKLIANQFNSAIGKIQDSLSSTASALGKLQDVVNQNAQALNTLVKQLSSNFGAISSVLNDILSRLDKVEAEVQIDRLITGRLQSLQTYVTQQLIRAAEIRASANLAATKMSECVLGQSKRVDFCGKGCHLMSFPQSAPHGVVFLHVTYVPAQEKNFTTAPAICHDGKAHFPREGVFVSNGTHWFVTQRNFYEPQIITTDNTFVSGNCDVVIGIVNNTVYDPLQPELDSGGSGYIPEAPRDGQAYVRKDGEWVLLSTFL

SEQ ID NO: 10317 - protein, 1177 aa, Artificial Sequence
  SARS-CoV-2/USA/UT-00033/2020__EPI_ISL_417976 spike protein (1-1147)(I909C_Y1047C) Foldon construct
MFVFLVLLPLVSSQCVNLTTRTQLPPAYTNSFTRGVYYPDKVFRSSVLHSTQDLFLPFFSNVTWFHAIHVSGTNGTKRFDNPVLPFNDGVYFASTEKSNIIRGWIFGTTLDSKTQSLLIVNNATNVVIKVCEFQFCNDPFLGVYYHKNNKSWMESEFRVYSSANNCTFEYVSQPFLMDLEGKQGNFKNLREFVFKNIDGYFKIYSKHTPINLVRDLPQGFSALEPLVDLPIGINITRFQTLLALHRSYLTPGDSSSGLTAGAAAYYVGYLQPRTFLLKYNENGTITDAVDCALDPLSETKCTLKSFTVEKGIYQTSNFRVQPTESIVRFPNITNLCPFGEVFNATRFASVYAWNRKRISNCVADYSVLYNSASFSTFKCYGVSPTKLNDLCFTNVYADSFVIRGDEVRQIAPGQTGKIADYNYKLPDDFTGCVIAWNSNNLDSKVGGNYNYLYRLFRKSNLKPFERDISTEIYQAGSTPCNGVEGFNCYFPLQSYGFQPTNGVGYQPYRVVVLSFELLHAPATVCGPKKSTNLVKNKCVNFNFNGLTGTGVLTESNKKFLPFQQFGRDIADTTDAVRDPQTLEILDITPCSFGGVSVITPGTNTSNQVAVLYQGVNCTEVPVAIHADQLTPTWRVYSTGSNVFQTRAGCLIGAEHVNNSYECDIPIGAGICASYQTQTNSPRRARSVASQSIIAYTMSLGAENSVAYSNNSIAIPTNFTISVTTEILPVSMTKTSVDCTMYICGDSTECSNLLLQYGSFCTQLNRALTGIAVEQDKNTQEVFAQVKQIYKTPPIKDFGGFNFSQILPDPSKPSKRSFIEDLLFNKVTLADAGFIKQYGDCLGDIAARDLICAQKFNGLTVLPPLLTDEMIAQYTSALLAGTITSGWTFGAGAALQIPFAMQMAYRFNGCGVTQNVLYENQKLIANQFNSAIGKIQDSLSSTASALGKLQDVVNQNAQALNTLVKQLSSNFGAISSVLNDILSRLDKVEAEVQIDRLITGRLQSLQTYVTQQLIRAAEIRASANLAATKMSECVLGQSKRVDFCGKGCHLMSFPQSAPHGVVFLHVTYVPAQEKNFTTAPAICHDGKAHFPREGVFVSNGTHWFVTQRNFYEPQIITTDNTFVSGNCDVVIGIVNNTVYDPLQPELDSGGSGYIPEAPRDGQAYVRKDGEWVLLSTFL

SEQ ID NO: 10318 - protein, 1177 aa, Artificial Sequence
  SARS-CoV-2/USA/WI-13/2020__EPI_ISL_417516 spike protein (1-1147)(I909C_Y1047C) Foldon construct
MFVFLVLLPLVSSQCVNLTTRTQLPPAYTNSFTRGVYYPDKVFRSSVLHSTQDLFLPFFSNVTWFHAIHVSGTNGTKRFDNPVLPFNDGVYFASTEKSNIIRGWIFGTTLDSKTQSLLIVNNATNVVIKVCEFQFCNDPFLGVYYHKNNKSWMESEFRVYSSANNCTFEYVSQPFLMDLEGKQGNFKNLREFVFKNIDGYFKIYSKHTPINLVRDLPQGFSALEPLVDLPIGINITRFQTLLALHRSYLTPGDSSSGWTAGAAAYYVGYLQPRTFLLKYNENGTITDAVDCALDPLSETKCTLKSFTVEKGIYQTSNFRVLPTESIVRFPNITNLCPFGEVFNATRFASVYAWNRKRISNCVADYSVLYNSASFSTFKCYGVSPTKLNDLCFTNVYADSFVIRGDEVRQIAPGQTGKIADYNYKLPDDFTGCVIAWNSNNLDSKVGGNYNYLYRLFRKSNLKPFERDISTEIYQAGSTPCNGVEGFNCYFPLQSYGFQPTNGVGYQPYRVVVLSFELLHAPATVCGPKKSTNLVKNKCVNFNFNGLTGTGVLTESNKKFLPFQQFGRDIADTTDAVRDPQTLEILDITPCSFGGVSVITPGTNTSNQVAVLYQGVNCTEVPVAIHADQLTPTWRVYSTGSNVFQTRAGCLIGAEHVNNSYECDIPIGAGICASYQTQTNSPRRARSVASQSIIAYTMSLGAENSVAYSNNSIAIPTNFTISVTTEILPVSMTKTSVDCTMYICGDSTECSNLLLQYGSFCTQLNRALTGIAVEQDKNTQEVFAQVKQIYKTPPIKDFGGFNFSQILPDPSKPSKRSFIEDLLFNKVTLADAGFIKQYGDCLGDIAARDLICAQKFNGLTVLPPLLTDEMIAQYTSALLAGTITSGWTFGAGAALQIPFAMQMAYRFNGCGVTQNVLYENQKLIANQFNSAIGKIQDSLSSTASALGKLQDVVNQNAQALNTLVKQLSSNFGAISSVLNDILSRLDKVEAEVQIDRLITGRLQSLQTYVTQQLIRAAEIRASANLAATKMSECVLGQSKRVDFCGKGCHLMSFPQSAPHGVVFLHVTYVPAQEKNFTTAPAICHDGKAHFPREGVFVSNGTHWFVTQRNFYEPQIITTDNTFVSGNCDVVIGIVNNTVYDPLQPELDSGGSGYIPEAPRDGQAYVRKDGEWVLLSTFL

SEQ ID NO: 10319 - protein, 1176 aa, Artificial Sequence
  SARS-CoV-2/India/1-27/2020__EPI_ISL_413522 spike protein (1-1146)(I908C_Y1046C) Foldon construct
MFVFLVLLPLVSSQCVNLTTRTQLPPAYTNSFTRGVYYPDKVFRSSVLHSTQDLFLPFFSNVTWFHAIHVSGTNGTKRFDNPVLPFNDGVYFASTEKSNIIRGWIFGTTLDSKTQSLLIVNNATNVVIKVCEFQFCNDPFLGVYHKNNKSWMESEFRVYSSANNCTFEYVSQPFLMDLEGKQGNFKNLREFVFKNIDGYFKIYSKHTPINLVRDLPQGFSALEPLVDLPIGINITRFQTLLALHRSYLTPGDSSSGWTAGAAAYYVGYLQPRTFLLKYNENGTITDAVDCALDPLSETKCTLKSFTVEKGIYQTSNFRVQPTESIVRFPNITNLCPFGEVFNATRFASVYAWNRKRISNCVADYSVLYNSASFSTFKCYGVSPTKLNDLCFTNVYADSFVIRGDEVIQIAPGQTGKIADYNYKLPDDFTGCVIAWNSNNLDSKVGGNYNYLYRLFRKSNLKPFERDISTEIYQAGSTPCNGVEGFNCYFPLQSYGFQPTNGVGYQPYRVVVLSFELLHAPATVCGPKKSTNLVKNKCVNFNFNGLTGTGVLTESNKKFLPFQQFGRDIADTTDAVRDPQTLEILDITPCSFGGVSVITPGTNTSNQVAVLYQDVNCTEVPVAIHADQLTPTWRVYSTGSNVFQTRAGCLIGAEHVNNSYECDIPIGAGICASYQTQTNSPRRARSVASQSIIAYTMSLGAENSVAYSNNSIAIPTNFTISVTTEILPVSMTKTSVDCTMYICGDSTECSNLLLQYGSFCTQLNRALTGIAVEQDKNTQEVFAQVKQIYKTPPIKDFGGFNFSQILPDPSKPSKRSFIEDLLFNKVTLADAGFIKQYGDCLGDIAARDLICAQKFNGLTVLPPLLTDEMIAQYTSALLAGTITSGWTFGAGAALQIPFAMQMAYRFNGCGVTQNVLYENQKLIANQFNSAIGKIQDSLSSTASALGKLQDVVNQNAQALNTLVKQLSSNFGAISSVLNDILSRLDKVEAEVQIDRLITGRLQSLQTYVTQQLIRAAEIRASANLAATKMSECVLGQSKRVDFCGKGCHLMSFPQSAPHGVVFLHVTYVPAQEKNFTTAPAICHDGKAHFPREGVFVSNGTHWFVTQRNFYEPQIITTDNTFVSGNCDVVIGIVNNTVYDPLQPELDSGGSGYIPEAPRDGQAYVRKDGEWVLLSTFL

SEQ ID NO: 10320 - protein, 1171 aa, Artificial Sequence
  SARS-CoV-2/pangolin/Guangxi/P4L/2017__EPI_ISL_410538 spike protein (1-1141)(I903C_Y1041C) Foldon construct
MFVFLFVLPLVSSQCVNLTTRTGIPPGYTNSSTRGVYYPDKVFRSSILHLTQDLFLPFFSNVTWFNTINYQGGFKKFDNPVLPFNDGVYFASTEKSNIIRGWIFGTTLDARTQSLLIVNNATNVVIKVCEFQFCTDPFLGVYYHNNNKTWVENEFRVYSSANNCTFEYISQPFLMDLEGKQGNFKNLREFVFKNVDGYFKIYSKHTPIDLVRDLPRGFAALEPLVDLPIGINITRFQTLLALHRSYLTPGNLESGWTTGAAAYYVGYLQQRTFLLSYNQNGTITDAVDCSLDPLSETKCTLKSLTVEKGIYQTSNFRVQPTISIVRFPNITNLCPFGEVFNASKFASVYAWNRKRISNCVADYSVLYNSTSFSTFKCYGVSPTKLNDLCFTNVYADSFVVKGDEVRQIAPGQTGVIADYNYKLPDDFTGCVIAWNSVKQDALTGGNYGYLYRLFRKSKLKPFERDISTEIYQAGSTPCNGQVGLNCYYPLERYGFHPTTGVNYQPFRVVVLSFELLNGPATVCGPKLSTTLVKDKCVNFNFNGLTGTGVLTTSKKQFLPFQQFGRDISDTTDAVRDPQTLEILDITPCSFGGVSVITPGTNTSNQVAVLYQDVNCTEVPMAIHAEQLTPAWRVYSAGANVFQTRAGCLVGAEHVNNSYECDIPVGAGICASYHSMSSLRSVNQRSIIAYTMSLGAENSVAYSNNSIAIPTNFTISVTTEILPVSMTKTSVDCTMYICGDSIECSNLLLQYGSFCTQLNRALTGIAVEQDKNTQEVFAQVKQIYKTPPIKDFGGFNFSQILPDPSKPSKRSFIEDLLFNKVTLADAGFIKQYGDCLGDIAARDLICAQKFNGLTVLPPLLTDEMIAQYTSALLAGTITSGWTFGAGAALQIPFAMQMAYRFNGCGVTQNVLYENQKLIANQFNSAIGKIQDSLSSTASALGKLQDVVNQNAQALNTLVKQLSSNFGAISSVLNDILSRLDKVEAEVQIDRLITGRLQSLQTYVTQQLIRAAEIRASANLAATKMSECVLGQSKRVDFCGKGCHLMSFPQSAPHGVVFLHVTYVPAQEKNFTTAPAICHEGKAHFPREGVFVSNGTHWFITQRNFYEPQIITTDNTFVSGSCDVVIGIVNNTVYDPLQPELDSGGSGYIPEAPRDGQAYVRKDGEWVLLSTFL

SEQ ID NO: 10321 - protein, 1171 aa, Artificial Sequence
  SARS-CoV-2/pangolin/Guangxi/P5L/2017__EPI_ISL_410540 spike protein (1-1141)(I903C_Y1041C) Foldon construct
MFVFLFVLPLVSSQCVNLTTRTGIPPGYTNSSTRGVYYPDKVFRSSILHLTQDLFLPFFSNVTWFNTINYQGGFKKFDNPVLPFNDGVYFASTEKSNIIRGWIFGTTLDARTQSLLIVNNATNVVIKVCEFQFCTDPFLGVYYHNNNKTWVENEFRVYSSANNCTFEYISQPFLMDLEGKQGNFKNLREFVFKNVDGYFKIYSKHTPIDLVRDLPRGFAALEPLVDLPIGINITRFQTLLALHRSYLTPGKLESGWTTGAAAYYVGYLQQRTFLLSYNQNGTITDAVDCSLDPLSETKCTLKSLTVEKGIYQTSNFRVQPTISIVRFPNITNLCPFGEVFNASKFASVYAWNRKRISNCVADYSVLYNSTSFSTFKCYGVSPTKLNDLCFTNVYADSFVVKGDEVRQIAPGQTGVIADYNYKLPDDFTGCVIAWNSVKQDALTGGNYGYLYRLFRKSKLKPFERDISTEIYQAGSTPCNGQVGLNCYYPLERYGFHPTTGVNYQPFRVVVLSFELLNGPATVCGPKLSTTLVKDKCVNFNFNGLTGTGVLTTSKKQFLPFQQFGRDISDTTDAVRDPQTLEILDITPCSFGGVSVITPGTNTSNQVAVLYQDVNCTEVPMAIHAEQLTPAWRVYSAGANVFQTRAGCLVGAEHVNNSYECDIPVGAGICASYHSMSSFRSVNQRSIIAYTMSLGAENSVAYSNNSIAIPTNFTISVTTEILPVSMTKTSVDCTMYICGDSIECSNLLLQYGSFCTQLNRALTGIAVEQDKNTQEVFAQVKQIYKTPPIKDFGGFNFSQILPDPSKPSKRSFIEDLLFNKVTLADAGFIKQYGDCLGDIAARDLICAQKFNGLTVLPPLLTDEMIAQYTSALLAGTITSGWTFGAGAALQIPFAMQMAYRFNGCGVTQNVLYENQKLIANQFNSAIGKIQDSLSSTASALGKLQDVVNQNAQALNTLVKQLSSNFGAISSVLNDILSRLDKVEAEVQIDRLITGRLQSLQTYVTQQLIRAAEIRASANLAATKMSECVLGQSKRVDFCGKGCHLMSFPQSAPHGVVFLHVTYVPAQEKNFTTAPAICHEGKAHFPREGVFVSNGTHWFITQRNFYEPQIITTDNTFVSGSCDVVIGIVNNTVYDPLQPELDSGGSGYIPEAPRDGQAYVRKDGEWVLLSTFL

SEQ ID NO: 10322 - protein, 1171 aa, Artificial Sequence
  SARS-CoV-2/pangolin/Guangxi/P5E/2017__EPI_ISL_410541 spike protein (1-1141)(I903C_Y1041C) Foldon construct
MFVFLFVLPLVSSQCVNLTTRTGIPPGYTNSSTRGVYYPDKVFRSSILHLTQDLFLPFFSNVTWFNTITYQGGSKKFDNPVLPFNDGVYFASTEKSNIIRGWIFGTTLDARTQSLLIVNNATNVVIKVCEFQFCTDPFLGVYYHNNNKTWVENEFRVYSSANNCTFEYISQPFLMDLEGKQGNFKNLREFVFKNVDGYFKIYSKHTPIDLVRDLPRGFAALEPLVDLPIGINITRFQTLLALHRSYLTPGKLESGWTTGAAAYYVGYLQQRTFLLSYNQNGTITDAVDCSLDPLSETKCTLKSLTVEKGIYQTSNFRVQPTISIVRFPNITNLCPFGEVFNASKFASVYAWNRKRISNCVADYSVLYNSTSFSTFKCYGVSPTKLNDLCFTNVYADSFVVKGDEVRQIAPGQTGVIADYNYKLPDDFTGCVIAWNSVKQDALTGDNYGYLYRLFRKSKLKPFERDISTEIYQAGSTPCNGQVGLNCYYPLERYGFHPTTGVNYQPFRVVVLSFELLNGPATVCGPKLSTTLVKDKCVNFNFNGLTGTGVLTTSKKQFLPFQQFGRDISDTTDAVRDPQTLEILDITPCSFGGVSVITPGTNTSNQVAVLYQDVNCTEVPMAIHAEQLTPAWRVYSAGANVFQTRAGCLVGAEHVNNSYECDIPVGAGICASYHSMSSFRSVNQRSIIAYTMSLGAENSVAYSNNSIAIPTNFTISVTTEILPVSMTKTSVDCTMYICGDSIECSNLLLQYGSFCTQLNRALTGIAVEQDKNTQEVFAQVKQIYKTPPIKDFGGFNFSQILPDPSKPSKRSFIEDLLFNKVTLADAGFIKQYGDCLGDIAARDLICAQKFNGLTVLPPLLTDEMIAQYTSALLAGTITSGWTFGAGAALQIPFAMQMAYRFNGCGVTQNVLYENQKLIANQFNSAIGKIQDSLSSTASALGKLQDVVNQNAQALNTLVKQLSSNFGAISSVLNDILSRLDKVEAEVQIDRLITGRLQSLQTYVTQQLIRAAEIRASANLAATKMSECVLGQSKRVDFCGKGCHLMSFPQSAPHGVVFLHVTYVPAQEKNFTTAPAICHEGKAHFPREGVFVSNGTHWFITQRNFYEPQIITTDNTFVSGSCDVVIGIVNNTVYDPLQPELDSGGSGYIPEAPRDGQAYVRKDGEWVLLSTFL

SEQ ID NO: 10323 - protein, 1169 aa, Artificial Sequence
  SARS-CoV-2/pangolin/Guangxi/P1E/2017__EPI_ISL_410539 spike protein (1-1139)(I901C_Y1039C) Foldon construct
MFVFLFVLPLVSSQCVNLTTRTGIQPGYTNSSTRGVYYPDKVFRSSILHLTQDLFLPFFSNVTWFNTINYQGGFKKFDNPVLPFNDGVYFASTEKSNIIRGWIFGTTLDARTQSLLIVNNATNVVIKVCEFQFCTDPFLGVYYHNNNKTWVENEFRVYSSANNCTFEYISQPFLMDLEGKQGNFKNLREFVFKNVDGYFKIYSKHTPIDLVRDLPRGFAALEPLVDLPIGINITRFQTLLALHRSYLTPGKLESGWTTGAAAYYVGYLQQRTFLLSYNQNGTITDAVDCSLDPLSETKCTLKSLTVEKGIYQTSNFRVQPTISIVRFPNITNLCPFGEVFNASKFASVYAWNRKRISNCVADYSVLYNSTSFSTFKCYGVSPTKLNDLCFTNVYADSFVVKGDEVRQIAPGQTGVIADYNYKLPDDFTGCVIAWNSVKQDALTGGNYLYRLFRKSKLKPFERDISTEIYQAGSTPCNGQVGLNCYYPLERYGFHPTTGVNYQPFRVVVLSFELLNGPATVCGPKLSTTLVKDKCVNFNFNGLTGTGVLTTSKKQFLPFQQFGRDISDTTDAVRDPQTLEILDITPCSFGGVSVITPGTNTSNQVAVLYQDVNCTEVPMAIHAEQLTPAWRVYSAGANVFQTRAGCLVGAEHVNNSYECDIPVGAGICASYHSMSSLRSVNQRSIIAYTMSLGAENSVAYSNNSIAIPTNFTISVTTEILPVSMTKTSVDCTMYICGDSIECSNLLLQYGSFCTQLNRALTGIAVEQDKNTQEVFAQVKQIYKTPPIKDFGGFNFSQILPDPSKPSKRSFIEDLLFNKVTLADAGFIKQYGDCLGDIAARDLICAQKFNGLTVLPPLLTDEMIAQYTSALLAGTITSGWTFGAGAALQIPFAMQMAYRFNGCGVTQNVLYENQKLIANQFNSAIGKIQDSLSSTASALGKLQDVVNQNAQALNTLVKQLSSNFGAISSVLNDILSRLDKVEAEVQIDRLITGRLQSLQTYVTQQLIRAAEIRASANLAATKMSECVLGQSKRVDFCGKGCHLMSFPQSAPHGVVFLHVTYVPAQEKNFTTAPAICHEGKAHFPREGVFVSNGTHWFITQRNFYEPQIITTDNTFVSGSCDVVIGIVNNTVYDPLQPELDSGGSGYIPEAPRDGQAYVRKDGEWVLLSTFL

SEQ ID NO: 10324 - protein, 1177 aa, Artificial Sequence
  SARS-CoV-2/Wuhan/WIV05/2019__EPI_ISL_402128 spike protein (1-1147)(Q965C_S1003C) Foldon construct
MFVFLVLLPLVSSQCVNLTTRTQLPPAYTNSFTRGVYYPDKVFRSSVLHSTQDLFLPFFSNVTWFHAIHVSGTNGTKRFDNPVLPFNDGVYFASTEKSNIIRGWIFGTTLDSKTQSLLIVNNATNVVIKVCEFQFCNDPFLGVYYHKNNKSWMESEFRVYSSANNCTFEYVSQPFLMDLEGKQGNFKNLREFVFKNIDGYFKIYSKHTPINLVRDLPQGFSALEPLVDLPIGINITRFQTLLALHRSYLTPGDSSSGWTAGAAAYYVGYLQPRTFLLKYNENGTITDAVDCALDPLSETKCTLKSFTVEKGIYQTSNFRVQPTESIVRFPNITNLCPFGEVFNATRFASVYAWNRKRISNCVADYSVLYNSASFSTFKCYGVSPTKLNDLCFTNVYADSFVIRGDEVRQIAPGQTGKIADYNYKLPDDFTGCVIAWNSNNLDSKVGGNYNYLYRLFRKSNLKPFERDISTEIYQAGSTPCNGVEGFNCYFPLQSYGFQPTNGVGYQPYRVVVLSFELLHAPATVCGPKKSTNLVKNKCVNFNFNGLTGTGVLTESNKKFLPFQQFGRDIADTTDAVRDPQTLEILDITPCSFGGVSVITPGTNTSNQVAVLYQDVNCTEVPVAIHADQLTPTWRVYSTGSNVFQTRAGCLIGAEHVNNSYECDIPIGAGICASYQTQTNSPRRARSVASQSIIAYTMSLGAENSVAYSNNSIAIPTNFTISVTTEILPVSMTKTSVDCTMYICGDSTECSNLLLQYGSFCTQLNRALTGIAVEQDKNTQEVFAQVKQIYKTPPIKDFGGFNFSQILPDPSKPSKRSFIEDLLFNKVTLADAGFIKQYGDCLGDIAARDLICAQKFNGLTVLPPLLTDEMIAQYTSALLAGTITSGWTFGAGAALQIPFAMQMAYRFNGIGVTQNVLYENQKLIANQFNSAIGKIQDSLSSTASALGKLQDVVNQNAQALNTLVKCLSSNFGAISSVLNDILSRLDKVEAEVQIDRLITGRLQCLQTYVTQQLIRAAEIRASANLAATKMSECVLGQSKRVDFCGKGYHLMSFPQSAPHGVVFLHVTYVPAQEKNFTTAPAICHDGKAHFPREGVFVSNGTHWFVTQRNFYEPQIITTDNTFVSGNCDVVIGIVNNTVYDPLQPELDSGGSGYIPEAPRDGQAYVRKDGEWVLLSTFL

SEQ ID NO: 10325 - protein, 1173 aa, Artificial Sequence
  SARS-CoV-2/bat/Yunnan/RaTG13/2013__EPI_ISL_402131 spike protein (1-1143)(Q961C_S999C) Foldon construct
MFVFLVLLPLVSSQCVNLTTRTQLPPAYTNSSTRGVYYPDKVFRSSVLHLTQDLFLPFFSNVTWFHAIHVSGTNGIKRFDNPVLPFNDGVYFASTEKSNIIRGWIFGTTLDSKTQSLLIVNNATNVVIKVCEFQFCNDPFLGVYYHKNNKSWMESEFRVYSSANNCTFEYVSQPFLMDLEGKQGNFKNLREFVFKNIDGYFKIYSKHTPINLVRDLPPGFSALEPLVDLPIGINITRFQTLLALHRSYLTPGDSSSGWTAGAAAYYVGYLQPRTFLLKYNENGTITDAVDCALDPLSETKCTLKSFTVEKGIYQTSNFRVQPTDSIVRFPNITNLCPFGEVFNATTFASVYAWNRKRISNCVADYSVLYNSTSFSTFKCYGVSPTKLNDLCFTNVYADSFVITGDEVRQIAPGQTGKIADYNYKLPDDFTGCVIAWNSKHIDAKEGGNFNYLYRLFRKANLKPFERDISTEIYQAGSKPCNGQTGLNCYYPLYRYGFYPTDGVGHQPYRVVVLSFELLNAPATVCGPKKSTNLVKNKCVNFNFNGLTGTGVLTESNKKFLPFQQFGRDIADTTDAVRDPQTLEILDITPCSFGGVSVITPGTNASNQVAVLYQDVNCTEVPVAIHADQLTPTWRVYSTGSNVFQTRAGCLIGAEHVNNSYECDIPIGAGICASYQTQTNSRSVASQSIIAYTMSLGAENSVAYSNNSIAIPTNFTISVTTEILPVSMTKTSVDCTMYICGDSTECSNLLLQYGSFCTQLNRALTGIAVEQDKNTQEVFAQVKQIYKTPPIKDFGGFNFSQILPDPSKPSKRSFIEDLLFNKVTLADAGFIKQYGDCLGDIAARDLICAQKFNGLTVLPPLLTDEMIAQYTSALLAGTITSGWTFGAGAALQIPFAMQMAYRFNGIGVTQNVLYENQKLIANQFNSAIGKIQDSLSSTASALGKLQDVVNQNAQALNTLVKCLSSNFGAISSVLNDILSRLDKVEAEVQIDRLITGRLQCLQTYVTQQLIRAAEIRASANLAATKMSECVLGQSKRVDFCGKGYHLMSFPQSAPHGVVFLHVTYVPAQEKNFTTAPAICHDGKAHFPREGVFVSNGTHWFVTQRNFYEPQIITTDNTFVSGSCDVVIGIVNNTVYDPLQPELDSGGSGYIPEAPRDGQAYVRKDGEWVLLSTFL

SEQ ID NO: 10326 - protein, 1177 aa, Artificial Sequence
  SARS-CoV-2/Wuhan/HBCDC-HB-01/2019__EPI_ISL_402132 spike protein (1-1147)(Q965C_S1003C) Foldon construct
MFVFLVLLPLVSSQCVNLTTRTQLPPAYTNSITRGVYYPDKVFRSSVLHSTQDLFLPFFSNVTWFHAIHVSGTNGTKRFDNPVLPFNDGVYFASTEKSNIIRGWIFGTTLDSKTQSLLIVNNATNVVIKVCEFQFCNDPFLGVYYHKNNKSWMESEFRVYSSANNCTFEYVSQPFLMDLEGKQGNFKNLREFVFKNIDGYFKIYSKHTPINLVRDLPQGFSALEPLVDLPIGINITRFQTLLALHRSYLTPGDSSSGWTAGAAAYYVGYLQPRTFLLKYNENGTITDAVDCALDPLSETKCTLKSFTVEKGIYQTSNFRVQPTESIVRFPNITNLCPFGEVFNATRFASVYAWNRKRISNCVADYSVLYNSASFSTFKCYGVSPTKLNDLCFTNVYADSFVIRGDEVRQIAPGQTGKIADYNYKLPDDFTGCVIAWNSNNLDSKVGGNYNYLYRLFRKSNLKPFERDISTEIYQAGSTPCNGVEGFNCYFPLQSYGFQPTNGVGYQPYRVVVLSFELLHAPATVCGPKKSTNLVKNKCVNFNFNGLTGTGVLTESNKKFLPFQQFGRDIADTTDAVRDPQTLEILDITPCSFGGVSVITPGTNTSNQVAVLYQDVNCTEVPVAIHADQLTPTWRVYSTGSNVFQTRAGCLIGAEHVNNSYECDIPIGAGICASYQTQTNSPRRARSVASQSIIAYTMSLGAENSVAYSNNSIAIPTNFTISVTTEILPVSMTKTSVDCTMYICGDSTECSNLLLQYGSFCTQLNRALTGIAVEQDKNTQEVFAQVKQIYKTPPIKDFGGFNFSQILPDPSKPSKRSFIEDLLFNKVTLADAGFIKQYGDCLGDIAARDLICAQKFNGLTVLPPLLTDEMIAQYTSALLAGTITSGWTFGAGAALQIPFAMQMAYRFNGIGVTQNVLYENQKLIANQFNSAIGKIQDSLSSTASALGKLQDVVNQNAQALNTLVKCLSSNFGAISSVLNDILSRLDKVEAEVQIDRLITGRLQCLQTYVTQQLIRAAEIRASANLAATKMSECVLGQSKRVDFCGKGYHLMSFPQSAPHGVVFLHVTYVPAQEKNFTTAPAICHDGKAHFPREGVFVSNGTHWFVTQRNFYEPQIITTDNTFVSGNCDVVIGIVNNTVYDPLQPELDSGGSGYIPEAPRDGQAYVRKDGEWVLLSTFL

SEQ ID NO: 10327 - protein, 1177 aa, Artificial Sequence
  SARS-CoV-2/Guangdong/20SF028/2020__EPI_ISL_403936 spike protein (1-1147)(Q965C_S1003C) Foldon construct
MFVFLVLLPLVSSQCVNLTTRTQLPPAYTNSFTRGVYYPDKVFRSSVLYSTQDLFLPFFSNVTWFHAIHVSGTNGTKRFDNPVLPFNDGVYFASTEKSNIIRGWIFGTTLDSKTQSLLIVNNATNVVIKVCEFQFCNDPFLGVYYHKNNKSWMESEFRVYSSANNCTFEYVSQPFLMDLEGKQGNFKNLREFVFKNIDGYFKIYSKHTPINLVRDLPQGFSALEPLVDLPIGINITRFQTLLALHRSYLTPGDSSSGWTAGAAAYYVGYLQPRTFLLKYNENGTITDAVDCALDPLSETKCTLKSFTVEKGIYQTSNFRVQPTESIVRFPNITNLCPFGEVFNATRFASVYAWNRKRISNCVADYSVLYNSASFSTFKCYGVSPTKLNDLCFTNVYADSFVIRGDEVRQIAPGQTGKIADYNYKLPDDFTGCVIAWNSNNLDSKVGGNYNYLYRLFRKSNLKPFERDISTEIYQAGSTPCNGVEGFNCYFPLQSYGFQPTNGVGYQPYRVVVLSFELLHAPATVCGPKKSTNLVKNKCVNFNFNGLTGTGVLTESNKKFLPFQQFGRDIADTTDAVRDPQTLEILDITPCSFGGVSVITPGTNTSNQVAVLYQDVNCTEVPVAIHADQLTPTWRVYSTGSNVFQTRAGCLIGAEHVNNSYECDIPIGAGICASYQTQTNSPRRARSVASQSIIAYTMSLGAENSVAYSNNSIAIPTNFTISVTTEILPVSMTKTSVDCTMYICGDSTECSNLLLQYGSFCTQLNRALTGIAVEQDKNTQEVFAQVKQIYKTPPIKDFGGFNFSQILPDPSKPSKRSFIEDLLFNKVTLADAGFIKQYGDCLGDIAARDLICAQKFNGLTVLPPLLTDEMIAQYTSALLAGTITSGWTFGAGAALQIPFAMQMAYRFNGIGVTQNVLYENQKLIANQFNSAIGKIQDSLSSTASALGKLQDVVNQNAQALNTLVKCLSSNFGAISSVLNDILSRLDKVEAEVQIDRLITGRLQCLQTYVTQQLIRAAEIRASANLAATKMSECVLGQSKRVDFCGKGYHLMSFPQSAPHGVVFLHVTYVPAQEKNFTTAPAICHDGKAHFPREGVFVSNGTHWFVTQRNFYEPQIITTDNTFVSGNCDVVIGIVNNTVYDPLQPELDSGGSGYIPEAPRDGQAYVRKDGEWVLLSTFL

SEQ ID NO: 10328 - protein, 1177 aa, Artificial Sequence
  SARS-CoV-2/Shenzhen/SZTH-001/2020__EPI_ISL_406592 spike protein (1-1147)(Q965C_S1003C) Foldon construct
MFVFLVLLPLVSSQCVNLTTRTQLPPAYTNSFTRGVYYPDKVFRSSVLHSTQDLFLPFFSNVTWFHAIHVSGTNGTKRFDNPVLPFNDGVYFASTEKSNIIRGWIFGTTLDSKTQSLLIVNNATNVVIKVCEFQFCNDPFLGVYYHKNNKSWMESEFRVYSSANNCTFEYVSQPFLMDLEGKQGNFKNLREFVFKNIDGYFKIYSKHTPINLVRDLPQGFSALEPLVDLPIGINITRFQTLLALHRSYLTPGDSSSGWTAGAAAYYVGYLQPRTFLLKYNENGTITDAVDCALDPLSETKCTLKSFTVEKGIYQTSNFRVQPTESIVRFPNITNLCPFGEVFNATRFASVYAWNRKRISNCVADYSVLYNSASFSTFKCYGVSPTKLNDLCFTNVYADSFVIRGDEVRQIAPGQTGKIADYNYKLPDDFTGCVIAWNSNNLDSKVGGNYNYLYRLFRKSNLKPFERDISTEIYQAGSTPCNGVEGFNCYFPLQSYGFQPTNGVGYQPYRVVVLSFELLHAPATVCGPKKSTNLVKNKCVNFNFNGLTGTGVLTESNKKFLPFQQFGRDIADTTDAVRDPQTLEILDITPCSFGGVSVITPGTNTSNQVAVLYQDVNCTEVPVAIHADQLTPTWRVYSTGSNVFQTRAGCLIGAEHVNNSYECDIPIGAGICASYQTQTNSPRRARSVASQSIIAYTMSLGAENSVAYSNNSIAIPTNFTISVTTEILPVSMTKTSVDCTMYICGDSTECSNLLLQYGSFCTQLNRALTGIAVEQDKNTQEVFAQVKQIYKTPPIKDFGGFNFSQILPDPSKPSKRSFIEDLLFNKVTLADAGFIKQYGDCLGDIAARDLICAQKFNGLTVLPPLLTDEMIAQYTSALLAGTITSGWTFGAGAALQIPFAMQMAYRFNGIGVTQNVLYENQKLIANQFNSAIGKIQDSLSSTASALGKLQDVVNQNAQALNTLVKCLSSNFGAISSVLNDILSRLDKVEAEVQIDRLITGRLQCLQTYVTQQLIRAAEIRASANLAATKMSECVLGQSKRVDFCGKGYHLMSFPQSAPHGVVFLHVTYVPAQEKNFTTAPAICHDGKAHFPREGVFVSNGTHWFVTQRNFYEPQIITTDNTFVSGNCDVLIGIVNNTVYDPLQPELDSGGSGYIPEAPRDGQAYVRKDGEWVLLSTFL

SEQ ID NO: 10329 - protein, 1177 aa, Artificial Sequence
  SARS-CoV-2/Shenzhen/SZTH-004/2020__EPI_ISL_406595 spike protein (1-1147)(Q965C_S1003C) Foldon construct
MFVFLVLLPLVSSQCVNLTTRTQLPPAYTNSFTRGVYYPDKVFRSSVLHSTQDLFLPFFSNVTWFHAIHVSGTNGTKRFDNPVLPFNDGVYFASTEKSNIIRGWIFGTTLDSKTQSLLIVNNATNVVIKVCEFQFCNDPFLGVYYHKNNKSWMESEFRVYSSANNCTFEYVSQPFLMDLEGKQGNFKNLREFVFKNIDGYFKIYSKHTPINLVRDLPQGFSALEPLVDLPIGINITRFQTLLALHRSYLTPGDSSSGWTAGAAAYYVGYLQPRTFLLKYNENGTITDAVDCALDPLSETKCTLKSFTVEKGIYQTSNFRVQPTESIVRFPNITNLCPFGEVFNATRFASVYAWDRKRISNCVAYYSVLYNSASFSTFKCYGVSPTKLNDLCFTNVYADSFVIRGDEVRQIAPGQTGKIADYNYKLPDDFTGCVIAWNSNNLDSKVGGNYNYLYRLFRKSNLKPFERDISTEIYQAGSTPCNGVEGFNCYFPLQSYGFQPTNGVGYQPYRVVVLSFELLHAPATVCGPKKSTNLVKNKCVNFNFNGLTGTGVLTESNKKFLPFQQFGRDIADTTDAVRDPQTLEILDITPCSFGGVSVITPGTNTSNQVAVLYQDVNCTEVPVAIHADQLTPTWRVYSTGSNVFQTRAGCLIGAEHVNNSYECDIPIGAGICASYQTQTNSPRRARSVASQSIIAYTMSLGAENSVAYSNNSIAIPTNFTISVTTEILPVSMTKTSVDCTMYICGDSTECSNLLLQYGSFCTQLNRALTGIAVEQDKNTQEVFAQVKQIYKTPPIKDFGGFNFSQILPDPSKPSKRSFIEDLLFNKVTLADAGFIKQYGDCLGDIAARDLICAQKFNGLTVLPPLLTDEMIAQYTSALLAGTITSGWTFGAGAALQIPFAMQMAYRFNGIGVTQNVLYENQKLIANQFNSAIGKIQDSLSSTASALGKLQDVVNQNAQALNTLVKCLSSNFGAISSVLNDILSRLDKVEAEVQIDRLITGRLQCLQTYVTQQLIRAAEIRASANLAATKMSECVLGQSKRVDFCGKGYHLMSFPQSAPHGVVFLHVTYVPAQEKNFTTAPAICHDGKAHFPREGVFVSNGTHWFVTQRNFYEPQIITTDNTFVSGNCDVVIGIVNNTVYDPLQPELDSGGSGYIPEAPRDGQAYVRKDGEWVLLSTFL

SEQ ID NO: 10330 - protein, 1177 aa, Artificial Sequence
  SARS-CoV-2/France/IDF0372/2020__EPI_ISL_406596 spike protein (1-1147)(Q965C_S1003C) Foldon construct
MFVFLVLLPLVSSQCVNLTTRTQLPPAYTNSFTRGVYYPDKVFRSSVLHSTQDLFLPFFSNVTWFHAIHVSGTNGTKRFDNPVLPFNDGVYFASTEKSNIIRGWIFGTTLDSKTQSLLIVNNATNVVIKVCEFQFCNDPFLGVYYHKNNKSWMESEFRVYSSANNCTFEYVSQPFLMDLEGKQGNFKNLREFVFKNIDGYFKIYSKHTPINLVRDLPQGFSALEPLVDLPIGINITRFQTLLALHRSYLTPGDSSSGWTAGAAAYYVGYLQPRTFLLKYNENGTITDAVDCALDPLSETKCTLKSFTVEKGIYQTSNFRVQPTESIVRFPNITNLCPFGEVFNATRFASVYAWNRKRISNCVADYSFLYNSASFSTFKCYGVSPTKLNDLCFTNVYADSFVIRGDEVRQIAPGQTGKIADYNYKLPDDFTGCVIAWNSNNLDSKVGGNYNYLYRLFRKSNLKPFERDISTEIYQAGSTPCNGVEGFNCYFPLQSYGFQPTNGVGYQPYRVVVLSFELLHAPATVCGPKKSTNLVKNKCVNFNFNGLTGTGVLTESNKKFLPFQQFGRDIADTTDAVRDPQTLEILDITPCSFGGVSVITPGTNTSNQVAVLYQDVNCTEVPVAIHADQLTPTWRVYSTGSNVFQTRAGCLIGAEHVNNSYECDIPIGAGICASYQTQTNSPRRARSVASQSIIAYTMSLGAENSVAYSNNSIAIPTNFTISVTTEILPVSMTKTSVDCTMYICGDSTECSNLLLQYGSFCTQLNRALTGIAVEQDKNTQEVFAQVKQIYKTPPIKDFGGFNFSQILPDPSKPSKRSFIEDLLFNKVTLADAGFIKQYGDCLGDIAARDLICAQKFNGLTVLPPLLTDEMIAQYTSALLAGTITSGWTFGAGAALQIPFAMQMAYRFNGIGVTQNVLYENQKLIANQFNSAIGKIQDSLSSTASALGKLQDVVNQNAQALNTLVKCLSSNFGAISSVLNDILSRLDKVEAEVQIDRLITGRLQCLQTYVTQQLIRAAEIRASANLAATKMSECVLGQSKRVDFCGKGYHLMSFPQSAPHGVVFLHVTYVPAQEKNFTTAPAICHDGKAHFPREGVFVSNGTHWFVTQRNFYEPQIITTDNTFVSGNCDVVIGIVNNTVYDPLQPELDSGGSGYIPEAPRDGQAYVRKDGEWVLLSTFL

SEQ ID NO: 10331 - protein, 1177 aa, Artificial Sequence
  SARS-CoV-2/Australia/VIC01/2020__EPI_ISL_406844 spike protein (1-1147)(Q965C_S1003C) Foldon construct
MFVFLVLLPLVSSQCVNLTTRTQLPPAYTNSFTRGVYYPDKVFRSSVLHSTQDLFLPFFSNVTWFHAIHVSGTNGTKRFDNPVLPFNDGVYFASTEKSNIIRGWIFGTTLDSKTQSLLIVNNATNVVIKVCEFQFCNDPFLGVYYHKNNKSWMESEFRVYSSANNCTFEYVSQPFLMDLEGKQGNFKNLREFVFKNIDGYFKIYSKHTPINLVRDLPQGFSALEPLVDLPIGINITRFQTLLALHRRYLTPGDSSSGWTAGAAAYYVGYLQPRTFLLKYNENGTITDAVDCALDPLSETKCTLKSFTVEKGIYQTSNFRVQPTESIVRFPNITNLCPFGEVFNATRFASVYAWNRKRISNCVADYSVLYNSASFSTFKCYGVSPTKLNDLCFTNVYADSFVIRGDEVRQIAPGQTGKIADYNYKLPDDFTGCVIAWNSNNLDSKVGGNYNYLYRLFRKSNLKPFERDISTEIYQAGSTPCNGVEGFNCYFPLQSYGFQPTNGVGYQPYRVVVLSFELLHAPATVCGPKKSTNLVKNKCVNFNFNGLTGTGVLTESNKKFLPFQQFGRDIADTTDAVRDPQTLEILDITPCSFGGVSVITPGTNTSNQVAVLYQDVNCTEVPVAIHADQLTPTWRVYSTGSNVFQTRAGCLIGAEHVNNSYECDIPIGAGICASYQTQTNSPRRARSVASQSIIAYTMSLGAENSVAYSNNSIAIPTNFTISVTTEILPVSMTKTSVDCTMYICGDSTECSNLLLQYGSFCTQLNRALTGIAVEQDKNTQEVFAQVKQIYKTPPIKDFGGFNFSQILPDPSKPSKRSFIEDLLFNKVTLADAGFIKQYGDCLGDIAARDLICAQKFNGLTVLPPLLTDEMIAQYTSALLAGTITSGWTFGAGAALQIPFAMQMAYRFNGIGVTQNVLYENQKLIANQFNSAIGKIQDSLSSTASALGKLQDVVNQNAQALNTLVKCLSSNFGAISSVLNDILSRLDKVEAEVQIDRLITGRLQCLQTYVTQQLIRAAEIRASANLAATKMSECVLGQSKRVDFCGKGYHLMSFPQSAPHGVVFLHVTYVPAQEKNFTTAPAICHDGKAHFPREGVFVSNGTHWFVTQRNFYEPQIITTDNTFVSGNCDVVIGIVNNTVYDPLQPELDSGGSGYIPEAPRDGQAYVRKDGEWVLLSTFL

SEQ ID NO: 10332 - protein, 1177 aa, Artificial Sequence
  SARS-CoV-2/Germany/BavPat1/2020__EPI_ISL_406862 spike protein (1-1147)(Q965C_S1003C) Foldon construct
MFVFLVLLPLVSSQCVNLTTRTQLPPAYTNSFTRGVYYPDKVFRSSVLHSTQDLFLPFFSNVTWFHAIHVSGTNGTKRFDNPVLPFNDGVYFASTEKSNIIRGWIFGTTLDSKTQSLLIVNNATNVVIKVCEFQFCNDPFLGVYYHKNNKSWMESEFRVYSSANNCTFEYVSQPFLMDLEGKQGNFKNLREFVFKNIDGYFKIYSKHTPINLVRDLPQGFSALEPLVDLPIGINITRFQTLLALHRSYLTPGDSSSGWTAGAAAYYVGYLQPRTFLLKYNENGTITDAVDCALDPLSETKCTLKSFTVEKGIYQTSNFRVQPTESIVRFPNITNLCPFGEVFNATRFASVYAWNRKRISNCVADYSVLYNSASFSTFKCYGVSPTKLNDLCFTNVYADSFVIRGDEVRQIAPGQTGKIADYNYKLPDDFTGCVIAWNSNNLDSKVGGNYNYLYRLFRKSNLKPFERDISTEIYQAGSTPCNGVEGFNCYFPLQSYGFQPTNGVGYQPYRVVVLSFELLHAPATVCGPKKSTNLVKNKCVNFNFNGLTGTGVLTESNKKFLPFQQFGRDIADTTDAVRDPQTLEILDITPCSFGGVSVITPGTNTSNQVAVLYQGVNCTEVPVAIHADQLTPTWRVYSTGSNVFQTRAGCLIGAEHVNNSYECDIPIGAGICASYQTQTNSPRRARSVASQSIIAYTMSLGAENSVAYSNNSIAIPTNFTISVTTEILPVSMTKTSVDCTMYICGDSTECSNLLLQYGSFCTQLNRALTGIAVEQDKNTQEVFAQVKQIYKTPPIKDFGGFNFSQILPDPSKPSKRSFIEDLLFNKVTLADAGFIKQYGDCLGDIAARDLICAQKFNGLTVLPPLLTDEMIAQYTSALLAGTITSGWTFGAGAALQIPFAMQMAYRFNGIGVTQNVLYENQKLIANQFNSAIGKIQDSLSSTASALGKLQDVVNQNAQALNTLVKCLSSNFGAISSVLNDILSRLDKVEAEVQIDRLITGRLQCLQTYVTQQLIRAAEIRASANLAATKMSECVLGQSKRVDFCGKGYHLMSFPQSAPHGVVFLHVTYVPAQEKNFTTAPAICHDGKAHFPREGVFVSNGTHWFVTQRNFYEPQIITTDNTFVSGNCDVVIGIVNNTVYDPLQPELDSGGSGYIPEAPRDGQAYVRKDGEWVLLSTFL

SEQ ID NO: 10333 - protein, 1177 aa, Artificial Sequence
  SARS-CoV-2/Wuhan/HBCDC-HB-02/2020__EPI_ISL_412978 spike protein (1-1147)(Q965C_S1003C) Foldon construct
MFVFLVLLPLVSSQCVNLTTRTQLPPAYTNSFTRGVYYPDKVFRSSVLHSTQDLFLPFFSNVTWFHAIHVSGTNGTKRFDNPVLPFNDGVYFASTEKSNIIRGWIFGTTLDSKTQSLLIVNNATNVVIKVCEFQFCNDPFLGVYYHKNNKSWMESEFRVYSSANNCTFEYVSQPFLMDLEGKQGNFKNLREFVFKNIDGYFKIYSKHTPINLVRDLPQGFSALEPLVDLPIGINITRFQTLLALHRSYLTPGDSSSGWTAGAAAYYVGYLQPRTFLLKYNENGTITDAVDCALDPLSETKCTLKSFTVEKGIYQTSNFRVQPTESIVRFPNITNLCPFGEVFNATRFASVYAWNRKRISNCVADYSVLYNSASFSTFKCYGVSPTKLNDLCFTNVYADSFVIRGDEVRQIAPGQTGKIADYNYKLPDDFTGCVIAWNSNNLDSKVGGNYNYLYRLFRKSNLKPFERDISTEIYQAGSTPCNGVEGFNCYFPLQSYGFQPTNGVGYQPYRVVVLSFELLHAPATVCGPKKSTNLVKNKCVNFNFNGLTGTGVLTESNKKFLPFQQFGRDIADTTDAVRDPQTLEILDITPCSFGGVSVITPGTNTSNQVAVLYQDVNCTEVPVAIHADQLTPTWRVYSTGSNVFQTRAGCLIGAEHVNNSYECDIPIGAGICASYQTQTNSPRRARSVASQSIIAYTMSLGAENSVAYSNNSIAIPTNFTISVTTEILPVSMTKTSVDCTMYICGDSTECSNFLLQYGSFCTQLNRALTGIAVEQDKNTQEVFAQVKQIYKTPPIKDFGGFNFSQILPDPSKPSKRSFIEDLLFNKVTLADAGFIKQYGDCLGDIAARDLICAQKFNGLTVLPPLLTDEMIAQYTSALLAGTITSGWTFGAGAALQIPFAMQMAYRFNGIGVTQNVLYENQKLIANQFNSAIGKIQDSLSSTASALGKLQDVVNQNAQALNTLVKCLSSNFGAISSVLNDILSRLDKVEAEVQIDRLITGRLQCLQTYVTQQLIRAAEIRASANLAATKMSECVLGQSKRVDFCGKGYHLMSFPQSAPHGVVFLHVTYVPAQEKNFTTAPAICHDGKAHFPREGVFVSNGTHWFVTQRNFYEPQIITTDNTFVSGNCDVVIGIVNNTVYDPLQPELDSGGSGYIPEAPRDGQAYVRKDGEWVLLSTFL

SEQ ID NO: 10334 - protein, 1177 aa, Artificial Sequence
  SARS-CoV-2/Australia/QLD02/2020__EPI_ISL_407896 spike protein (1-1147)(Q965C_S1003C) Foldon construct
MFVFLVLLPLVSSQCVNLTTRTQLPPAYTNSFTRGVYYPDKVFRSSVLHSTQDLFLPFFSNVTWFHAIHVSGTNGTKRFDNPVLPFNDGVYFASTEKSNIIRGWIFGTTLDSKTQSLLIVNNATNVVIKVCEFQFCNDPFLGVYYHKNNKSWMESEFRVYSSANNCTFEYVSQPFLMDLEGKQGNFKNLREFVFKNIDGYFKIYSKHTPINLVRDLPQGFSALEPLVDLPIGINITRFQTLLALHRSYLTPGDSSSGWTAGAAAYYVGYLQPRTFLLKYNENGTITDAVDCALDPLSETKCTLKSFTVEKGIYQTSNFRVQPTESIVRFPNITNLCPFGEVFNATRFASVYAWNRKRISNCVADYSVLYNSASFSTFKCYGVSPTKLNDLCFTNVYADSFVIRGDEVRQIAPGQTGKIADYNYKLPDDFTGCVIAWNSNNLDSKVGGNYNYLYRLFRKSNLKPFERDISTEIYQAGSTPCNGVEGFNCYFPLQSYGFQPTNGVGYQPYRVVVLSFELLHAPATVCGPKKSTNLVKNKCVNFNFNGLTGTGVLTESNKKFLPFQQFGRDIADTTDAVRDPQTLEILDITPCSFGGVSVITPGTNTSNQVAVLYQDVNCTEVPVAIHADQLTPTWRVYSTGSNVFQTRAGCLIGAEHVNNSYECDIPIGAGICASYQTQTNSPRRARSVASQSIIAYTMSLGAENSVAYSNNSIAIPTNFTISVTTEILPVSMTKTSVDCTMYICGDSTECSNLLLQYGSFCTQLNRALTGIAVEQDKNTQEVFAQVKQIYKTPPIKDFGGFNFSQILPDPSKPSKRSFIEDLLFNKVTLADAGFIKQYGDCLGDIAARDLICAQKFNGLTVLPPLLTDEMIAQYTSALLAGTITSGWTFGAGAALQIPFAMQMAYRFNGIGVTQNVLYENQKLIANQFNSAIGKIQDSLSSTASALGKLQDVVNQNAQALNTLVKCLSSNFGAISSVLNDILSRLDKVEAEVQIDRLITGRLQCLQTYVTQQLIRAAEIRASANLAATKMSECVLGQSKRVDFCGKGYHLMSFPQSAPHGVVFLHVTYVPAQEKNFTTAPAICHDGKAHFPREGVFVSNGTHWFVTQRNFYEPQIITTDNTFVSGNCDVVIGIVNNTVYDPLQLELDSGGSGYIPEAPRDGQAYVRKDGEWVLLSTFL

SEQ ID NO: 10335 - protein, 1177 aa, Artificial Sequence
  SARS-CoV-2/India/1-31/2020__EPI_ISL_413523 spike protein (1-1147)(Q965C_S1003C) Foldon construct
MFVFLVLLPLVSSQCVNLTTRTQLPPAYTNSFTRGVYYPDKVFRSSVLHSTQDLFLPFFSNVTWFHAIHVSGTNGTKRFDNPVLPFNDGVYFASTEKSNIIRGWIFGTTLDSKTQSLLIVNNATNVVIKVCEFQFCNDPFLGVYYHKNNKSWMESEFRVYSSANNCTFEYVSQPFLMDLEGKQGNFKNLREFVFKNIDGYFKIYSKHTPINLVRDLPQGFSALEPLVDLPIGINITRFQTLLALHRSYLTPGDSSSGWTAGAAAYYVGYLQPRTFLLKYNENGTITDAVDCALDPLSETKCTLKSFTVEKGIYQTSNFRVQPTESIVRFPNITNLCPFGEVFNATRFASVYAWNRKRISNCVADYSVLYNSASFSTFKCYGVSPTKLNDLCFTNVYADSFVIRGDEVRQIAPGQTGKIADYNYKLPDDFTGCVIAWNSNNLDSKVGGNYNYLYRLFRKSNLKPFERDISTEIYQAGSTPCNGVEGFNCYFPLQSYGFQPTNGVGYQPYRVVVLSFELLHAPATVCGPKKSTNLVKNKCVNFNFNGLTGTGVLTESNKKFLPFQQFGRDIADTTDAVRDPQTLEILDITPCSFGGVSVITPGTNTSNQVAVLYQDVNCTEVPVAIHADQLTPTWRVYSTGSNVFQTRAGCLIGAEHVNNSYECDIPIGAGICASYQTQTNSPRRARSVASQSIIAYTMSLGAENSVAYSNNSIAIPTNFTISVTTEILPVSMTKTSVDCTMYICGDSTECSNLLLQYGSFCTQLNRALTGIAVEQDKNTQEVFAQVKQIYKTPPIKDFGGFNFSQILPDPSKPSKRSFIEDLLFNKVTLADAGFIKQYGDCLGDIAARDLICAQKFNGLTVLPPLLTDEMIAQYTSALLAGTITSGWTFGAGAALQIPFAMQMAYRFNGIGVTQNVLYENQKLIANQFNSVIGKIQDSLSSTASALGKLQDVVNQNAQALNTLVKCLSSNFGAISSVLNDILSRLDKVEAEVQIDRLITGRLQCLQTYVTQQLIRAAEIRASANLAATKMSECVLGQSKRVDFCGKGYHLMSFPQSAPHGVVFLHVTYVPAQEKNFTTAPAICHDGKAHFPREGVFVSNGTHWFVTQRNFYEPQIITTDNTFVSGNCDVVIGIVNNTVYDPLQPELDSGGSGYIPEAPRDGQAYVRKDGEWVLLSTFL

SEQ ID NO: 10336 - protein, 1177 aa, Artificial Sequence
  SARS-CoV-2/Guangdong/GD2020087-P0008/2020__EPI_ISL_413863 spike protein (1-1147)(Q965C_S1003C) Foldon construct
MFVFLVLLPLVSSQCVNLTTRTQLPPAYTNSFTRGVYYPDKVFRSSVLHSTQDLFLPFFSNVTWFHAIHVSGTNGTKRFDNPVLPFNDGVYFASTEKSNIIRGWIFGTTLDSKTQSLLIVNNATNVVIKVCEFQFCNDPFLGVYYHKNNKSWMESEFRVYSSANNCTFEYVSQPFLMDLEGKQGNFKNLREFVFKNIDGYFKIYSKHTPINLVRDLPQGFSALEPLVDLPIGINITRFQTLLALHRSYLTPGDSSSGWTAGAAAYYVGYLQPRTFLLKYNENGTITDAVDCALDPLSETKCTLKSFTVEKGIYQTSNFRVQPTESIVRFPNITNLCPFGEVFNATRFASVYAWNRKRISNCVADYSVLYNSASFSTFKCYGVSPTKLNDLCFTNVYADSFVIRGDEVREIAPGQTGKIADYNYKLPDDFTGCVIAWNSNNLDSKVGGNYNYLYRLFRKSNLKPFERDISTEIYQAGSTPCNGVEGFNCYFPLQSYGFQPTNGVGYQPYRVVVLSFELLHAPATVCGPKKSTNLVKNKCVNFNFNGLTGTGVLTESNKKFLPFQQFGRDIADTTDAVRDPQTLEILDITPCSFGGVSVITPGTNTSNQVAVLYQDVNCTEVPVAIHADQLTPTWRVYSTGSNVFQTRAGCLIGAEHVNNSYECDIPIGAGICASYQTQTNSPRRARSVASQSIIAYTMSLGAENSVAYSNNSIAIPTNFTISVTTEILPVSMTKTSVDCTMYICGDSTECSNLLLQYGSFCTQLNRALTGIAVEQDKNTQEVFAQVKQIYKTPPIKDFGGFNFSQILPDPSKPSKRSFIEDLLFNKVTLADAGFIKQYGDCLGDIAARDLICAQKFNGLTVLPPLLTDEMIAQYTSALLAGTITSGWTFGAGAALQIPFAMQMAYRFNGIGVTQNVLYENQKLIANQFNSAIGKIQDSLSSTASALGKLQDVVNQNAQALNTLVKCLSSNFGAISSVLNDILSRLDKVEAEVQIDRLITGRLQCLQTYVTQQLIRAAEIRASANLAATKMSECVLGQSKRVDFCGKGYHLMSFPQSAPHGVVFLHVTYVPAQEKNFTTAPAICHDGKAHFPREGVFVSNGTHWFVTQRNFYEPQIITTDNTFVSGNCDVVIGIVNNTVYDPLQPELDSGGSGYIPEAPRDGQAYVRKDGEWVLLSTFL

SEQ ID NO: 10337 - protein, 1177 aa, Artificial Sequence
  SARS-CoV-2/Sweden/01/2020__EPI_ISL_411951 spike protein (1-1147)(Q965C_S1003C) Foldon construct
MFVFLVLLPLVSSQCVNLTTRTQLPPAYTNSFTRGVYYPDKVFRSSVLHSTQDLFLPFFSNVTWFHAIHVSGTNGTKRFDNPVLPFNDGVYFASTEKSNIIRGWIFGTTLDSKTQSLLIVNNATNVVIKVCEFQFCNDPFLGVYYHKNNKSWMESEFRVYSSANNCTFEYVSQPFLMDLEGKQGNFKNLREFVFKNIDGYFKIYSKHTPINLVRDLPQGFSALEPLVDLPIGINITRFQTLLALHRSYLTPGDSSSGWTAGAAAYYVGYLQPRTFLLKYNENGTITDAVDCALDPLSETKCTLKSFTVEKGIYQTSNFRVQPTESIVRFPNITNLCPFGEVFNATRFASVYAWNRKRISNCVADYSVLYNSASFSTFKCYGVSPTKLNDLCFTNVYADSFVIRGDEVRQIAPGQTGKIADYNYKLPDDFTGCVIAWNSNNLDSKVGGNYNYLYRLFRKSNLKPFERDISTEIYQAGSTPCNGVEGFNCYFPLQSYGFQPTNGVGYQPYRVVVLSFELLHAPATVCGPKKSTNLVKNKCVNFNFNGLTGTGVLTESNKKFLPFQQFGRDIADTTDAVRDPQTLEILDITPCSFGGVSVITPGTNTSNQVAVLYQDVNCTEVPVAIHADQLTPTWRVYSTGSNVFQTRAGCLIGAEHVNNSYECDIPIGAGICASYQTQTNSPRRARSVASQSIIAYTMSLGAENSVAYSNNSIAIPTNFTISVTTEILPVSMTKTSVDCTMYICGDSTECSNLLLQYGSFCTQLNRALTGIAVEQDKNTQEVFAQVKQIYKTPPIKDCGGFNFSQILPDPSKPSKRSFIEDLLFNKVTLADAGFIKQYGDCLGDIAARDLICAQKFNGLTVLPPLLTDEMIAQYTSALLAGTITSGWTFGAGAALQIPFAMQMAYRFNGIGVTQNVLYENQKLIANQFNSAIGKIQDSLSSTASALGKLQDVVNQNAQALNTLVKCLSSNFGAISSVLNDILSRLDKVEAEVQIDRLITGRLQCLQTYVTQQLIRAAEIRASANLAATKMSECVLGQSKRVDFCGKGYHLMSFPQSAPHGVVFLHVTYVPAQEKNFTTAPAICHDGKAHFPREGVFVSNGTHWFVTQRNFYEPQIITTDNTFVSGNCDVVIGIVNNTVYDPLQPELDSGGSGYIPEAPRDGQAYVRKDGEWVLLSTFL

SEQ ID NO: 10338 - protein, 1177 aa, Artificial Sequence
  SARS-CoV-2/Tianmen/HBCDC-HB-07/2020__EPI_ISL_412983 spike protein (1-1147)(Q965C_S1003C) Foldon construct
MFVFLVLLPLVSSQCVNLTTRTQLPPAYTNSFTRGVYYPDKVFRSSVLHSTQDLFLPFFSNVTWFHAIHVSGTNGTKRFDNPVLPFNDGVYFASTEKSNIIRGWIFGTTLDSKTQSLLIVNNATNVVIKVCEFQFCNDPFLGVYYHKNNKSWMESEFRVYSSANNCTFEYVSQPFLMDLEGKQGNFKNLREFVFKNIDGYFKIYSKHTPINLVRDLPQGFSALEPLVDLPIGINITRFQTLLALHRSYLTPGDSSSGWTAGAAAYYVGYLQPRTFLLKYNENGTITDAVDCALDPLSETKCTLKSFTVEKGIYQTSNFRVQPTESIVRFPNITNLCPFGEVFNATRFASVYAWNRKRISNCVADYSVLYNSASFSTFKCYGVSPTKLNDLCFTNVYADSFVIRGDEVRQIAPGQTGKIADYNYKLPDDFTGCVIAWNSNNLDSKVGGNYNYLYRLFRKSNLKPFERDISTEIYQAGSTPCNGVEGFNCYFPLQSYGFQPTNGVGYQPYRVVVLSFELLHAPATVCGPKKSTNLVKNKCVNFNFNGLTGTGVLTESNKKFLPFQQFGRDIADTTDAVRDPQTLEILDITPCSFGGVSVITPGTNTSNQVAVLYQDLNCTEVPVAIHADQLTPTWRVYSTGSNVFQTRAGCLIGAEHVNNSYECDIPIGAGICASYQTQTNSPRRARSVASQSIIAYTMSLGAENSVAYSNNSIAIPTNFTISVTTEILPVSMTKTSVDCTMYICGDSTECSNLLLQYGSFCTQLNRALTGIAVEQDKNTQEVFAQVKQIYKTPPIKDFGGFNFSQILPDPSKPSKRSFIEDLLFNKVTLADAGFIKQYGDCLGDIAARDLICAQKFNGLTVLPPLLTDEMIAQYTSALLAGTITSGWTFGAGAALQIPFAMQMAYRFNGIGVTQNVLYENQKLIANQFNSAIGKIQDSLSSTASALGKLQDVVNQNAQALNTLVKCLSSNFGAISSVLNDILSRLDKVEAEVQIDRLITGRLQCLQTYVTQQLIRAAEIRASANLAATKMSECVLGQSKRVDFCGKGYHLMSFPQSAPHGVVFLHVTYVPAQEKNFTTAPAICHDGKAHFPREGVFVSNGTHWFVTQRNFYEPQIITTDNTFVSGNCDVVIGIVNNTVYDPLQPELDSGGSGYIPEAPRDGQAYVRKDGEWVLLSTFL

SEQ ID NO: 10339 - protein, 1177 aa, Artificial Sequence
  SARS-CoV-2/Hong Kong/case42_VM20002493/2020__EPI_ISL_414527 spike protein (1-1147)(Q965C_S1003C) Foldon construct
MFVFLVLLPLVSSQCVNLTTRTQLPPAYTNSFTRGVYYPDKVFRSSVLHSTQDLFLPFFSNVTWFHAIHVSGTNGTKRFDNPVLPFNDGVYFASTEKSNIIRGWIFGTTLDSKTQSLLIVNNATNVVIKVCEFQFCNDPFLGVYYHKNNKSWMESEFRVYSSANNCTFEYVSQPFLMDLEGKQGNFKNLREFVFKNIDGYFKIYSKHTPINLVRDLPQGFSALEPLVDLPIGINITRFQTLLALHRSYLTPGDSSSGWTAGAAAYYVGYLQPRTFLLKYNENGTITDAVDCALDPLSETKCTLKSFTVEKGIYQTSNFRVQPTESIVRFPNITNLCPFGEVFNATRFASVYAWNRKRISNCVADYSVLYNSASFSTFKCYGVSPTKLNDLCFTNVYADSFVIRGDEVRQIAPGQTGKIADYNYKLPDDFTGCVIAWNSNNLDSKVGGNYNYLYRLFRKSNLKPFERDISTEIYQAGSTPCNGVEGFNCYFPLQSYGFQPTNGVGYQPYRVVVLSFELLHAPATVCGPKKSTNLVKNKCVNFNFNGLTGTGVLTESNKKFLPFQQFGRDIADTTDAVRDPQTLEILDITPCSFGGVSVITPGTNTSNQVAVLYQDVNCTEVPVAIHADQLTPTWRVYSTGSNVFQTRAGCLIGAEHVNNSYECDIPIGAGICASYQTQTNSPRRARSVASQSIIAYTMSLGAENSVAYSNNSIAIPTNFAISVTTEILPVSMTKTSVDCTMYICGDSTECSNLLLQYGSFCTQLNRALTGIAVEQDKNTQEVFAQVKQIYKTPPIKDFGGFNFSQILPDPSKPSKRSFIEDLLFNKVTLADAGFIKQYGDCLGDIAARDLICAQKFNGLTVLPPLLTDEMIAQYTSALLAGTITSGWTFGAGAALQIPFAMQMAYRFNGIGVTQNVLYENQKLIANQFNSAIGKIQDSLSSTASALGKLQDVVNQNAQALNTLVKCLSSNFGAISSVLNDILSRLDKVEAEVQIDRLITGRLQCLQTYVTQQLIRAAEIRASANLAATKMSECVLGQSKRVDFCGKGYHLMSFPQSAPHGVVFLHVTYVPAQEKNFTTAPAICHDGKAHFPREGVFVSNGTHWFVTQRNFYEPQIITTDNTFVSGNCDVVIGIVNNTVYDPLQPELDSGGSGYIPEAPRDGQAYVRKDGEWVLLSTFL

SEQ ID NO: 10340 - protein, 1177 aa, Artificial Sequence
  SARS-CoV-2/USA/CruiseA-23/2020__EPI_ISL_414482 spike protein (1-1147)(Q965C_S1003C) Foldon construct
MFVFLVLLPLVSSQCVNLTTRTQLPPAYTNSFTRGVYYPDKVFRSSVLHSTQDLFLPFFSNVTWFHAIHVSGTNGTKRFDNPVLPFNDGVYFASTEKSNIIRGWIFGTTLDSKTQSLLIVNNATNVVIKVCEFQFCNDPFLGVYYHKNNKSWMESEFRVYSSANNCTFEYVSQPFLMDLEVKQGNFKNLREFVFKNIDGYFKIYSKHTPINLVRDLPQGFSALEPLVDLPIGINITRFQTLLALHRSYLTPGDSSSGWTAGAAAYYVGYLQPRTFLLKYNENGTITDAVDCALDPLSETKCTLKSFTVEKGIYQTSNFRVQPTESIVRFPNITNLCPFGEVFNATRFASVYAWNRKRISNCVADYSVLYNSASFSTFKCYGVSPTKLNDLCFTNVYADSFVIRGDEVRQIAPGQTGKIADYNYKLPDDFTGCVIAWNSNNLDSKVGGNYNYLYRLFRKSNLKPFERDISTEIYQAGSTPCNGVEGFNCYFPLQSYGFQPTNGVGYQPYRVVVLSFELLHAPATVCGPKKSTNLVKNKCVNFNFNGLTGTGVLTESNKKFLPFQQFGRDIADTTDAVRDPQTLEILDITPCSFGGVSVITPGTNTSNQVAVLYQDVNCTEVPVAIHADQLTPTWRVYSTGSNVFQTRAGCLIGAEHVNNSYECDIPIGAGICASYQTQTNSPRRARSVASQSIIAYTMSLGAENSVAYSNNSIAIPTNFTISVTTEILPVSMTKTSVDCTMYICGDSTECSNLLLQYGSFCTQLNRALTGIAVEQDKNTQEVFAQVKQIYKTPPIKDFGGFNFSQILPDPSKPSKRSFIEDLLFNKVTLADAGFIKQYGDCLGDIAARDLICAQKFNGLTVLPPLLTDEMIAQYTSALLAGTITSGWTFGAGAALQIPFAMQMAYRFNGIGVTQNVLYENQKLIANQFNSAIGKIQDSLSSTASALGKLQDVVNQNAQALNTLVKCLSSNFGAISSVLNDILSRLDKVEAEVQIDRLITGRLQCLQTYVTQQLIRAAEIRASANLAATKMSECVLGQSKRVDFCGKGYHLMSFPQSAPHGVVFLHVTYVPAQEKNFTTAPAICHDGKAHFPREGVFVSNGTHWFVTQRNFYEPQIITTDNTFVSGNCDVVIGIVNNTVYDPLQPELDSGGSGYIPEAPRDGQAYVRKDGEWVLLSTFL

SEQ ID NO: 10341 - protein, 1177 aa, Artificial Sequence
  SARS-CoV-2/Hong Kong/case85_VM20002868/2020__EPI_ISL_414519 spike protein (1-1147)(Q965C_S1003C) Foldon construct
MFVFLVLVPLVSSQCVNLTTRTQLPPAYTNSFTRGVYYPDKVFRSSVLHSTQDLFLPFFSNVTWFHAIHVSGTNGTKRFDNPVLPFNDGVYFASTEKSNIIRGWIFGTTLDSKTQSLLIVNNATNVVIKVCEFQFCNDPFLGVYYHKNNKSWMESEFRVYSSANNCTFEYVSQPFLMDLEGKQGNFKNLREFVFKNIDGYFKIYSKHTPINLVRDLPQGFSALEPLVDLPIGINITRFQTLLALHRSYLTPGDSSSGWTAGAAAYYVGYLQPRTFLLKYNENGTITDAVDCALDPLSETKCTLKSFTVEKGIYQTSNFRVQPTESIVRFPNITNLCPFGEVFNATRFASVYAWNRKRISNCVADYSVLYNSASFSTFKCYGVSPTKLNDLCFTNVYADSFVIRGDEVRQIAPGQTGKIADYNYKLPDDFTGCVIAWNSNNLDSKVGGNYNYLYRLFRKSNLKPFERDISTEIYQAGSTPCNGVEGFNCYFPLQSYGFQPTNGVGYQPYRVVVLSFELLHAPATVCGPKKSTNLVKNKCVNFNFNGLTGTGVLTESNKKFLPFQQFGRDIADTTDAVRDPQTLEILDITPCSFGGVSVITPGTNTSNQVAVLYQDVNCTEVPVAIHADQLTPTWRVYSTGSNVFQTRAGCLIGAEHVNNSYECDIPIGAGICASYQTQTNSPRRARSVASQSIIAYTMSLGAENSVAYSNNSIAIPTNFTISVTTEILPVSMTKTSVDCTMYICGDSTECSNLLLQYGSFCTQLNRALTGIAVEQDKNTQEVFAQVKQIYKTPPIKDFGGFNFSQILPDPSKPSKRSFIEDLLFNKVTLADAGFIKQYGDCLGDIAARDLICAQKFNGLTVLPPLLTDEMIAQYTSALLAGTITSGWTFGAGAALQIPFAMQMAYRFNGIGVTQNVLYENQKLIANQFNSAIGKIQDSLSSTASALGKLQDVVNQNAQALNTLVKCLSSNFGAISSVLNDILSRLDKVEAEVQIDRLITGRLQCLQTYVTQQLIRAAEIRASANLAATKMSECVLGQSKRVDFCGKGYHLMSFPQSAPHGVVFLHVTYVPAQEKNFTTAPAICHDGKAHFPREGVFVSNGTHWFVTQRNFYEPQIITTDNTFVSGNCDVVIGIVNNTVYDPLQPELDSGGSGYIPEAPRDGQAYVRKDGEWVLLSTFL

SEQ ID NO: 10342 - protein, 1177 aa, Artificial Sequence; identical to SEQ ID NO: 10332
  SARS-CoV-2/England/200990660/2020__EPI_ISL_414523 spike protein (1-1147)(Q965C_S1003C) Foldon construct

SEQ ID NO: 10343 - protein, 1177 aa, Artificial Sequence
  SARS-CoV-2/Australia/NSW09/2020__EPI_ISL_413595 spike protein (1-1147)(Q965C_S1003C) Foldon construct
MFVFLVLLPLVSSQCVNLTTRTQLPPAYTNSFTRGVYYPDKVFRSSVLHSTQDLFLPFFSNVTWFHAIHVSGTNGTKRFDNPVLPFNDGVYFASTEKSNIIRGWIFGTTLDSKTQSLLIVNNATNVVIKVCEFQFCNDPFLGVYYHKNNKSWMESEFRVYSSANNCTFEYVSQPFLMDLEGKQGNFKNLREFVFKNIDGYFKIYSKHTPINLVRDLPQGFSALEPLVDLPIGINITRFQTLLALHRSYLTPGDSSSGWTAGAAAYYVGYLQPRTFLLKYNENGTITDAVDCALDPLSETKCTLKSFTVEKGIYQTSNFRVQPTESIVRFPNITNLCPFGEVFNATRFASVYAWNRKRISNCVADYSVLYNSASFSTFKCYGVSPTKLNDLCFTNVYADSFVIRGDEVRQIAPGQTGKIADYNYKLPDDFTGCVIAWNSNNLDSKVGGNYNYLYRLFRKSNLKPFERDISTEIYQAGSTPCNGVEGFNCYFPLQSYGFQPTNGVGYQPYRVVVLSFELLHAPATVCGPKKSTNLVKNKCVNFNFNGLTGTGVLTESNKKFLPFQQFGRDIADTTDAVRDPQTLEILDITPCSFGGVSVITPGTNTSNQVAVLYQDVNCTEVPVAIHADQLTPTWRVYSTGSNVFQTRAGCLIGAEHVNNSYECDIPIGAGICASYQTQTNSPRRARSVASQSIIAYTMSLGAENSVAYSNNSIAIPTNFTISVTTEILPVSMTKTSVDCTMYICGDSTECSNLLLQYGSFCTQLNRALTGIAVEQDKNTQEVFAQVKQIYKTPPIKDFGGFNFSQILPDPSKPSKRSFIEDLLFNKVTLADAGFIKQYGDCLGDIAARDLICAQKFNGLTVLPPLLTDEMIAQYTSALLAGTITSGWTFGAGAALQIPFAMQMAYRFNGIGVTQNVLYENQKLIANQFNSAIGKIQDSLSFTASALGKLQDVVNQNAQALNTLVKCLSSNFGAISSVLNDILSRLDKVEAEVQIDRLITGRLQCLQTYVTQQLIRAAEIRASANLAATKMSECVLGQSKRVDFCGKGYHLMSFPQSAPHGVVFLHVTYVPAQEKNFTTAPAICHDGKAHFPREGVFVSNGTHWFVTQRNFYEPQIITTDNTFVSGNCDVVIGIVNNTVYDPLQPELDSGGSGYIPEAPRDGQAYVRKDGEWVLLSTFL

SEQ ID NO: 10344 - protein, 1177 aa, Artificial Sequence; identical to SEQ ID NO: 10324
  SARS-CoV-2/Australia/NSW10/2020__EPI_ISL_413596 spike protein (1-1147)(Q965C_S1003C) Foldon construct

SEQ ID NO: 10345 - protein, 1177 aa, Artificial Sequence
  SARS-CoV-2/Switzerland/1000477797/2020__EPI_ISL_413023 spike protein (1-1147)(Q965C_S1003C) Foldon construct
MFVFLVLLPLVSSQCVNLTTRTQLPPAYTNSFTRGVYYPDKVFRSSVLHSTQDLFLPFFSNVTWFHAIHVSGTNGTKRFDNPVLPFNDGVYFASTEKSNIIRGWIFGTTLDSKTQSLLIVNNATNVVIKVCEFQFCNDPFLGVYYHKNNKSWMESEFRVYSSANNCTFEYVSQPFLMDLEGKQGNFKNLREFVFKNIDGYFNIYSKHTPINLVRDLPQGFSALEPLVDLPIGINITRFQTLLALHRSYLTPGDSSSGWTAGAAAYYVGYLQPRTFLLKYNENGTITDAVDCALDPLSETKCTLKSFTVEKGIYQTSNFRVQPTESIVRFPNITNLCPFGEVFNATRFASVYAWNRKRISNCVADYSVLYNSASFSTFKCYGVSPTKLNDLCFTNVYADSFVIRGDEVRQIAPGQTGKIADYNYKLPDDFTGCVIAWNSNNLDSKVGGNYNYLYRLFRKSNLKPFERDISTEIYQAGSTPCNGVEGFNCYFPLQSYGFQPTNGVGYQPYRVVVLSFELLHAPATVCGPKKSTNLVKNKCVNFNFNGLTGTGVLTESNKKFLPFQQFGRDIADTTDAVRDPQTLEILDITPCSFGGVSVITPGTNTSNQVAVLYQGVNCTEVPVAIHADQLTPTWRVYSTGSNVFQTRAGCLIGAEHVNNSYECDIPIGAGICASYQTQTNSPRRARSVASQSIIAYTMSLGAENSVAYSNNSIAIPTNFTISVTTEILPVSMTKTSVDCTMYICGDSTECSNLLLQYGSFCTQLNRALTGIAVEQDKNTQEVFAQVKQIYKTPPIKDFGGFNFSQILPDPSKPSKRSFIEDLLFNKVTLADAGFIKQYGDCLGDIAARDLICAQKFNGLTVLPPLLTDEMIAQYTSALLAGTITSGWTFGAGAALQIPFAMQMAYRFNGIGVTQNVLYENQKLIANQFNSAIGKIQDSLSSTASALGKLQDVVNQNAQALNTLVKCLSSNFGAISSVLNDILSRLDKVEAEVQIDRLITGRLQCLQTYVTQQLIRAAEIRASANLAATKMSECVLGQSKRVDFCGKGYHLMSFPQSAPHGVVFLHVTYVPAQEKNFTTAPAICHDGKAHFPREGVFVSNGTHWFVTQRNFYEPQIITTDNTFVSGNCDVVIGIVNNTVYDPLQPELDSGGSGYIPEAPRDGQAYVRKDGEWVLLSTFL

SEQ ID NO: 10346 - protein, 1177 aa, Artificial Sequence
  SARS-CoV-2/Belgium/BA-02291/2020__EPI_ISL_415159 spike protein (1-1147)(Q965C_S1003C) Foldon construct
MFVFLVLLPLVSSQCVNLTTRTQLPPAYTNSFTRGVYYPDKVFRSSVLHSTQDLFLPFFSNVTWFHAIHVSGTNGTKRFDNPVLPFNDGVYFASTEKSNIIRGWIFGTTLDSKTQSLLIVNNATNVVIKVCEFQFCNDPFLGVYYHKNNKSWMESEFRVYSSANNCTFEYVSQPFLMDLEGKQGNFKNLREFVFKNIDGYFKIYSKHTPINLVRDLPQGFSALEPLVDLPIGINITRFQTLLALHRSYLTPGDSSSGWTAGAAAYYVGYLQPRTFLLKYNENGTITDAVDCALDPLSETKCTLKSFTVEKGIYQTSNFRVQPTESIVRFPNITNLCPFGEVFNATRFASVYAWNRKRISNCVADYSVLYNSASFSTFKCYGVSPTKLNDLCFTNVYADSFVIRGDEVRQIAPGQTGKIADYNYKLPDDFTGCVIAWNSNNLDSKVGGNYNYLYRLFRRSNLKPFERDISTEIYQAGSTPCNGVEGFNCYFPLQSYGFQPTNGVGYQPYRVVVLSFELLPAPATVCGPKKSTNLVKNKCVNFNFNGLTGTGVLTESNKKFLPFQQFGRDIADTTDAVRDPQTLEILDITPCSFGGVSVITPGTNTSNQVAVLYQGVNCTEVPVAIHADQLTPTWRVYSTGSNVFQTRAGCLIGAEHVNNSYECDIPIGAGICASYQTQTNSPRRARSVASQSIIAYTMSLGAENSVAYSNNSIAIPTNFTISVTTEILPVSMTKTSVDCTMYICGDSTECSNLLLQYGSFCTQLNRALTGIAVEQDKNTQEVFAQVKQIYKTPPIKDFGGFNFSQILPDPSKPSKRSFIEDLLFNKVTLADAGFIKQYGDCLGDIAARDLICAQKFNGLTVLPPLLTDEMIAQYTSALLAGTITSGWTFGAGAALQIPFAMQMAYRFNGIGVTQNVLYENQKLIANQFNSAIGKIQDSLSSAAPALGKLQDVVNQNAQALNTLVKCLSSNFGAISSVLNDILSRLDKVEAEVQIDRLITGRLQCLQTYVTQQLIRAAEIRASANLAATKMSECVLGQSKRVDFCGKGYHLMSFPQSAPHGVVFLHVTYVPAQEKNFTTAPAICHDGKAHFPREGVFVSNGTHWFVTQRNFYEPQIITTDNTFVSGNCDVVIGIVNNTVYDPLQPELDSGGSGYIPEAPRDGQAYVRKDGEWVLLSTFL

SEQ ID NO: 10347 - protein, 1177 aa, Artificial Sequence
  SARS-CoV-2/USA/WA8-UW5/2020__EPI_ISL_413486 spike protein (1-1147)(Q965C_S1003C) Foldon construct
MFVFLVLLPLVSSQCVNLTTRTQLPPAYTNSFTRGVYYPDKVFRSSVLHSTQDLFLPFFSNVTWFHAIHVSGTNGTKRFDNPVLPFNDGVYFASTEKSNIIRGWIFGTTLDSKTQSLLIVNNATNVVIKVCEFQFCNDPFLGVYYHKNNKSWMESEFRVYSSANNCTFEYVSQPFLMDLEGKQGNFKNLREFVFKNIDGYFKIYSKHTPINLVRDLPQGFSALEPLVDLPIGINITRFQTLLALHRSYLTPGDSSSGWTAGAAAYYVGYLQPRTFLLKYNENGTITDAVDCALDPLSETKCTLKSFTVEKGIYQTSNFRVQPTESIVRFPNITNLCPFGEVFNATRFASVYAWNRKRISNCVADYSVLYNSASFSTFKCYGVSPTKLNDLCFTNVYADSFVIRGDEVRQIAPGQTGKIADYNYKLPDDFTGCVIAWNSNNLDSKVGGNYNYLYRLFRKSNLKPFERDISTEIYQAGSTPCNGVEGFNCYFPLQSYGFQPTNGVGYQPYRVVVLSFELLHAPATVCGPKKSTNLVKNKCVNFNFNGLTGTGVLTESNKKFLPFQQFGRDIADTTDAVRDPQTLEILDITPCSFGGVSVITPGTNTSNQVAVLYQDVNCTEVPVAIHADQLTPTWRVYSTGSNVFQTRAGCLIGAEYVNNSYECDIPIGAGICASYQTQTNSPRRARSVASQSIIAYTMSLGAENSVAYSNNSIAIPTNFTISVTTEILPVSMTKTSVDCTMYICGDSTECSNLLLQYGSFCTQLNRALTGIAVEQDKNTQEVFAQVKQIYKTPPIKDFGGFNFSQILPDPSKPSKRSFIEDLLFNKVTLADAGFIKQYGDCLGDIAARDLICAQKFNGLTVLPPLLTDEMIAQYTSALLAGTITSGWTFGAGAALQIPFAMQMAYRFNGIGVTQNVLYENQKLIANQFNSAIGKIQDSLSSTASALGKLQDVVNQNAQALNTLVKCLSSNFGAISSVLNDILSRLDKVEAEVQIDRLITGRLQCLQTYVTQQLIRAAEIRASANLAATKMSECVLGQSKRVDFCGKGYHLMSFPQSAPHGVVFLHVTYVPAQEKNFTTAPAICHDGKAHFPREGVFVSNGTHWFVTQRNFYEPQIITTDNTFVSGNCDVVIGIVNNTVYDPLQPELDSGGSGYIPEAPRDGQAYVRKDGEWVLLSTFL

SEQ ID NO: 10348 - protein, 1177 aa, Artificial Sequence
  SARS-CoV-2/England/20102000506/2020__EPI_ISL_415147 spike protein (1-1147)(Q965C_S1003C) Foldon construct
MFVFLVLLPLVSSQCVNLTTRTQLPPAYTNSFTRGVYYPDKVFRSSVLHSTQDLFLPFFSNVTWFHAIHVSGTNGTKRFDNPVLPFNDGVYFASTEKSNIIRGWIFGTTLDSKTQSLLIVNNATNVVIKVCEFQFCNDPFLGVYYHKNNKSWMESEFRVYSSANNCTFEYVSQPFLMDLEGKQGNFKNLREFVFKNIDGYFKIYSKHTPINLVRDLPQGFSALEPLVDLPIGINITRFQTLLALHRSYLTPGDSSSGWTAGAAAYYVGYLQPRTFLLKYNENGTITDAVDCALDPLSETKCTLKSFTVEKGIYQTSNFRVQPTESIVRFPNITNLCPFGEVFNATRFASVYAWNRKRISNCVADYSVLYNSASFSTFKCYGVSPTKLNDLCFTNVYADSFVIRGDEVRQIAPGQTGKIADYNYKLPDDFTGCVIAWNSNNLDSKVGGNYNYLYRLFRKSNLKPFERDISTEIYQAGSTPCNGVEGFNCYFPLQSYGFQPTNGVGYQPYRVVVLSFELLHAPATVCGPKKSTNLVKNKCVNFNFNGLTGTGVLTESNKKFLPFQQFGRDIADTTDAVRDPQTLEILDITPCSFGGVSVITPGTNTSNQVAVLYQGVNCTEVPVAIHADQLTPTWRVYSTGSNVFQTRAGCLIGAEHVNNSYECDIPIGAGICASYQTQTNSPRRARSVASQSIIAYTMSLGAENSVAYSNNSIAIPTNFTISVTTEILPVSMTKTSVDCTMYICGDSTECSNLLLQYGSFCTQLNRALTGIAVEQDKNTQEVFAQVKQIYKTPPIKDFGGFNFSQILPDPSKPSKRSFIEDLLFNKVTLADAGFIKQYGYCLGDIAARDLICAQKFNGLTVLPPLLTDEMIAQYTSALLAGTITSGWTFGAGAALQIPFAMQMAYRFNGIGVTQNVLYENQKLIANQFNSAIGKIQDSLSSTASALGKLQDVVNQNAQALNTLVKCLSSNFGAISSVLNDILSRLDKVEAEVQIDRLITGRLQCLQTYVTQQLIRAAEIRASANLAATKMSECVLGQSKRVDFCGKGYHLMSFPQSAPHGVVFLHVTYVPAQEKNFTTAPAICHDGKAHFPREGVFVSNGTHWFVTQRNFYEPQIITTDNTFVSGNCDVVIGIVNNTVYDPLQPELDSGGSGYIPEAPRDGQAYVRKDGEWVLLSTFL

SEQ ID NO: 10349 - protein, 1177 aa, Artificial Sequence
  SARS-CoV-2/Belgium/VAG-03013/2020__EPI_ISL_415155 spike protein (1-1147)(Q965C_S1003C) Foldon construct
MFVFLVLLPLVSSQCVNLTTRTQLPPAYTNSFTRGVYYPDKVFRSSVLHSTQDLFLPFFSNVTWFHAIHVSGTNGTKRFDNPVLPFNDGVYFASTEKSNIIRGWIFGTTLDSKTQSLLIVNNATNVVIKVCEFQFCNDPFLGVYYHKNNKSWMESEFRVYSSANNCTFEYVSQPFLMDLEGKQGNFKNLREFVFKNIDGYFKIYSKHTPINLVRDLPQGFSALEPLVDLPIGINITRFQTLLALHRSYLTPGDSSSGWTAGAAAYYVGYLQPRTFLLKYNENGTITDAVDCALDPLSETKCTLKSFTVEKGIYQTSNFRVQPTESIVRFPNITNLCPFGEVFNATRFASVYAWNRKRISNCVADYSVLYNSASFSTFKCYGVSPTKLNDLCFTNVYADSFVIRGDEVRQIAPGQTGKIADYNYKLPDDFTGCVIAWNSNNLDSKVGGNYNYLYRLFRKSNLKPFERDISTEIYQAGSTPCNGVEGFNCYFPLQSYGFQPTNGVGYQPYRVVVLSFELLHAPATVCGPKKSTNLVKNKCVNFNFNGLTGTGVLTESNKKFLPFQQFGRDIADTTDAVRDPQTLEILDITPCSFGGVSVITPGTNTSNQVAVLYQGVNCTEVPVAIHADQLTPTWRVYSTGSNVFQTRAGCLIGAEHVNNSYECDIPIGAGICASYQTQTNSPRRARSVASQSIIAYTMSLGAENSVAYSNNSIAIPTNFTISVTTEILPVSMTKTSVDCTMYICGDSTECSNLLLQYGSFCTQLNRALTGIAVEQDKNTQEVFAQVKQIYKTPPIKDFGGFNFSQILPDPSKPSKRSFIEDLLFNKVTLADAGFIKQYGDCLGDIAARDLICAQKFNGLTVLPPLLTDEMIAQYTSALLAGTITSGWTFGAGAALQIPFAMQMAYRFNGIGVTQNVLYENQKLIANQFNSAIGKIQDSLSSTATALGKLQDVVNQNAQALNTLVKCLSSNFGAISSVLNDILSRLDKVEAEVQIDRLITGRLQCLQTYVTQQLIRAAEIRASANLAATKMSECVLGQSKRVDFCGKGYHLMSFPQSAPHGVVFLHVTYVPAQEKNFTTAPAICHDGKAHFPREGVFVSNGTHWFVTQRNFYEPQIITTDNTFVSGNCDVVIGIVNNTVYDPLQPELDSGGSGYIPEAPRDGQAYVRKDGEWVLLSTFL

SEQ ID NO: 10350 - protein, 1177 aa, Artificial Sequence
  SARS-CoV-2/Belgium/BC-03016/2020__EPI_ISL_415157 spike protein (1-1147)(Q965C_S1003C) Foldon construct
MFVFLVLLPLVSSQCVNLTTRTQLPPAYTNSFTRGVYYPDKVFRSSVLHSTQDLFLPFFSNVTWFHAIHVSGTNGTKRFDNPVLPFNDGVYFASTEKSNIIRGWIFGTTLDSKTQSLLIVNNATNVVIKVCEFQFCNDPFLGVYYHKNNKSWMESEFRVYSSANNCTFEYVSQPFLMDLEGKQGNFKNLREFVFKNIDGYFKIYSKHTPINLVRDLPQGFSALEPLVDLPIGINITRFQTLLALHRSYLTPGDSSSGWTAGAAAYYVGYLQPRTFLLKYNENGTITDAVDCALDPLSETKCTLKSFTVEKGIYQTSNFRVQPTESIVRFPNITNLCPFGEVFNATRFASVYAWNRKRISNCVADYSVLYNSASFSTFKCYGVSPTKLNDLCFTNVYADSFVIRGDEVRQIAPGQTGKIADYNYKLPDDFTGCVIAWNSNNLDSKVGGNYNYLYRLFRKSNLKPFERDISTEIYQAGSTPCNGVEGFNCYFPLQSYGFQPTNGVGYQPYRVVVLSFELLHAPATVCGPKKSTNLVKNKCVNFNFNGLTGTGVLTESNKKFLPFQQFGRDIADTTDAVRDPQTLEILDITPCSFGGVSVITPGTNTSNQVAVLYQGVNCTEVPVAIHADQLTPTWRVYSTGSNVFQTRAGCLIGAEHVNNSYECDIPIGAGICASYQTQTNSPRRARSVASQSIIAYTMSLGAENSVAYSNNSIAIPTNFTISVTTEILPVSMTKTSVDCTMYICGDSTECSNLLLQYGSFCTQLNRALTGIAVEQDKNTQEVFAQVKQIYKTPPIKDFGGFNFSQILPDPSKPSKRSFIEDLLFNKVTLADAGFIKQYGDCLGDIAARDLICAQKFNGLTVLPPLLTDEMIAQYTSALLAGTITSGWTFGAGAALQIPFAMQMAYRFNGIGVTQNVLYENQKLIANQFNSAIGKIQDSLSSTAPALGKLQDVVNQNAQALNTLVKCLSSNFGAISSVLNDILSRLDKVEAEVQIDRLITGRLQCLQTYVTQQLIRAAEIRASANLAATKMSECVLGQSKRVDFCGKGYHLMSFPQSAPHGVVFLHVTYVPAQEKNFTTAPAICHDGKAHFPREGVFVSNGTHWFVTQRNFYEPQIITTDNTFVSGNCDVVIGIVNNTVYDPLQPELDSGGSGYIPEAPRDGQAYVRKDGEWVLLSTFL

SEQ ID NO: 10351 - protein, 1177 aa, Artificial Sequence
  SARS-CoV-2/Germany/BavPat3/2020__EPI_ISL_414521 spike protein (1-1147)(Q965C_S1003C) Foldon construct
MFVFLVLLPLVSSQCVNLTTRTQLPPAYTNSFTRGVYYPDKVFRSSVLHSTQDLFLPFFSNVTWFHAIHVSGTNGTKRFDNPVLPFNDGVYFASTEKSNIIRGWIFGTTLDSKTQSLLIVNNATNVVIKVCEFQFCNDPFLGVYYHKNNKSWMESEFRVYSSANNCTFEYVSQPFLMDLEGKQGNFKNLREFVFKNIDGYFKIYSKHTPINLVRDLPQGFSALEPLVDLPIGINITRFQTLLALHRSYLTPGDSSSGWTAGAAAYYVGYLQPRTFLLKYNENGTITDAVDCALDPLSETKCTLKSFTVEKGIYQTSNFRVQPTESIVRFPNITNLCPFGEVFNATRFASVYAWNRKRISNCVADYSVLYNSASFSTFKCYGVSPTKLNDLCFTNVYADSFVIRGDEVRQIAPGQTGKIADYNYKLPDDFTGCVIAWNSNNLDSKVGGNYNYLYRLFRKSNLKPFERDISTEIYQAGSTPCNGVEGFNCYFPLQSYGFQPTNGVGYQPYRVVVLSFELLHAPATVCGPKKSTNLVKNKCVNFNFNGLTGTGVLTESNKKFLPFQQFGRDIADTTDAVRDPQTLEILDITPCSFGGVSVITPGTNTSNQVAVLYQDVNCTEVPVAIHADQLTPTWRVYSTGSNVFQTRAGCLIGAEHVNNSYECDIPIGAGICASYQTQTNSPRRARSVASQSIIAYTMSLGAENSVAYSNNSIAIPTNFTISVTTEILPVSMTKTSVDCTMYICGDSTECSNLLLQYGSFCTQLNRALTGIAVEQDKNTQQVFAQVKQIYKTPPIKDFGGFNFSQILPDPSKPSKRSFIEDLLFNKVTLADAGFIKQYGDCLGDIAARDLICAQKFNGLTVLPPLLTDEMIAQYTSALLAGTITSGWTFGAGAALQIPFAMQMAYRFNGIGVTQNVLYENQKLIANQFNSAIGKIQDSLSSTASALGKLQDVVNQNAQALNTLVKCLSSNFGAISSVLNDILSRLDKVEAEVQIDRLITGRLQCLQTYVTQQLIRAAEIRASANLAATKMSECVLGQSKRVDFCGKGYHLMSFPQSAPHGVVFLHVTYVPAQEKNFTTAPAICHDGKAHFPREGVFVSNGTHWFVTQRNFYEPQIITTDNTFVSGNCDVVIGIVNNTVYDPLQPELDSGGSGYIPEAPRDGQAYVRKDGEWVLLSTFL

SEQ ID NO: 10352 - protein, 1177 aa, Artificial Sequence
  SARS-CoV-2/France/HF1805/2020__EPI_ISL_414628 spike protein (1-1147)(Q965C_S1003C) Foldon construct
MFVFLVLLPLVSSQCVNLTTRTQLPPAYTNSFTRGVYYPDKVFRSSVLHSTQDLFLPFFSNVTWFHAIHVSGTNGTKRFDNPVLPFNDGVYFASTEKSNIIRGWIFGTTLDSKTQSLLIVNNATNVVIKVCEFQFCNDPFLGVYYHKNNKSWMESEFRVYSSANNCTFEYVSQPFLMDLEGKQGNFKNLREFVFKNIDGYFKIYSKHTPINLVRDLPQGFSALEPLVDLPIGINITRFQTLLALHRSYLTPGDSSSGWTAGAAAYYVGYLQPRTFLLKYNENGTITDAVDCALDPLSETKCTLKSFTVEKGIYQTSNFRVQPTESIVRFPNITNLCPFGEVFNATRFASVYAWNRKRISNCVADYSVLYNSASFSTFKCYGVSPTKLNDLCFTNVYADSFVIRGDEVRQIAPGQTGKIADYNYKLPDDFTGCVIAWNSNNLDSKVGGNYNYLYRLFRKSNLKPFERDISTEIYQAGSTPCNGVEGFNCYFPLQSYGFQPTNGVGYQPYRVVVLSFELLHAPATVCGPKKSTNLVKNKCVNFNFNGLTGTGVLTESNKKFLPFQQFGRDIADTTDAVRDPQTLEILDITPCSFGGVSVITPGTNTSNQVAVLYQGVNCTEVPVAIHADQLTPTWRVYSTGSNVFQTRAGCLIGAEHVNNSYECDIPIGAGICASYQTQTNSPRRARSVASQSIIAYTMSLGAENSVAYSNNSIAIPTNFTISVTTEILPVSMTKTSVDCTMYICGDSTECSNLLLQYGSFCTQLNRALTGIAVEQDKNTQEVFAQVKQIYKTPPIKDFGGFNFSQILPDPSKPSKRSFIEDLLFNKVTLADAGFIKQYGDCLGDIAARDLICAQKFNGLTVLPPLLTDEMIAQYTSALLAGTITSGWTFGAGAALQIPFAMQMAYRFNGIGVTQNVLYENQKLIANQFNSAIGKIQDSLSSTASALGKLQDVVNQNAQALNTLVKCLSSNFGAISSVLNDILSRLDKVEAEVQIDRLITGRLQCLQTYVTQQLIRAAEIRASANLAATKMSECVLGQSKRVDFCGKGYHLMSFPQSAPHGVVFLHVTYVPAQEKNFTTAPAICHDGKAHFPREGVFVSNGTHWFVTQRNFYEPQIITTDNTFVSGNCDVVIGVVNNTVYDPLQPELDSGGSGYIPEAPRDGQAYVRKDGEWVLLSTFL

SEQ ID NO: 10353 - protein, 1177 aa, Artificial Sequence
  SARS-CoV-2/Netherlands/ZuidHolland_9/2020__EPI_ISL_414445 spike protein (1-1147)(Q965C_S1003C) Foldon construct
MFVFLVLLPLVSSQCVNLTTRTQLPPAYTNSFTRGVYYPDKVFRSSVLHSTQDLFLPFFSNVTWFHAIHVSGTNGTKRFDNPVLPFNDGVYFASTEKSNIIRGWIFGTTLDSKTQSLLIVNNATNVVIKVCEFQFCNDPFLGVYYHKNNKSWMESEFRVYSSANNCTFEYVSQPFLMDLEGKQGNFKNLREFVFKNIDGYFKIYSKHTPINLVRDLPQGFSALEPLVDLPIGINITRFQTLLALHRSYLTPGDSSSGWTAGAAAYYVGYLQPRTFLLKYNENGTITDAVDCALDPLSETKCTLKSFTVEKGIYQTSNFRVQPTESIVRFPNITNLCPFGEVFNATRFASVYAWNRKRISNCVADYSVLYNSASFSTFKCYGVSPTKLNDLCFTNVYADSFVIRGDEVRQIAPGQTGKIADYNYKLPDDFTGCVIAWNSNNLDSKVGGNYNYLYRLFRKSNLKPFERDISTEIYQAGSTPCNGVEGFNCYFPLQSYGFQPTNGVGYQPYRVVVLSFELLHAPATVCGPKKSTNLVKNKCVNFNFNGLTGTGVLTESNKKFLPFQQFGRDIADTTDAVRDPQTLEILDITPCSFGGVSVITPGTNTSNQVAVLYQGVNCTEVPVAIHADQLTPTWRVYSTGSNVFQTRAGCLIGAEHVNNSYECDIPIGAGICASYQTQTNSPRRARSVASQSIIAYTMSLGAENSVAYSNNSIAIPTNFTISVTTEILPVSMTKTSVDCTMYICGDSTECSNLLLQYGSFCTQLNRALTGIAVEQDKNTQEVFAQVKQIYKTPPIKDFGGFNFSQILPDPSKPSKRSFIEDLLFNKVTLADAGFIKQYGDCLGDIAARDLICVQKFNGLTVLPPLLTDEMIAQYTSALLAGTITSGWTFGAGAALQIPFAMQMAYRFNGIGVTQNVLYENQKLIANQFNSAIGKIQDSLSSTASALGKLQDVVNQNAQALNTLVKCLSSNFGAISSVLNDILSRLDKVEAEVQIDRLITGRLQCLQTYVTQQLIRAAEIRASANLAATKMSECVLGQSKRVDFCGKGYHLMSFPQSAPHGVVFLHVTYVPAQEKNFTTAPAICHDGKAHFPREGVFVSNGTHWFVTQRNFYEPQIITTDNTFVSGNCDVVIGIVNNTVYDPLQPELDSGGSGYIPEAPRDGQAYVRKDGEWVLLSTFL

SEQ ID NO: 10354 - protein, 1177 aa, Artificial Sequence
  SARS-CoV-2/Finland/FIN03032020A/2020__EPI_ISL_413602 spike protein (1-1147)(Q965C_S1003C) Foldon construct
MFVFLVLLPLVSSQCVNLTTRTQLPPAYTNSFTRGVYYPDKVFRSSVLHSTQDLFLPFFSNVTWFHAIHVSGTNGTKRFDNPVLPFNDGVYFASTEKSNIIRGWIFGTTLDSKTQSLLIVNNATNVVIKVCEFQFCNDPFLGVYYHKNNKSWMESEFRVYSSANNCTFEYVSQPFLMDLEGKQGNFKNLREFVFKNIDGYFKIYSKHTPINLVRDLPQGFSALEPLVDLPIGINITRFQTLLALHRSYLTPGDSSSGWTAGAAAYYVGYLQPRTFLLKYNENGTITDAVDCALDPLSETKCTLKSFTVEKGIYQTSNFRVQPTESIVRFPNITNLCPFGEVFNATRFASVYAWNRKRISNCVADYSVLYNSASFSTFKCYGVSPTKLNDLCFTNVYADSFVIRGDEVRQIAPGQTGKIADYNYKLPDDFTGCVISWNSNNLDSKVGGNYNYLYRLFRKSNLKPFERDISTEIYQAGSTPCNGVEGFNCYFPLQSYGFQPTNGVGYQPYRVVVLSFELLHAPATVCGPKKSTNLVKNKCVNFNFNGLTGTGVLTESNKKFLPFQQFGRDIADTTDAVRDPQTLEILDITPCSFGGVSVITPGTNTSNQVAVLYQGVNCTEVPVAIHADQLTPTWRVYSTGSNVFQTRAGCLIGAEHVNNSYECDIPIGAGICASYQTQTNSPRRARSVASQSIIAYTMSLGAENSVAYSNNSIAIPTNFTISVTTEILPVSMTKTSVDCTMYICGDSTECSNLLLQYGSFCTQLNRALTGIAVEQDKNTQEVFAQVKQIYKTPPIKDFGGFNFSQILPDPSKPSKRSFIEDLLFNKVTLADAGFIKQYGDCLGDIAARDLICAQKFNGLTVLPPLLTDEMIAQYTSALLAGTITSGWTFGAGAALQIPFAMQMAYRFNGIGVTQNVLYENQKLIANQFNSAIGKIQDSLSSTASALGKLQDVVNQNAQALNTLVKCLSSNFGAISSVLNDILSRLDKVEAEVQIDRLITGRLQCLQTYVTQQLIRAAEIRASANLAATKMSECVLGQSKRVDFCGKGYHLMSFPQSAPHGVVFLHVTYVPAQEKNFTTAPAICHDGKAHFPREGVFVSNGTHWFVTQRNFYEPQIITTDNTFVSGNCDVVIGIVNNTVYDPLQPELDSGGSGYIPEAPRDGQAYVRKDGEWVLLSTFL

SEQ ID NO: 10355 - protein, 1177 aa, Artificial Sequence
  SARS-CoV-2/France/GE1977/2020__EPI_ISL_414632 spike protein (1-1147)(Q965C_S1003C) Foldon construct
MFVFLVLLPLVSSQCVNLTTRTQLPPAYTNSFTRGVYYPDKVFRSSVLHSTQDLFLPFFSNVTWFHAIHVSGTNGTKRFDNPVLPFNDGVYFASTEKSNIIRGWIFGTTLDSKTQSLLIVNNATNVVIKVCEFQFCNDPFLGVYYHKNNKSWMESEFRVYSSANNCTFEYVSQPFLMDLEGKQGNFKNLREFVFKNIDGYFKIYSKHTPINLVRDLPQGFSALEPLVDLPIGINITRFQTLLALHRSYLTPGDSSSGWTAGAAAYYVGYLQPRTFLLKYNENGTITDAVDCALDPLSETKCTLKSFTVEKGIYQTSNFRVQPTESIVRFPNITNLCPFGEVFNATRFASVYAWNRKRISNCVADYSVLYNSASFSTFKCYGVSPTKLNDLCFTNVYADSFVIRGDEVRQIAPGQTGKIADYNYKLPDDFTGCVIAWNSNNLDSKVGGNYNYLYRLFRKSNLKPFERDISTEIYQAGSTPCNGVEGFNCYFPLQSYGFQPTNGVGYQPYRVVVLSFELLHAPATVCGPKKSTNLVKNKCVNFNFNGLTGTGVLTESNKKFLPFQQFGRDIADTTDAVRDPQTLEILDITPCSFGGVSVITPGTNTSNQVAVLYQGVNCTEVPVAIHADQLTPTWRVYSTGSNVFQTRAGCLIGAEHVNNSYECDIPIGAGICASYQTQTNSPRRARSVASQSIIAYTMSLGAENSVAYSNNSIAIPTNFTISVTTEILPVSMTKTSVDCTMYICGDSTECSNLLLQYGSFCTQLNRALTGIAVEQDKNTQEVFAQVKQIYKTPPIKDFGGFNFSQILPDPSKPSKRSFIEDLLFNKVTLADAGFIKQYGDCLGDIAARDLICAQKFNGLTVLPPLLTDEMIAQYTSALLAGTITSGWTFGAGAALQIPFAMQMAYRFNGIGVTQNVLYENQKLIANQFNSAIGKIQDSLFSTASALGKLQDVVNQNAQALNTLVKCLSSNFGAISSVLNDILSRLDKVEAEVQIDRLITGRLQCLQTYVTQQLIRAAEIRASANLAATKMSECVLGQSKRVDFCGKGYHLMSFPQSAPHGVVFLHVTYVPAQEKNFTTAPAICHDGKAHFPREGVFVSNGTHWFVTQRNFYEPQIITTDNTFVSGNCDVVIGIVNNTVYDPLQPELDSGGSGYIPEAPRDGQAYVRKDGEWVLLSTFL

SEQ ID NO: 10356 - protein, 1177 aa, Artificial Sequence
  SARS-CoV-2/Finland/FIN-313/2020__EPI_ISL_414641 spike protein (1-1147)(Q965C_S1003C) Foldon construct
MFVFLVLLPLVSSQCVNLTTRTQLPPAYTNSFTRGVYYPDKVFRSSVLHSTQDLFLPFFSNVTWFHAIHVSGTNGTKRFDNPVLPFNDGVYFASTEKSNIIRGWIFGTTLDSKTQSLLIVNNATNVVIKVCEFQFCNDPFLGVYYHKNNKSWMESEFRVYSSANNCTFEYVSQPFLMDLEGKQGNFKNLREFVFKNIDGYFKIYSKHTPINLVRDLPQGFSALEPLVDLPIGINITRFKTLLALHRSYLTPGDSSSGWTAGAAAYYVGYLQPRTFLLKYNENGTITDAVDCALDPLSETKCTLKSFTVEKGIYQTSNFRVQPTESIVRFPNITNLCPFGEVFNATRFASVYAWNRKRISNCVADYSVLYNSASFSTFKCYGVSPTKLNDLCFTNVYADSFVIRGDEVRQIAPGQTGKIADYNYKLPDDFTGCVIAWNSNNLDSKVGGNYNYLYRLFRKSNLKPFERDISTEIYQAGSTPCNGVEGFNCYFPLQSYGFQPTNGVGYQPYRVVVLSFELLHAPATVCGPKKSTNLVKNKCVNFNFNGLTGTGVLTESNKKFLPFQQFGRDIADTTDAVRDPQTLEILDITPCSFGGVSVITPGTNTSNQVAVLYQGVNCTEVPVAIHADQLTPTWRVYSTGSNVFQTRAGCLIGAEHVNNSYECDIPIGAGICASYQTQTNSPRRARSVASQSIIAYTMSLGAENSVAYSNNSIAIPTNFTISVTTEILPVSMTKTSVDCTMYICGDSTECSNLLLQYGSFCTQLNRALTGIAVEQDKNTQEVFAQVKQIYKTPPIKDFGGFNFSQILPDPSKPSKRSFIEDLLFNKVTLADAGFIKQYGDCLGDIAARDLICAQKFNGLTVLPPLLTDEMIAQYTSALLAGTITSGWTFGAGAALQIPFAMQMAYRFNGIGVTQNVLYENQKLIANQFNSAIGKIQDSLSSTASALGKLQDVVNQNAQALNTLVKCLSSNFGAISSVLNDILSRLDKVEAEVQIDRLITGRLQCLQTYVTQQLIRAAEIRASANLAATKMSECVLGQSKRVDFCGKGYHLMSFPQSAPHGVVFLHVTYVPAQEKNFTTAPAICHDGKAHFPREGVFVSNGTHWFVTQRNFYEPQIITTDNTFVSGNCDVVIGIVNNTVYDPLQPELDSGGSGYIPEAPRDGQAYVRKDGEWVLLSTFL

SEQ ID NO: 10357 - protein, 1177 aa, Artificial Sequence
  SARS-CoV-2/Netherlands/ZuidHolland_2/2020__EPI_ISL_414556 spike protein (1-1147)(Q965C_S1003C) Foldon construct
MFVFLVLLPLVSSQCVNLTTRTQLPPAYTNSFTRGVYYPDKVFRSSVLHSTQDLFLPFFSNVTWFHAIHVSGTNGTKRFDNPVLPFNDGVYFASTEKSNIIRGWIFGTTLDSKTQSLLIVNNATNVVIKVCEFQFCNDPFLGVYYHKNNKSWMESEFRVYSSANNCTFEYVSQPFLMDLEGKQGNFKNLREFVFKNIDGYFKIYSKHTPINLVRDLPQGFSALEPLVDLPIGINITRFQTLLALHRSYLTPGDSSSGWTAGAAAYYVGYLQPRTFLLKYNENGTITDAVDCALDPLSETKCTLKSFTVEKGIYQTSNFRVQPTESIVRFPNITNLCPFGEVFNATRFASVYAWNRKRISNCVADYSVLYNSASFSTFKCYGVSPTKLNDLCFTNVYADSFVIRGDEVRQIAPGQTGKIADYNYKLPDDFTGCVIAWNSNNLDSKVGGNYNYLYRLFRKSNLKPFERDISTEIYQAGSTPCNGVEGFNCYFPLQSYGFQPTNGVGYQPYRVVVLSFELLHAPATVCGPKKSTNLVKNKCVNFNFNGLTGTGVLTESNKKFLPFQQFGRDIADTTDAVRDPQTLEILDITPCSFGGVSVITPGTNTSNQVAVLYQGVNCTEVPVAIHADQLTPTWRVYSTGSNVFQTRAGCLIGAEHVNNSYECDIPIGAGICASYQTQTNSPRRARSVASQSIIAYTMSLGAENSVAYSNNSIAIPTNFTISVTTEILPVSMTKTSVDCTMYICGDSTECSNLLLQYGSFCTQLNRALTGIALEQDKNTQEVFAQVKQIYKTPPIKDFGGFNFSQILPDPSKPSKRSFIEDLLFNKVTLADAGFIKQYGDCLGDIAARDLICAQKFNGLTVLPPLLTDEMIAQYTSALLAGTITSGWTFGAGAALQIPFAMQMAYRFNGIGVTQNVLYENQKLIANQFNSAIGKIQDSLSSTASALGKLQDVVNQNAQALNTLVKCLSSNFGAISSVLNDILSRLDKVEAEVQIDRLITGRLQCLQTYVTQQLIRAAEIRASANLAATKMSECVLGQSKRVDFCGKGYHLMSFPQSAPHGVVFLHVTYVPAQEKNFTTAPAICHDGKAHFPREGVFVSNGTHWFVTQRNFYEPQIITTDNTFVSGNCDVVIGIVNNTVYDPLQPELDSGGSGYIPEAPRDGQAYVRKDGEWVLLSTFL

SEQ ID NO: 10358 - protein, 1177 aa, Artificial Sequence
  SARS-CoV-2/USA/WA-UW31/2020__EPI_ISL_414618 spike protein (1-1147)(Q965C_S1003C) Foldon construct
MFVFLVLLPLVSSQCVNLTTRTQLPPAYTNSFTRGVYYPDKVFRSSVLHSTQDLFLPFFSNVTWFHAIHVSGTNGTKRFDNPVLPFNDGVYFASTEKSNIIRGWIFGTTLDSKTQSLLIVNNATNVVIKVCEFQFCNDPFLGVYYHKNNKSWMESEFRVYSSANNCTFEYVSQPFLMDLEGKQGNFKNLREFVFKNIDGYFKIYSKHTPINLVRDLPQGFSALEPLVDLPIGINITRFQTLLALHRSYLTPGDSSSGWTAGAAAYYVGYLQPRTFLLKYNENGTITDAVDCALDPLSETKCTLKSFTVEKGIYQTSNFRVQPTESIVRFPNITNLCPFGEVFNATRFASVYAWNRKRISNCVADYSVLYNSASFSTFKCYGVSPTKLNDLCFTNVYADSFVIRGDEVRQIAPGQTGKIADYNYKLPDDFTGCVIAWNSNNLDSKVGGNYNYLYRLFRKSNLKPFERDISTEIYQAGSTPCNGAEGFNCYFPLQSYGFQPTNGVGYQPYRVVVLSFELLHAPATVCGPKKSTNLVKNKCVNFNFNGLTGTGVLTESNKKFLPFQQFGRDIADTTDAVRDPQTLEILDITPCSFGGVSVITPGTNTSNQVAVLYQDVNCTEVPVAIHADQLTPTWRVYSTGSNVFQTRAGCLIGAEHVNNSYECDIPIGAGICASYQTQTNSPRRARSVASQSIIAYTMSLGAENSVAYSNNSIAIPTNFTISVTTEILPVSMTKTSVDCTMYICGDSTECSNLLLQYGSFCTQLNRALTGIAVEQDKNTQEVFAQVKQIYKTPPIKDFGGFNFSQILPDPSKPSKRSFIEDLLFNKVTLADAGFIKQYGDCLGDIAARDLICAQKFNGLTVLPPLLTDEMIAQYTSALLAGTITSGWTFGAGAALQIPFAMQMAYRFNGIGVTQNVLYENQKLIANQFNSAIGKIQDSLSSTASALGKLQDVVNQNAQALNTLVKCLSSNFGAISSVLNDILSRLDKVEAEVQIDRLITGRLQCLQTYVTQQLIRAAEIRASANLAATKMSECVLGQSKRVDFCGKGYHLMSFPQSAPHGVVFLHVTYVPAQEKNFTTAPAICHDGKAHFPREGVFVSNGTHWFVTQRNFYEPQIITTDNTFVSGNCDVVIGIVNNTVYDPLQPELDSGGSGYIPEAPRDGQAYVRKDGEWVLLSTFL

SEQ ID NO: 10359 - protein, 1177 aa, Artificial Sequence
  SARS-CoV-2/South Korea/SNU01/2020__EPI_ISL_411929 spike protein (1-1147)(Q965C_S1003C) Foldon construct
MFVFLVLLPLVSSQCVNLTTRTQLPPAYTNSFTRGVYYPDKVFRSSVLHSTQDLFLPFFSNVTWFHAIHVSGTNGTKRFDNPVLPFNDGVYFASTEKSNIIRGWIFGTTLDSKTQSLLIVNNATNVVIKVCEFQFCNDPFLGVYYHKNNKSWMESEFRVYSSANNCTFEYVSQPFLMDLEGKQGNFKNLREFVFKNIDGYFKIYSKHTPINLVRDLPQGFWALEPLVDLPIGINITRFQTLLALHRSYLTPGDSSSGWTAGAAAYYVGYLQPRTFLLKYNENGTITDAVDCALDPLSETKCTLKSFTVEKGIYQTSNFRVQPTESIVRFPNITNLCPFGEVFNATRFASVYAWNRKRISNCVADYSVLYNSASFSTFKCYGVSPTKLNDLCFTNVYADSFVIRGDEVRQIAPGQTGKIADYNYKLPDDFTGCVIAWNSNNLDSKVGGNYNYLYRLFRKSNLKPFERDISTEIYQAGSTPCNGVEGFNCYFPLQSYGFQPTNGVGYQPYRVVVLSFELLHAPATVCGPKKSTNLVKNKCVNFNFNGLTGTGVLTESNKKFLPFQQFGRDIADTTDAVRDPQTLEILDITPCSFGGVSVITPGTNTSNQVAVLYQDVNCTEVPVAIHADQLTPTWRVYSTGSNVFQTRAGCLIGAEHVNNSYECDIPIGAGICASYQTQTNSPRRARSVASQSIIAYTMSLGAENSVAYSNNSIAIPTNFTISVTTEILPVSMTKTSVDCTMYICGDSTECSNLLLQYGSFCTQLNRALTGIAVEQDKNTQEVFAQVKQIYKTPPIKDFGGFNFSQILPDPSKPSKRSFIEDLLFNKVTLADAGFIKQYGDCLGDIAARDLICAQKFNGLTVLPPLLTDEMIAQYTSALLAGTITSGWTFGAGAALQIPFAMQMAYRFNGIGVTQNVLYENQKLIANQFNSAIGKIQDSLSSTASALGKLQDVVNQNAQALNTLVKCLSSNFGAISSVLNDILSRLDKVEAEVQIDRLITGRLQCLQTYVTQQLIRAAEIRASANLAATKMSECVLGQSKRVDFCGKGYHLMSFPQSAPHGVVFLHVTYVPAQEKNFTTAPAICHDGKAHFPREGVFVSNGTHWFVTQRNFYEPQIITTDNTFVSGNCDVVIGIVNNTVYDPLQPELDSGGSGYIPEAPRDGQAYVRKDGEWVLLSTFL

SEQ ID NO: 10360 - protein, 1177 aa, Artificial Sequence
  SARS-CoV-2/China/WF0004/2020__EPI_ISL_413694 spike protein (1-1147)(Q965C_S1003C) Foldon construct
MFVFLVLLPLVSSQCVNLTTRTQLPPAYTNSFTRGVYYPDKVFRSSVLHSTQDLFLPFFSNVTWFHAIHVSGTNGTKRFDNPVLPFNDGVYFASTEKSNIIRGWIFGTTLDSKTQSLLIVNNATNVVIKVCEFQFCNDPFLGVYYHKNNKSWTESEFRVYSSANNCTFEYVSQPFLMDLEGKQGNFKNLREFVFKNIDGYFKIYSKHTPINLVRDLPQGFSALEPLVDLPIGINITRFQTLLALHRSYLTPGDSSSGWTAGAAAYYVGYLQPRTFLLKYNENGTITDAVDCALDPLSETKCTLKSFTVEKGIYQTSNFRVQPTESIVRFPNITNLCPFGEVFNATRFASVYAWNRKRISNCVADYSVLYNSASFSTFKCYGVSPTKLNDLCFTNVYADSFVIRGDEVRQIAPGQTGKIADYNYKLPDDFTGCVIAWNSNNLDSKVGGNYNYLYRLFRKSNLKPFERDISTEIYQAGSTPCNGVEGFNCYFPLQSYGFQPTNGVGYQPYRVVVLSFELLHAPATVCGPKKSTNLVKNKCVNFNFNGLTGTGVLTESNKKFLPFQQFGRDIADTTDAVRDPQTLEILDITPCSFGGVSVITPGTNTSNQVAVLYQDVNCTEVPVAIHADQLTPTWRVYSTGSNVFQTRAGCLIGAEHVNNSYECDIPIGAGICASYQTQTNSPRRARSVASQSIIAYTMSLGAENSVAYSNNSIAIPTNFTISVTTEILPVSMTKTSVDCTMYICGDSTECSNLLLQYGSFCTQLNRALTGIAVEQDKNTQEVFAQVKQIYKTPPIKDFGGFNFSQILPDPSKPSKRSFIEDLLFNKVTLADAGFIKQYGDCLGDIAARDLICAQKFNGLTVLPPLLTDEMIAQYTSALLAGTITSGWTFGAGAALQIPFAMQMAYRFNGIGVTQNVLYENQKLIANQFNSAIGKIQDSLSSTASALGKLQDVVNQNAQALNTLVKCLSSNFGAISSVLNDILSRLDKVEAEVQIDRLITGRLQCLQTYVTQQLIRAAEIRASANLAATKMSECVLGQSKRFDFCGKGYHLMSFPQSAPHGVVFLHVTYVPAQEKNFTTAPAICHDGKAHFPREGVFVSNGTHWFVTQRNFYEPQIITTDNTFVSGNCDVVIGIVNNTVYDPLQPELDSGGSGYIPEAPRDGQAYVRKDGEWVLLSTFL

SEQ ID NO: 10361 - protein, 1177 aa, Artificial Sequence
  SARS-CoV-2/China/WF0028/2020__EPI_ISL_413791 spike protein (1-1147)(Q965C_S1003C) Foldon construct
MFVFLVLLPLVSSQCVNLTTRTQLPPAYTNSFTRGVYYPDKVFRSSVLHSTQDLFLPFFSNVTWFHAIHVSGTNGTKRFDNPVLPFNDGVYFASTEKSNIIRGWIFGTTLDSKTQSLLIVNNATNVVIKVCEFQFCNDPFLGVYYHKNNKSWMESEFRVYSSANNCTFEYVSQPFLMDLEGKQGNFKNLREFVFKNIDGYFKIYSKHTPINLVRDLPQGFSALEPLVDLPIGINITRFQTLLALHRSYLTPGDSSSGWTAGAAAYYVGYLQPRTFLLKYNENGTITDAVDCALDPLSETKCTLKSFTVEKGIYQTSNFRVQPTESIVRFPNITNLCPFGEVFNATRFASVYAWNRKRISNCVADYSVLYNSASFSTFKCYGVSPTKLNDLCFTNVYADSFVIRGDEVRQIAPGQTGKIADYNYKLPDDFTGCVIAWNSNNLDSKVGGNYNYLYRLFRKSNLKPFERDISTEIYQAGSTPCNGVEGFNCYFPLQSYGFQPTNGVGYQPYRVVVLSFELLHAPATVCGPKKSTNLVKNKCVNFNFNGLTGTGVLTESNKKFLPFQQFGRDIADTTDAVRDPQTLEILDITPCSFGGVSVITPGTNTSNQVAVLYQDVNCTEVPVAIHADQLTPTWRVYSTGSNVFQTRAGCLIGAEHVNNSYECDIPIGAGICASYQTQTNSPRRARSVASQSIIAYTMSLGAENSVAYSNNSIAIPTNFTISVTTEILPVSMTKTSVDCTMYICGDSTECSNLLLQYGSFCTQLNRALTGIAVEQDKNTQEVFAQVKQIYKTPPIKDFGGFNFSQILPDPSKPSKRSFIEDLLFNKVTLADAGFIKQYGDCLGDIAARDLICAQKFNGLTVLPPLLTDEMIAQYTSALLAGTITSGWTFGAGAALQIPFAMQMAYRFNGIGVTQNVLYENQKLIANQFNSAIGKIQDSLSSTASALGKLQDVVNQNAQALNTLVKCLSSNFGAISSVLNDILSRLDKVEAEVQIDRLITGRLQCLQTYVTQQLIRAAEIRASANLAATKMSECVLGQSKRVDFCGKGYHLMSFPQSAPHGVVFLHVTYVPAQEKNFTTAPAICHDGKAHFPREGVFVSNGTHWFVTQRNFYEPQIITTDNTFVSGNCDVVIGIVNNTVYDPLQPELESGGSGYIPEAPRDGQAYVRKDGEWVLLSTFL

SEQ ID NO: 10362 - protein, 1177 aa, Artificial Sequence
  SARS-CoV-2/2019-nCoV/USA-CruiseA-18/2020__MT159716.1 spike protein (1-1147)(Q965C_S1003C) Foldon construct
MFVFLVLLPLVSSQCVNLTTRTQLPPAYTNSFTRGVYYPDKVFRSSVLHSTQDLFLPFFSNVTWFHAIHVSGTNGTKRFDNPVLPFNDGVYFASTEKSNIIRGWIFGTTLDSKTQSLLIVNNATNVVIKVCEFQFCNDPFLGVYYHKNNKSWMESELRVYSSANNCTFEYVSQPFLMDLEGKQGNFKNLREFVFKNIDGYFKIYSKHTPINLVRDLPQGFSALEPLVDLPIGINITRFQTLLALHRSYLTPGDSSSGWTAGAAAYYVGYLQPRTFLLKYNENGTITDAVDCALDPLSETKCTLKSFTVEKGIYQTSNFRVQPTESIVRFPNITNLCPFGEVFNATRFASVYAWNRKRISNCVADYSVLYNSASFSTFKCYGVSPTKLNDLCFTNVYADSFVIRGDEVRQIAPGQTGKIADYNYKLPDDFTGCVIAWNSNNLDSKVGGNYNYLYRLFRKSNLKPFERDISTEIYQAGSTPCNGVEGFNCYFPLQSYGFQPTNGVGYQPYRVVVLSFELLHAPATVCGPKKSTNLVKNKCVNFNFNGLTGTGVLTESNKKFLPFQQFGRDIADTTDAVRDPQTLEILDITPCSFGGVSVITPGTNTSNQVAVLYQDVNCTEVPVAIHADQLTPTWRVYSTGSNVFQTRAGCLIGAEHVNNSYECDIPIGAGICASYQTQTNSPRRARSVASQSIIAYTMSLGAENSVAYSNNSIAIPTNFTISVTTEILPVSMTKTSVDCTMYICGDSTECSNLLLQYGSFCTQLNRALTGIAVEQDKNTQEVFAQVKQIYKTPPIKDFGGFNFSQILPDPSKPSKRSFIEDLLFNKVTLADAGFIKQYGDCLGDIAARDLICAQKFNGLTVLPPLLTDEMIAQYTSALLAGTITSGWTFGAGAALQIPFAMQMAYRFNGIGVTQNVLYENQKLIANQFNSAIGKIQDSLSSTASALGKLQDVVNQNAQALNTLVKCLSSNFGAISSVLNDILSRLDKVEAEVQIDRLITGRLQCLQTYVTQQLIRAAEIRASANLAATKMSECVLGQSKRVDFCGKGYHLMSFPQSAPHGVVFLHVTYVPAQEKNFTTAPAICHDGKAHFPREGVFVSNGTHWFVTQRNFYEPQIITTDNTFVSGNCDVVIGIVNNTVYDPLQPELDSGGSGYIPEAPRDGQAYVRKDGEWVLLSTFL

SEQ ID NO: 10363 - protein, 1177 aa, Artificial Sequence
  SARS-CoV-2/SARS-CoV-2/Yunnan-01/human/2020/CHN__MT049951.1 spike protein (1-1147)(Q965C_S1003C) Foldon construct
MFVFLVLLPLVSSQCVNLTTRTQLPPANTNSFTRGVYYPDKVFRSSVLHSTQDLFLPFFSNVTWFHAIHVSGTNGTKRFDNPVLPFNDGVYFASTEKSNIIRGWIFGTTLDSKTQSLLIVNNATNVVIKVCEFQFCNDPFLGVYYHKNNKSWMESEFRVYSSANNCTFEYVSQPFLMDLEGKQGNFKNLREFVFKNIDGYFKIYSKHTPINLVRDLPQGFSALEPLVDLPIGINITRFQTLLALHRSYLTPGDSSSGWTAGAAAYYVGYLQPRTFLLKYNENGTITDAVDCALDPLSETKCTLKSFTVEKGIYQTSNFRVQPTESIVRFPNITNLCPFGEVFNATRFASVYAWNRKRISNCVADYSVLYNSASFSTFKCYGVSPTKLNDLCFTNVYADSFVIRGDEVRQIAPGQTGKIADYNYKLPDDFTGCVIAWNSNNLDSKVGGNYNYLYRLFRKSNLKPFERDISTEIYQAGSTPCNGVEGFNCYFPLQSYGFQPTNGVGYQPYRVVVLSFELLHAPATVCGPKKSTNLVKNKCVNFNFNGLTGTGVLTESNKKFLPFQQFGRDIADTTDAVRDPQTLEILDITPCSFGGVSVITPGTNTSNQVAVLYQDVNCTEVPVAIHADQLTPTWRVYSTGSNVFQTRAGCLIGAEHVNNSYECDIPIGAGICASYQTQTNSPRRARSVASQSIIAYTMSLGAENSVAYSNNSIAIPTNFTISVTTEILPVSMTKTSVDCTMYICGDSTECSNLLLQYGSFCTQLNRALTGIAVEQDKNTQEVFAQVKQIYKTPPIKDFGGFNFSQILPDPSKPSKRSFIEDLLFNKVTLADAGFIKQYGDCLGDIAARDLICAQKFNGLTVLPPLLTDEMIAQYTSALLAGTITSGWTFGAGAALQIPFAMQMAYRFNGIGVTQNVLYENQKLIANQFNSAIGKIQDSLSSTASALGKLQDVVNQNAQALNTLVKCLSSNFGAISSVLNDILSRLDKVEAEVQIDRLITGRLQCLQTYVTQQLIRAAEIRASANLAATKMSECVLGQSKRVDFCGKGYHLMSFPQSAPHGVVFLHVTYVPAQEKNFTTAPAICHDGKAHFPREGVFVSNGTHWFVTQRNFYEPQIITTDNTFVSGNCDVVIGIVNNTVYDPLQPELDSGGSGYIPEAPRDGQAYVRKDGEWVLLSTFL

SEQ ID NO: 10364 - protein, 1177 aa, Artificial Sequence
  SARS-CoV-2/USA/WA-UW292/2020__EPI_ISL_418077 spike protein (1-1147)(Q965C_S1003C) Foldon construct
MFVFLVLLPLVSSQCVNLTTRTQLPPAYTNSFTRGVYYPDKVFRSSVLHSTQDLFLPFFSNVTWFHAIHVSGTNGTKRFDNPVLPFNDGVYFASTEKSNIIRGWIFGTTLDSKTQSLLIVNNATNVVIKVCEFQFCNDPFLGVYYHKNNKSWMESEFRVYSSANNCTFEYVSQPFLMDLEGKQGNFKNLREFVFKNIDGYFKIYSKHTPINLVRDLPQGFSALEPLVDLPIGINITRFQTLLALHRSYLTPGDSSSGWTAGAAAYYVGYLQPRTFLLKYNENGTITDAVDCALDPLSETKCTLKSFTVEKGIYQTSNFRVQPTESIVRFPNITNLCPFGEVFNATRFASVYAWNRKRISNCVADYSVLYNSASFSTFKCYGVSPTKLNDLCFTNVYADSFVIRGDEVRQIAPGQTGKIADYNYKLPDDFTGCVIAWNSNNLDSKVGGNYNYLYRLFRKSNLKPFERDISTEIYQASSTPCNGVEGFNCYFPLQSYGFQPTNGVGYQPYRVVVLSFELLHAPATVCGPKKSTNLVKNKCVNFNFNGLTGTGVLTESNKKFLPFQQFGRDIADTTDAVRDPQTLEILDITPCSFGGVSVITPGTNTSNQVAVLYQDVNCTEVPVAIHADQLTPTWRVYSTGSNVFQTRAGCLIGAEHVNNSYECDIPIGAGICASYQTQTNSPRRARSVASQSIIAYTMSLGAENSVAYSNNSIAIPTNFTISVTTEILPVSMTKTSVDCTMYICGDSTECSNLLLQYGSFCTQLNRALTGIAVEQDKNTQEVFAQVKQIYKTPPIKDFGGFNFSQILPDPSKPSKRSFIEDLLFNKVTLADAGFIKQYGDCLGDIAARDLICAQKFNGLTVLPPLLTDEMIAQYTSALLAGTITSGWTFGAGAALQIPFAMQMAYRFNGIGVTQNVLYENQKLIANQFNSAIGKIQDSLSSTASALGKLQDVVNQNAQALNTLVKCLSSNFGAISSVLNDILSRLDKVEAEVQIDRLITGRLQCLQTYVTQQLIRAAEIRASANLAATKMSECVLGQSKRVDFCGKGYHLMSFPQSAPHGVVFLHVTYVPAQEKNFTTAPAICHDGKAHFPREGVFVSNGTHWFVTQRNFYEPQIITTDNTFVSGNCDVVIGIVNNTVYDPLQPELDSGGSGYIPEAPRDGQAYVRKDGEWVLLSTFL

SEQ ID NO: 10365 - protein, 1177 aa, Artificial Sequence
  SARS-CoV-2/Iceland/192/2020__EPI_ISL_417819 spike protein (1-1147)(Q965C_S1003C) Foldon construct
MFVFFVLLPLVSSQCVNLTTRTQLPPAYTNSFTRGVYYPDKVFRSSVLHSTQDLFLPFFSNVTWFHAIHVSGTNGTKRFDNPVLPFNDGVYFASTEKSNIIRGWIFGTTLDSKTQSLLIVNNATNVVIKVCEFQFCNDPFLGVYYHKNNKSWMESEFRVYSSANNCTFEYVSQPFLMDLEGKQGNFKNLREFVFKNIDGYFKIYSKHTPINLVRDLPQGFSALEPLVDLPIGINITRFQTLLALHRSYLTPGDSSSGWTAGAAAYYVGYLQPRTFLLKYNENGTITDAVDCALDPLSETKCTLKSFTVEKGIYQTSNFRVQPTESIVRFPNITNLCPFGEVFNATRFASVYAWNRKRISNCVADYSVLYNSASFSTFKCYGVSPTKLNDLCFTNVYADSFVIRGDEVRQIAPGQTGKIADYNYKLPDDFTGCVIAWNSNNLDSKVGGNYNYLYRLFRKSNLKPFERDISTEIYQAGSTPCNGVEGFNCYFPLQSYGFQPTNGVGYQPYRVVVLSFELLHAPATVCGPKKSTNLVKNKCVNFNFNGLTGTGVLTESNKKFLPFQQFGRDIADTTDAVRDPQTLEILDITPCSFGGVSVITPGTNTSNQVAVLYQGVNCTEVPVAIHADQLTPTWRVYSTGSNVFQTRAGCLIGAEHVNNSYECDIPIGAGICASYQTQTNSPRRARSVASQSIIAYTMSLGAENSVAYSNNSIAIPTNFTISVTTEILPVSMTKTSVDCTMYICGDSTECSNLLLQYGSFCTQLNRALTGIAVEQDKNTQEVFAQVKQIYKTPPIKDFGGFNFSQILPDPSKPSKRSFIEDLLFNKVTLADAGFIKQYGDCLGDIAARDLICAQKFNGLTVLPPLLTDEMIAQYTSALLAGTITSGWTFGAGAALQIPFAMQMAYRFNGIGVTQNVLYENQKLIANQFNSAIGKIQDSLSSTASALGKLQDVVNQNAQALNTLVKCLSSNFGAISSVLNDILSRLDKVEAEVQIDRLITGRLQCLQTYVTQQLIRAAEIRASANLAATKMSECVLGQSKRVDFCGKGYHLMSFPQSAPHGVVFLHVTYVPAQEKNFTTAPAICHDGKAHFPREGVFVSNGTHWFVTQRNFYEPQIITTDNTFVSGNCDVVIGIVNNTVYDPLQPELDSGGSGYIPEAPRDGQAYVRKDGEWVLLSTFL

SEQ ID NO: 10366 - protein, 1177 aa, Artificial Sequence
  SARS-CoV-2/Belgium/ULG-6939/2020__EPI_ISL_417020 spike protein (1-1147)(Q965C_S1003C) Foldon construct
MFVFLVLLPLVSSQCVNLTTRTQLPPAYTNSFTRGVYYPDKVFRSSVLHSTQDLFLPFFSNVTWFHAIHVSGTNGTKRFDNPVLPFNDGVYFASTEKSNIIRGWIFGTTLDSKTQSLLIVNNATNVVIKVCEFQFCNDPFLGVYYHKNNKSWMESEFRVYSSANNCTFEYVSQPFLMDLEGKQGNFKNLREFVFKNIDGYFKIYSKHTPINLVRDLPQGFSALEPLVDLPIGINITRFQTLLALHRSYLTPGDSSSGWTAGAAAYYVGYLQPRTFLLKYNENGTITDAVDCALDPLSETKCTLKSFTVEKGIYQTSNFRVQPTESIVRFPNITNLCPFGEVFNATRFASVYAWNRKRISNCVADYSVLYNSASFSTFKCYGVSPTKLNDLCFTNVYADSFVIRGDEVRQIAPGQTGKIADYNYKLPDDFTGCVIAWNSNNLDSKVGGNYNYLYRLFRKSNLKPFERDISTEIYQAGSTPCNGVEGFNCYFPLQSYGFQPTNGVGYQPYRVVVLSFELLHAPATVCGPKKSTNLVKNKCVNFNFNGLTGTGVLTESNKKFLPFQQFGRDIADTTDAVRDPQTLEILDITPCSFGGVSVITPGTNTSNQVAVLYQGVNCTEVPVAIHADQLTPTWRVYSTGSNVFQTRAGCLIGAEHVNNSYECDIPIGAGICASYQTQTNSPRRARSVASQSIIAYTMSLGAENSVVYSNNSIAIPTNFTISVTTEILPVSMTKTSVDCTMYICGDSTECSNLLLQYGSFCTQLNRALTGIAVEQDKNTQEVFAQVKQIYKTPPIKDFGGFNFSQILPDPSKPSKRSFIEDLLFNKVTLADAGFIKQYGDCLGDIAARDLICAQKFNGLTVLPPLLTDEMIAQYTSALLAGTITSGWTFGAGAALQIPFAMQMAYRFNGIGVTQNVLYENQKLIANQFNSAIGKIQDSLSSTASALGKLQDVVNQNAQALNTLVKCLSSNFGAISSVLNDILSRLDKVEAEVQIDRLITGRLQCLQTYVTQQLIRAAEIRASANLAATKMSECVLGQSKRVDFCGKGYHLMSFPQSAPHGVVFLHVTYVPAQEKNFTTAPAICHDGKAHFPREGVFVSNGTHWFVTQRNFYEPQIITTDNTFVSGNCDVVIGIVNNTVYDPLQPELDSGGSGYIPEAPRDGQAYVRKDGEWVLLSTFL

SEQ ID NO: 10367 - protein, 1177 aa, Artificial Sequence
  SARS-CoV-2/France/HF2496/2020__EPI_ISL_418231 spike protein (1-1147)(Q965C_S1003C) Foldon construct
MFVFLVLLPLVSSQCVNLTTRTQLPPAYTNSFTRGVYYPDKVFRSSVLHSTQDLFLPFFSNVTWFHAIHVSGTNGTKRFDNPVLPFNDGVYFASTEKSNIIRGWIFGTTLDSKTQSLLIVNNATNVVIKVCEFQFCNDPFLGVYYHKNNKSWMESEFRVYSSANNCTFEYVSQPFLMDLEGKQGNFKNLREFVFKNIDGYFKIYSKHTPINLVRDLPQGFSALEPLVDLPIGINITRFQTLLALHRSYLTPGDSSSGWTAGAAAYYVGYLQPRTFLLKYNENGTITDAVDCALDPLSETKCTLKSFTVEKGIYQTSNFRVQPTESIVRFPNITNLCPFGEVFNATRFASVYAWNRKRISNCVADYSVLYNSASFSTFKCYGVSPTKLNDLCFTNVYADSFVIRGDEVRQIAPGQTGKIADYNYKLPDDFTGCVIAWNSNNLDSKVGGNYNYLYRLFRKSNLKPFERDISTEIYQAGSTPCNGVEGFNCYFPLQSYGFQPTNGVGYQPYRVVVLSFELLHAPATVCGPKKSTNLVKNKCVNFNFNGLTGTGVLTESNKKFLPFQQFGRDIADTTDAVRDPQTLEILDITPCSFGGVSVITPGTNTSNQVAVLYQGVNCTEVPVAIHADQLTPTWRVYSTGSNVFQTRAGCLIGAEHVNNSYECDIPIGAGICASYQTQTNSPRRARSVASQSIIAYTMSLGAENSVAYSNNSIAIPTNFTISVTTEILPVSMTKTSVDCTMYICGDSTECSNLLLQYGSFCTQLNRALTGIAVEQDKNTQEVFAQVKQIYKTPPIKDFGGFNFSQILPDPSKPSKRSFIEDLLFNKVTLADAGFIKQYGDCLGDIVARDLICAQKFNGLTVLPPLLTDEMIAQYTSALLAGTITSGWTFGAGAALQIPFAMQMAYRFNGIGVTQNVLYENQKLIANQFNSAIGKIQDSLSSTASALGKLQDVVNQNAQALNTLVKCLSSNFGAISSVLNDILSRLDKVEAEVQIDRLITGRLQCLQTYVTQQLIRAAEIRASANLAATKMSECVLGQSKRVDFCGKGYHLMSFPQSAPHGVVFLHVTYVPAQEKNFTTAPAICHDGKAHFPREGVFVSNGTHWFVTQRNFYEPQIITTDNTFVSGNCDVVIGIVNNTVYDPLQPELDSGGSGYIPEAPRDGQAYVRKDGEWVLLSTFL

SEQ ID NO: 10368 - protein, 1177 aa, Artificial Sequence
  SARS-CoV-2/USA/WA-UW291/2020__EPI_ISL_418076 spike protein (1-1147)(Q965C_S1003C) Foldon construct
MFVFLVLLPLVSSQCVNLTTRTQLPPAYTNSFTRGVYYPDKVFRSSVLHSTQDLFLPFFSNVTWFHAIHVSGTNGTKRFDNPVLPFNDGVYFASTEKSNIIRGWIFGTTLDSKTQSLLIVNNATNVVIKVCEFQFCNDPFLGVYYHKNNKSWMESEFRVYSSANNCTFEYVSQPFLMDLEGKQGNFKNLREFVFKNIDGYFKIYSKHTPINLVRDLPQGFSALEPLVDLPIGINITRFQTLLALHRSYLTPGDSSSGWTAGAAAYYVGYLQPRTFLLKYNENGTITDAVDCALDPLSETKCTLKSFTVEKGIYQTSNFRVQPTESIVRFPNITNLCPFGEVFNATRFASVYAWNRKRISNCVADYSVLYNSASFSTFKCYGVSPTKLNDLCFTNVYADSFVIRGDEVRQIAPGQTGKIADYNYKLPDDFTGCVIAWNSNNLDSKVGGNYNYLYRLFRKSNLKPFERDISTEIYQAGSTPCNGVEGFNCYFPLQSYGFQPTNGVGYQPYRVVVLSFELLHAPATVCGPKKSTNLVKNKCVNFNFNGLTGTGVLTESNKKFLPFQQFGRDIADTTDAVRDPQTLEILDITPCSFGGVSVITPGTNTSNQVAVLYQGVNCTEVPVAIHADQLTPTWRVYSTGSNVFQTRAGCLIGAEHVNNSYECDIPIGAGICASYQTQTNSPRRARSVASQSIIAYTMSLGAENSVAYSNNSIAIPTNFTISVTTEILPVSMTKTSVDCTMYICGDSTECSNLLLQYGSFCTQLNRALTGIAVEQDKNTQEVFAQVKQIYKTPPIKDFGGFNFSQILPDPSKPSKRSFIEDLLFNKVTLADAGFIKQYGDCLGDIAARDLICAQKFNGLTVLPPLLTDEMIAQYTSALLAGTITSGWTFGAGAALQIPFAMQMAYRFNGIGVTQNVLYENQKLIANQFNSAIGKIQYSLSSTASALGKLQDVVNQNAQALNTLVKCLSSNFGAISSVLNDILSRLDKVEAEVQIDRLITGRLQCLQTYVTQQLIRAAEIRASANLAATKMSECVLGQSKRVDFCGKGYHLMSFPQSAPHGVVFLHVTYVPAQEKNFTTAPAICHDGKAHFPREGVFVSNGTHWFVTQRNFYEPQIITTDNTFVSGNCDVVIGIVNNTVYDPLQPELDSGGSGYIPEAPRDGQAYVRKDGEWVLLSTFL

SEQ ID NO: 10369 - protein, 1177 aa, Artificial Sequence; identical to SEQ ID NO: 10332
  SARS-CoV-2/Portugal/PT0034/2020__EPI_ISL_418019 spike protein (1-1147)(Q965C_S1003C) Foldon construct

SEQ ID NO: 10370 - protein, 1177 aa, Artificial Sequence; identical to SEQ ID NO: 10324
  SARS-CoV-2/Iceland/202/2020__EPI_ISL_417750 spike protein (1-1147)(Q965C_S1003C) Foldon construct

SEQ ID NO: 10371 - protein, 1177 aa, Artificial Sequence
  SARS-CoV-2/USA/WA-UW261/2020__EPI_ISL_418046 spike protein (1-1147)(Q965C_S1003C) Foldon construct
MFVFLVLLPLVSSQCVNLTTRTQLPPAYTNSFTRGVYYPDKVFRSSVLHSTQDLFLPFFSNVTWFHAIHVSGTNGTKRFDNPVLPFNDGVYFASTEKSNIIRGWIFGTTLDSKTQSLLIVNNATNVVIKVCEFQFCNDPFLGVYYHKNNKSWMESEFRVYSSANNCTFEYVSQPFLMDLEGKQGNFKNLREFVFKNIDGYFKIYSKHTPINLVRDLPQGFSALEPLVDLPIGINITRFQTLLALHRSYLTPGDSSSGWTAGAAAYYVGYLQPRTFLLKYNENGTITDAVDCALDPLSETKCTLKSFTVEKGIYQTSNFRVQPTESIVRFPNITNLCPFGEVFNATRFTSVYAWNRKRISNCVADYSVLYNSASFSTFKCYGVSPTKLNDLCFTNVYADSFVIRGDEVRQIAPGQTGKIADYNYKLPDDFTGCVIAWNSNNLDSKVGGNYNYLYRLFRKSNLKPFERDISTEIYQAGSTPCNGVEGFNCYFPLQSYGFQPTNGVGYQPYRVVVLSFELLHAPATVCGPKKSTNLVKNKCVNFNFNGLTGTGVLTESNKKFLPFQQFGRDIADTTDAVRDPQTLEILDITPCSFGGVSVITPGTNTSNQVAVLYQDVNCTEVPVAIHADQLTPTWRVYSTGSNVFQTRAGCLIGAEHVNNSYECDIPIGAGICASYQTQTNSPRRARSVASQSIIAYTMSLGAENSVAYSNNSIAIPTNFTISVTTEILPVSMTKTSVDCTMYICGDSTECSNLLLQYGSFCTQLNRALTGIAVEQDKNTQEVFAQVKQIYKTPPIKDFGGFNFSQILPDPSKPSKRSFIEDLLFNKVTLADAGFIKQYGDCLGDIAARDLICAQKFNGLTVLPPLLTDEMIAQYTSALLAGTITSGWTFGAGAALQIPFAMQMAYRFNGIGVTQNVLYENQKLIANQFNSAIGKIQDSLSSTASALGKLQDVVNQNAQALNTLVKCLSSNFGAISSVLNDILSRLDKVEAEVQIDRLITGRLQCLQTYVTQQLIRAAEIRASANLAATKMSECVLGQSKRVDFCGKGYHLMSFPQSAPHGVVFLHVTYVPAQEKNFTTAPAICHDGKAHFPREGVFVSNGTHWFVTQRNFYEPQIITTDNTFVSGNCDVVIGIVNNTVYDPLQPELDSGGSGYIPEAPRDGQAYVRKDGEWVLLSTFL

SEQ ID NO: 10372 - protein, 1177 aa, Artificial Sequence
  SARS-CoV-2/Portugal/PT0035/2020__EPI_ISL_418020 spike protein (1-1147)(Q965C_S1003C) Foldon construct
MFVFLVLLPLVSSQCVNLTTRTQLPPAYTNSFTRGVYYPDKVFRSSVLHSTQDLFLPFFSNVTWFHAIHVSGTNGTKRFDNPVLPFNDGVYFASTEKSNIIRGWIFGTTLDSKTQSLLIVNNATNVVIKVCEFQFCNDPFLGVYYHKNNKSWMESEFRVYSSANNCTFEYVSQPFLMDLEGKQGNFKNLREFVFKNIDGYFKIYSKHTPINLVRDLPQGFSALEPLVDLPIGINITRFQTLLALHRSYLTPGDSSSGWTAGAAAYYVGYLQPRTFLLKYNENGTITDAVDCALDPLSETKCTLKSFTVEKGIYQTSNFRVQPTESIVRFPNITNLCPFGEVFNATRFASVYAWNRKRISNCVADYSVLYNSASFSTFKCYGVSPTKLNDLCFTNVYADSFVIRGDEVRQIAPGQTGKIADYNYKLPDDFTGCVIAWNSNNLDSKVGGNYNYLYRLFRKSNLKPFERDISTEIYQAGSTPCNGVEGFNCYFPLQSYGFQPTNGVGYQPYRVVVLSFELLHAPATVCGPKKSTNLVKNKCVNFNFNGLTGTGVLTESNKKFLPFQQFGRDIADTTDAVRDPQTLEILDITPCSFGGVSVITPGTNTSNQVAVLYQDVNCTEVPVAIHADQLTPTWRVYSTGSNVFQTRAGCLIGAEHVNNSYECDIPIGAGICASYQTQTNSPRRARSVASQSIIAYTMSLGAENSVAYSNNSIAIPTNFTISVTTEILPVSMTKTSVDCTMYICGDSTECSNLLLQYGSFCTQLNRALTGIAVEQDKNTQEVFAQVKQIYKTPPIKDFGGFNFSQILPDPSKPSKRSFIEDLLFNKVTLADAGFIKQYGDCLGDISARDLICAQKFNGLTVLPPLLTDEMIAQYTSALLAGTITSGWTFGAGAALQIPFAMQMAYRFNGIGVTQNVLYENQKLIANQFNSAIGKIQDSLSSTASALGKLQDVVNQNAQALNTLVKCLSSNFGAISSVLNDILSRLDKVEAEVQIDRLITGRLQCLQTYVTQQLIRAAEIRASANLAATKMSECVLGQSKRVDFCGKGYHLMSFPQSAPHGVVFLHVTYVPAQEKNFTTAPAICHDGKAHFPREGVFVSNGTHWFVTQRNFYEPQIITTDNTFVSGNCDVVIGIVNNTVYDPLQPELDSGGSGYIPEAPRDGQAYVRKDGEWVLLSTFL

SEQ ID NO: 10373 - protein, 1177 aa, Artificial Sequence
  SARS-CoV-2/USA/NY-NYUMC7/2020__EPI_ISL_418192 spike protein (1-1147)(Q965C_S1003C) Foldon construct
MFVFLVLLPLVSSQCVNLTTRTQLPPAYTNSFTRGVYYPDKVFRSSVLHSTQDLFLPFFSNVTWFHAIHVSGTNGTKRFDNPVLPFNDGVYFASTEKSNIIRGWIFGTTLDSKTQSLLIVNNATNVVIKVCEFQFCNDPFLGVYHHKNNKSWMESEFRVYSSANNCTFEYVSQPFLMDLEGKQGNFKNLREFVFKNIDGYFKIYSKHTPINLVRDLPQGFSALEPLVDLPIGINITRFQTLLALHRSYLTPGDSSSGWTAGAAAYYVGYLQPRTFLLKYNENGTITDAVDCALDPLSETKCTLKSFTVEKGIYQTSNFRVQPTESIVRFPNITNLCPFGEVFNATRFASVYAWNRKRISNCVADYSVLYNSASFSTFKCYGVSPTKLNDLCFTNVYADSFVIRGDEVRQIAPGQTGKIADYNYKLPDDFTGCVIAWNSNNLDSKVGGNYNYLYRLFRKSNLKPFERDISTEIYQAGSTPCNGVEGFNCYFPLQSYGFQPTNGVGYQPYRVVVLSFELLHAPATVCGPKKSTNLVKNKCVNFNFNGLTGTGVLTESNKKFLPFQQFGRDIADTTDAVRDPQTLEILDITPCSFGGVSVITPGTNTSNQVAVLYQGVNCTEVPVAIHADQLTPTWRVYSTGSNVFQTRAGCLIGAEHVNNSYECDIPIGAGICASYQTQTNSPRRARSVASQSIIAYTMSLGAENSVAYSNNSIAIPTNFTISVTTEILPVSMTKTSVDCTMYICGDSTECSNLLLQYGSFCTQLNRALTGIAVEQDKNTQEVFAQVKQIYKTPPIKDFGGFNFSQILPDPSKPSKRSFIEDLLFNKVTLADAGFIKQYGDCLGDIAARDLICAQKFNGLTVLPPLLTDEMIAQYTSALLAGTITSGWTFGAGAALQIPFAMQMAYRFNGIGVTQNVLYENQKLIANQFNSAIGKIQDSLSSTASALGKLQDVVNQNAQALNTLVKCLSSNFGAISSVLNDILSRLDKVEAEVQIDRLITGRLQCLQTYVTQQLIRAAEIRASANLAATKMSECVLGQSKRVDFCGKGYHLMSFPQSAPHGVVFLHVTYVPAQEKNFTTAPAICHDGKAHFPREGVFVSNGTHWFVTQRNFYEPQIITTDNTFVSGNCDVVIGIVNNTVYDPLQPELDSGGSGYIPEAPRDGQAYVRKDGEWVLLSTFL

SEQ ID NO: 10374 - protein, 1177 aa, Artificial Sequence
  SARS-CoV-2/Iceland/189/2020__EPI_ISL_417709 spike protein (1-1147)(Q965C_S1003C) Foldon construct
MFVFLVLLPLVSSQCVNLTTRTQLPPAYTNSFTRGVYYPDKVFRSSVLHSTQDLFLPFFSNVTWFHAIHVSGTNGTKRFDNPVLPFNDGVYFASTEKSNIIRGWIFGTTLDSKTQSLLIVNNATNVVIKVCEFQFCNDPFLGVYYHKNNKSWMESEFRVYSSANNCTFEYVSQPFLMDLEGKQGNFKNLREFVFKNIDGYFKIYSKHTPINLVRDLPQGFSALEPLVDLPIGINITRFQTLLALHRSYLTPGDSSSGWTAGAAAYYVGYLQPRTFLLKYNENGTITDAVDCALDPLSETKCTLKSFTVEKGIYQTSNFRVQPTESIVRFPNITNLCPFGEVFNATRFASVYAWNRKRISNCVADYSVLYNSASFSTFKCYGVSPTKLNDLCFTNVYADSFVIRGDEVRQIAPGQTGKIADYNYKLPDDFTGCVIAWNSNNLDSKVGGNYNYLYRLFRKSNLKPFERDISTEIYQAGSTPCNGVEGFNCYFPLQSYGFQPTNGVGYQPYRVVVLSFELLHAPATVCGPKKSTNLVKNKCVNFNFNGLTGTGVLTESNKKFLPFQQFGRDIADTTDAVRDPQTLEILDITPCSFGGVSVITPGTNTSNQVAVLYQGVNCTEVPVAIHADQLTPTWRVYSTGSNVFQTRAGCLIGAEHVNNSYECDIPIGAGICASYQTQTNSPRRARSVASQSIIAYTMSLGAENSVAYSNNSIAIPTNFTISVTTEILPVSMTKTSVDCTMYICGDSTECSNLLLQYGSFCTQLNRALTGIAVEQDKNTQEVFAQVKQIYKTPPIKDFGGFNFSQILPDPSKPSKRSFIEDLLFNKVTLADAGFTKQYGDCLGDIAARDLICAQKFNGLTVLPPLLTDEMIAQYTSALLAGTITSGWTFGAGAALQIPFAMQMAYRFNGIGVTQNVLYENQKLIANQFNSAIGKIQDSLSSTASALGKLQDVVNQNAQALNTLVKCLSSNFGAISSVLNDILSRLDKVEAEVQIDRLITGRLQCLQTYVTQQLIRAAEIRASANLAATKMSECVLGQSKRVDFCGKGYHLMSFPQSAPHGVVFLHVTYVPAQEKNFTTAPAICHDGKAHFPREGVFVSNGTHWFVTQRNFYEPQIITTDNTFVSGNCDVVIGIVNNTVYDPLQPELDSGGSGYIPEAPRDGQAYVRKDGEWVLLSTFL

SEQ ID NO: 10375 - protein, 1177 aa, Artificial Sequence
  SARS-CoV-2/Australia/NSW56/2020__EPI_ISL_417408 spike protein (1-1147)(Q965C_S1003C) Foldon construct
MFVFLVLLPLVSSQCVNLTTRTQLPPAYTNSFTRGVYYPDKVFRSSVLHSTQDLFLPFFSNVTWFHAIHVSGTNGTKRFDNPVLPFNDGVYFASTEKSNIIRGWIFGTTLDSKTQSLLIVNNATNVVIKVCEFQFCNDPFLGVYYHKNNKSWMESEFRVYSSANNCTFEYVSQPFLMDLEGKQGNFKNLREFVFKNIDGYFKIYSKHTPINLVRDLPQGFSALEPLVDLPIGINITRFQTLLALHRSYLTPGDSSSGWTAGAAAYYVGYLQPRTFLLKYNENGTITDAVDCALDPLSETKCTLKSFTVEKGIYQTSNFRVQPTESIVRFPNITNLCPFGEVFNATRFASVYAWNRKRISNCVADYSVLYNSASFSTFKCYGVSPTKLNDLCFTNVYADSFVIRGDEVRQIAPGQTGKIADYNYKLPDDFTGCVIAWNSNNLDSKVGGNYNYLYRLFRKSNLKPFERDISTEIYQAGSTPCNGVEGFNCYFPLQSYGFQPTNGVGYQPYRVVVLSFELLHAPATVCGPKKSTNLVKNKCVNFNFNGLTGTGVLTESNKKFLPFQQFGRDIADTTDAVRDPQTLEILDITPCSFGGVSVITPGTNTSNQVAVLYQDVNCTEVPVAIHADQLTPTWRVYSTGSNVFQTRAGCLIGAEHVNNSYECDIPIGAGICASYQTQTNSPRRARSVASQSIIAYTMSLGAENSVAYSNNSIAIPTNFTISVTTEILPVSMTKTSVDCTMYICGDSTECSNLLLQYGSFCTQLNRALTGIAVEQDKNTQEVFAQVKQIYKTPPIKDFGGFNFSQILPDSSKPSKRSFIEDLLFNKVTLADAGFIKQYGDCLGDIAARDLICAQKFNGLTVLPPLLTDEMIAQYTSALLAGTITSGWTFGAGAALQIPFAMQMAYRFNGIGVTQNVLYENQKLIANQFNSAIGKIQDSLSSTASALGKLQDVVNQNAQALNTLVKCLSSNFGAISSVLNDILSRLDKVEAEVQIDRLITGRLQCLQTYVTQQLIRAAEIRASANLAATKMSECVLGQSKRVDFCGKGYHLMSFPQSAPHGVVFLHVTYVPAQEKNFTTAPAICHDGKAHFPREGVFVSNGTHWFVTQRNFYEPQIITTDNTFVSGNCDVVIGIVNNTVYDPLQPELDSGGSGYIPEAPRDGQAYVRKDGEWVLLSTFL

SEQ ID NO: 10376 - protein, 1177 aa, Artificial Sequence
  SARS-CoV-2/Iceland/280/2020__EPI_ISL_417608 spike protein (1-1147)(Q965C_S1003C) Foldon construct
MFVFLVLLPLVSSQCVNLTTRTQLPPAYTNSFTRGVYYPDKVFRSSVLHSTQDLFLPFFSNVTWFHAIHVSGTNGTKRFDNPVLPFNDGVYFASTEKSNIIRGWIFGTTLDSKTQSLLIVNNATNVVIKVCEFQFCNDPFLGVYYHKNNKSWMESEFRVYSSANNCTFEYVSQPFLMDLEGKQGNFKNLREFVFKNIDGYFKIYSKHTPINLVRDLPQGFSALEPLVDLPIGINITRFQTLLALHRSYLTPGDSSSGWTAGAAAYYVGYLQPRTFLLKYNENGTITDAVDCALDPLSETKCTLKSFTVEKGIYQTSNFRVQPTESIVRFPNITNLCPFGEVFNATRFASVYAWNRKRISNCVADYSVLYNSASFSTFKCYGVSPTKLNDLCFTNVYADSFVIRGDEVRQIAPGQTGKIADYNYKLPDDFTGCVIAWNSNNLDSKVGGNYNYLYRLFRKSNLKPFERDISTEIYQAGSTPCNGVEGFNCYFPLQSYGFQPTNGVGYQPYRVVVLSFELLHAPATVCGPKKSTNLVKNKCVNFNFNGLTGTGVLTESNKKFLPFQQFGRDIADTTDAVRDPQTLEILDITPCSFGGVSVITPGTNTSNQVAVLYQGVNCTEVPVAIHADQLTPTWRVYSTGSNVFQTRAGCLIGAEHVNNSYECDIPIGAGICASYHTQTNSPRRARSVASQSIIAYTMSLGAENSVAYSNNSIAIPTNFTISVTTEILPVSMTKTSVDCTMYICGDSTECSNLLLQYGSFCTQLNRALTGIAVEQDKNTQEVFAQVKQIYKTPPIKDFGGFNFSQILPDPSKPSKRSFIEDLLFNKVTLADAGFIKQYGDCLGDIAARDLICAQKFNGLTVLPPLLTDEMIAQYTSALLAGTITSGWTFGAGAALQIPFAMQMAYRFNGIGVTQNVLYENQKLIANQFNSAIGKIQDSLSSTASALGKLQDVVNQNAQALNTLVKCLSSNFGAISSVLNDILSRLDKVEAEVQIDRLITGRLQCLQTYVTQQLIRAAEIRASANLAATKMSECVLGQSKRVDFCGKGYHLMSFPQSAPHGVVFLHVTYVPAQEKNFTTAPAICHDGKAHFPREGVFVSNGTHWFVTQRNFYEPQIITTDNTFVSGNCDVVIGIVNNTVYDPLQPELDSGGSGYIPEAPRDGQAYVRKDGEWVLLSTFL

SEQ ID NO: 10377 - protein, 1177 aa, Artificial Sequence; identical to SEQ ID NO: 10332
  SARS-CoV-2/Iceland/247/2020__EPI_ISL_417575 spike protein (1-1147)(Q965C_S1003C) Foldon construct

SEQ ID NO: 10378 - protein, 1177 aa, Artificial Sequence
  SARS-CoV-2/Iceland/238/2020__EPI_ISL_417566 spike protein (1-1147)(Q965C_S1003C) Foldon construct
MFVFLVLLPLVSSQCVNLTTRTQLPPAYTNSFTRGVYYPDKVFRSSVLHSTQDLFLPFFSNVTWFHAIHVSGTNGTKRFDNPVLPFNDGVYFASTEKSNIIRGWIFGTTLDSKTQSLLIVNNATNVVIKVCEFQFCNDPFLGVYYHKNNKSWMESEFRVYSSANNCTFEYVSQPFLMDLEGKQGNFKNLREFVFKNIDGYFKIYSKHTPINLVRDLPQGFSALEPLVDLPIGINITRFQTLLALHRSYLTPGDSSSGWTAGAAAYYVGYLQPRTFLLKYNENGTITDAVDCALDPLSETKCTLKSFTVEKGIYQTSNFRVQPTESIVRFPNITNLCPFGEVFNATRFASVYAWNRKRISNCVADYSVLYNSASFSTFKCYGVSPTKLNDLCFTNVYADSFVIRGDEVRQIAPGQTGKIADYNYKLPDDFTGCVIAWNSNNLDSKVGGNYNYLYRLFRKSNLKPFERDISTEIYQAGSTPCNGVEGFNCYFPLQSYGFQPTNGVGYQPYRVVVLSFELLHAPATVCGPKKSTNLVKNKCVNFNFNGLTGTGVLTESNKKFLPFQQFGRDIADTTDAVRDPQTLEILDITPCSFGGVSVITPGTNTSNQVAVLYQGVNCTEVPVAIHADQLTPTWRVYSTGSNVFQTRAGCLIGAEHVNNSYECDIPIGAGICASYQTQTNSPRRARSVASQSIIAYTMSLGAENSVAYSNNSIAIPTNFTISVTTEILPVSMTKTSVDCTMYICGDSTECSNLLLQYGSFCTQLNRALTGIAVEQDKNTQEVFAQVKQIYKTPPIKDFGGFNFSQILPDPSKPSKRSFIEDLLFNKVTLADVGFIKQYGDCLGDIAARDLICAQKFNGLTVLPPLLTDEMIAQYTSALLAGTITSGWTFGAGAALQIPFAMQMAYRFNGIGVTQNVLYENQKLIANQFNSAIGKIQDSLSSTASALGKLQDVVNQNAQALNTLVKCLSSNFGAISSVLNDILSRLDKVEAEVQIDRLITGRLQCLQTYVTQQLIRAAEIRASANLAATKMSECVLGQSKRVDFCGKGYHLMSFPQSAPHGVVFLHVTYVPAQEKNFTTAPAICHDGKAHFPREGVFVSNGTHWFVTQRNFYEPQIITTDNTFVSGNCDVVIGIVNNTVYDPLQPELDSGGSGYIPEAPRDGQAYVRKDGEWVLLSTFL

SEQ ID NO: 10379 - protein, 1177 aa, Artificial Sequence
  SARS-CoV-2/Greece/16/2020__EPI_ISL_418265 spike protein (1-1147)(Q965C_S1003C) Foldon construct
MFVFLVLLPLVSSQCVNLTTRTQLPPAYTNSFTRGVYYPDKVFRSSVLHSTQDLFLPFFSNVTWFHAIHVSGTNGTKRFDNPVLPFNDGVYFASTEKSNIIRGWIFGTTLDSKTQSLLIVNNATNVVIKVCEFQFCNDPFLGVYYHKNNKSWMESEFRVYSSANNCTFEYVSQPFLMDLEGKQGNFKNLREFVFKNVDGYFKIYSKHTPINLVRDLPQGFSALEPLVDLPIGINITRFQTLLALHRSYLTPGDSSSGWTAGAAAYYVGYLQPRTFLLKYNENGTITDAVDCALDPLSETKCTLKSFTVEKGIYQTSNFRVQPTESIVRFPNITNLCPFGEVFNATRFASVYAWNRKRISNCVADYSVLYNSASFSTFKCYGVSPTKLNDLCFTNVYADSFVIRGDEVRQIAPGQTGKIADYNYKLPDDFTGCVIAWNSNNLDSKVGGNYNYLYRLFRKSNLKPFERDISTEIYQAGSTPCNGVEGFNCYFPLQSYGFQPTNGVGYQPYRVVVLSFELLHAPATVCGPKKSTNLVKNKCVNFNFNGLTGTGVLTESNKKFLPFQQFGRDIADTTDAVRDPQTLEILDITPCSFGGVSVITPGTNTSNQVAVLYQDVNCTEVPVAIHADQLTPTWRVYSTGSNVFQTRAGCLIGAEHVNNSYECDIPIGAGICASYQTQTNSPRRARSVASQSIIAYTMSLGAENSVAYSNNSIAIPTNFTISVTTEILPVSMTKTSVDCTMYICGDSTECSNLLLQYGSFCTQLNRALTGIAVEQDKNTQEVFAQVKQIYKTPPIKDFGGFNFSQILPDPSKPSKRSFIEDLLFNKVTLADAGFIKQYGDCLGDIAARDLICAQKFNGLTVLPPLLTDEMIAQYTSALLAGTITSGWTFGAGAALQIPFAMQMAYRFNGIGVTQNVLYENQKLIANQFNSAIGKIQDSLSSTASALGKLQDVVNQNAQALNTLVKCLSSNFGAISSVLNDILSRLDKVEAEVQIDRLITGRLQCLQTYVTQQLIRAAEIRASANLAATKMSECVLGQSKRVDFCGKGYHLMSFPQSAPHGVVFLHVTYVPAQEKNFTTAPAICHDGKAHFPREGVFVSNGTHWFVTQRNFYEPQIITTDNTFVSGNCDVVIGIVNNTVYDPLQPELDSGGSGYIPEAPRDGQAYVRKDGEWVLLSTFL

SEQ ID NO: 10380 - protein, 1177 aa, Artificial Sequence
  SARS-CoV-2/Iceland/319/2020__EPI_ISL_417648 spike protein (1-1147)(Q965C_S1003C) Foldon construct
MFVFLVLLPLVSSQCVNLTTRTQLPPAYTNSFTRGVYYPDKVFRSSVLHSTQDLFLPFFSNVTWFHAIHVSGTNGTKRFDNPVLPFNDGVYFASTEKSNIIRGWIFGTTLDSKTQSLLIVNNATNVVIKVCEFQFCNDPFLGVYYHKNNKSWMESEFRVYSSANNCTFEYVSQPFLIDLEGKQGNFKNLREFVFKNIDGYFKIYSKHTPINLVRDLPQGFSALEPLVDLPIGINITRFQTLLALHRSYLTPGDSSSGWTAGAAAYYVGYLQPRTFLLKYNENGTITDAVDCALDPLSETKCTLKSFTVEKGIYQTSNFRVQPTESIVRFPNITNLCPFGEVFNATRFASVYAWNRKRISNCVADYSVLYNSASFSTFKCYGVSPTKLNDLCFTNVYADSFVIRGDEVRQIAPGQTGKIADYNYKLPDDFTGCVIAWNSNNLDSKVGGNYNYLYRLFRKSNLKPFERDISTEIYQAGSTPCNGVEGFNCYFPLQSYGFQPTNGVGYQPYRVVVLSFELLHAPATVCGPKKSTNLVKNKCVNFNFNGLTGTGVLTESNKKFLPFQQFGRDIADTTDAVRDPQTLEILDITPCSFGGVSVITPGTNTSNQVAVLYQGVNCTEVPVAIHADQLTPTWRVYSTGSNVFQTRAGCLIGAEHVNNSYECDIPIGAGICASYQTQTNSPRRARSVASQSIIAYTMSLGAENSVAYSNNSIAIPTNFTISVTTEILPVSMTKTSVDCTMYICGDSTECSNLLLQYGSFCTQLNRALTGIAVEQDKNTQEVFAQVKQIYKTPPIKDFGGFNFSQILPDPSKPSKRSFIEDLLFNKVTLADAGFIKQYGDCLGDIAARDLICAQKFNGLTVLPPLLTDEMIAQYTSALLAGTITSGWTFGAGAALQIPFAMQMAYRFNGIGVTQNVLYENQKLIANQFNSAIGKIQDSLSSTASALGKLQDVVNQNAQALNTLVKCLSSNFGAISSVLNDILSRLDKVEAEVQIDRLITGRLQCLQTYVTQQLIRAAEIRASANLAATKMSECVLGQSKRVDFCGKGYHLMSFPQSAPHGVVFLHVTYVPAQEKNFTTAPAICHDGKAHFPREGVFVSNGTHWFVTQRNFYEPQIITTDNTFVSGNCDVVIGIVNNTVYDPLQPELDSGGSGYIPEAPRDGQAYVRKDGEWVLLSTFL

SEQ ID NO: 10381 - protein, 1177 aa, Artificial Sequence
  SARS-CoV-2/Congo/94/2020__EPI_ISL_417947 spike protein (1-1147)(Q965C_S1003C) Foldon construct
MFVFLVLLPLVSSQCVNLTTRTQLPPAYTNSFTRGVYYPDKVFRSSVLHSTQDLFLPFFSNVTWFHAIHVSGTNGTKRFDNPVLPFNDGVYFASTEKSNIIRGWIFGTTLDSKTQSLLIVNNATNVVIKVCEFQFCNDPFLGVYYHKNNKSWMESEFRVYSSANNCTFEYVSQPFLMDLEGKQGNFKNLREFVFKNIDGYFKIYSKHTPINLVRDLPQGFSALEPLVDLPIGINITRFQTLLALHRSYLTPGDSSSGWTAGAAAYYVGYLQPRTFLLKYNENGTITDAVDCALDPLSETKCTLKSFTVEKGIYQTSNFRVQPTESIVRFPNITNLCPFGEVFNATRFASVYAWNRKRISNCVADYSVLYNSASFSTFKCYGVSPTKLNDLCFTNVYADSFVIRGDEVRQIAPGQTGKIADYNYKLPDDFTGCVIAWNSNNLDSKVGGNYNYLYRLFRKSNLKPFERDISTEIYQAGSTPCNGVEGFNCYFPLQSYGFQPTNGVGYQPYRVVVLSFELLHAPATVCGPKKSTNLVKNKCVNFNFNGLTGTGVLTESNKKFLPFQQFGRDIADTTDAVRDPQTLEILDITPCSFGGVSVITPGTNTSNQVAVLYQGVNCTEVPVAIHADQLTPTWRVYSTGSNVFQTRAGCLIGAEHVNNSYECDIPIGAGICASYQTQTNSPRRARSVASQSIIAYTMSLGAENSVAYSNNSIAIPTNFTISVTTEILPVSMTKTSVDCTMYICGDSTECSNLLLQYGSFCTQLNRALTGIAVEQDKNTQEVFAQVKQIYKTPPIKDFGGFNFSQILPDPSKPSKRSFIEDILFNKVTLADAGFIKQYGDCLGDIAARDLICAQKFNGLTVLPPLLTDEMIAQYTSALLAGTITSGWTFGAGAALQIPFAMQMAYRFNGIGVTQNVLYENQKLIANQFNSAIGKIQDSLSSTASALGKLQDVVNQNAQALNTLVKCLSSNFGAISSVLNDILSRLDKVEAEVQIDRLITGRLQCLQTYVTQQLIRAAEIRASANLAATKMSECVLGQSKRVDFCGKGYHLMSFPQSAPHGVVFLHVTYVPAQEKNFTTAPAICHDGKAHFPREGVFVSNGTHWFVTQRNFYEPQIITTDNTFVSGNCDVVIGIVNNTVYDPLQPELDSGGSGYIPEAPRDGQAYVRKDGEWVLLSTFL

SEQ ID NO: 10382 - protein, 1177 aa, Artificial Sequence
  SARS-CoV-2/Congo/158/2020__EPI_ISL_417950 spike protein (1-1147)(Q965C_S1003C) Foldon construct
MFVFLVLLPLVSSQCVNLTTRTQLPPAYTNSFTRGVYYPDKVFRSSVLHSTQDLFLPFFSNVTWFHAIHVSGTNGTKRFDNPVLPFNDGVYFASTEKSNIIRGWIFGTTLDSKTQSLLIVNNATNVVIKVCEFQFCNDPFLGVYYHKNNKSWMESEFRVYSSANNCTFEYVSQPFLMDLEGKQGNFKNLREFVFKNIDGYFKIYSKHTPINLVRDLPQGFSALEPLVDLPIGINITRFQTLLALHRSYLTPGDSSSGWTAGAAAYYVGYLQPRTFLLKYNENGTITDAVDCALDPLSETKCTLKSFTVEKGIYQTSNFRVQPTESIVRFPNITNLCPFGEVFNATRFASVYAWNRKRISNCVADYSVLYNSASFSTFKCYGVSPTKLNDLCFTNVYADSFVIRGDEVRQIAPGQTGKIADYNYKLPDDFTGCVIAWNSNNLDSKVGGNYNYLYRLFRKSNLKPFERDISTEIYQAGSTPCNGVEGFNCYFPLQSYGFQPTNGVGYQPYRVVVLSFELLHAPATVCGPKKSTNLVKNKCVNFNFNGLTGTGVLTESNKKFLPFQQFGRDIADTTDAVRDPQTLEILDITPCSFGGVSVITPGTNTSNQVAVLYQDVNCTEVPVAIHADQLTPTWRVYSTGSNVFQTRAGCLIGAEHVNNSYECDIPIGAGICASYQTQTNSPRRARSVASQSIIAYTMSLGAENSVAYSNNSIAIPTNFTISVTTEILPVSMTKTSVDCTMYICGDSTECSNLLLQYGSFCTQLNRALTGIAVEQDKNTQEVFAQVKQIYKTPPIKDFGGFNFSQILPDPSKPSKRSFIEDLLFNKVTLADAGFIKQYGDCLGDIAARDLICAQKFNGLTVLPPLLTDEMIAQYTSALLAGTITSGWTFGAGAALQIPFAMQMAYRFNGIGVTQNVLYENQKLIANQFNSAIGKIQDSLSSTASALGKLQDVVNQNAQALNTLVKCLSSNFGAISSVLNDILSRLDKVEAEVQIDRLITGRLQCLQTYVTQQLIRAAEIRASANLAATKMSECVLGQSKRVDFCGKGYHLMSFPQSAPHGVVFLHVTYVPAQEKNFTTAPAICHDGKAHFPREGVFVSNGTHWFVTQRNFYEPQIITTDNTFLSGNCDVVIGIVNNTVYDPLQPELDSGGSGYIPEAPRDGQAYVRKDGEWVLLSTFL

SEQ ID NO: 10383 - protein, 1177 aa, Artificial Sequence
  SARS-CoV-2/USA/UT-00034/2020__EPI_ISL_417977 spike protein (1-1147)(Q965C_S1003C) Foldon construct
MFVFLVLLPLVSSQCVNLTTRTQLPPAYTNSFTRGVYYPDKVFRSSVLHSTQDLFLPFFSNVTWFHAIHVSGTNGTKRFDNPVLPFNDGVYFASTEKSNIIRGWIFGTTLDSKTQSLLIVNNATNVVIKVCEFQFCNDPFLGVYYYKNNKSWMESEFRVYSSANNCTFEYVSQPFLMDLEGKQGNFKNLREFVFKNIDGYFKIYSKHTPINLVRDLPQGFSALEPLVDLPIGINITRFQTLLALHRSYLTPGDSSSGWTAGAAAYYVGYLQPRTFLLKYNENGTITDAVDCALDPLSETKCTLKSFTVEKGIYQTSNFRVQPTESIVRFPNITNLCPFGEVFNATRFASVYAWNRKRISNCVADYSVLYNSASFSTFKCYGVSPTKLNDLCFTNVYADSFVIRGDEVRQIAPGQTGKIADYNYKLPDDFTGCVIAWNSNNLDSKVGGNYNYLYRLFRKSNLKPFERDISTEIYQAGSTPCNGVEGFNCYFPLQSYGFQPTNGVGYQPYRVVVLSFELLHAPATVCGPKKSTNLVKNKCVNFNFNGLTGTGVLTESNKKFLPFQQFGRDIADTTDAVRDPQTLEILDITPCSFGGVSVITPGTNTSNQVAVLYQGVNCTEVPVAIHADQLTPTWRVYSTGSNVFQTRAGCLIGAEHVNNSYECDIPIGAGICASYQTQTNSPRRARSVASQSIIAYTMSLGAENSVAYSNNSIAIPTNFTISVTTEILPVSMTKTSVDCTMYICGDSTECSNLLLQYGSFCTQLNRALTGIAVEQDKNTQEVFAQVKQIYKTPPIKDFGGFNFSQILPDPSKPSKRSFIEDLLFNKVTLADAGFIKQYGDCLGDIAARDLICAQKFNGLTVLPPLLTDEMIAQYTSALLAGTITSGWTFGAGAALQIPFAMQMAYRFNGIGVTQNVLYENQKLIANQFNSAIGKIQDSLSSTASALGKLQDVVNQNAQALNTLVKCLSSNFGAISSVLNDILSRLDKVEAEVQIDRLITGRLQCLQTYVTQQLIRAAEIRASANLAATKMSECVLGQSKRVDFCGKGYHLMSFPQSAPHGVVFLHVTYVPAQEKNFTTAPAICHDGKAHFPREGVFVSNGTHWFVTQRNFYEPQIITTDNTFVSGNCDVVIGIVNNTVYDPLQPELDSGGSGYIPEAPRDGQAYVRKDGEWVLLSTFL

SEQ ID NO: 10384 - protein, 1177 aa, Artificial Sequence
  SARS-CoV-2/USA/UT-00033/2020__EPI_ISL_417976 spike protein (1-1147)(Q965C_S1003C) Foldon construct
MFVFLVLLPLVSSQCVNLTTRTQLPPAYTNSFTRGVYYPDKVFRSSVLHSTQDLFLPFFSNVTWFHAIHVSGTNGTKRFDNPVLPFNDGVYFASTEKSNIIRGWIFGTTLDSKTQSLLIVNNATNVVIKVCEFQFCNDPFLGVYYHKNNKSWMESEFRVYSSANNCTFEYVSQPFLMDLEGKQGNFKNLREFVFKNIDGYFKIYSKHTPINLVRDLPQGFSALEPLVDLPIGINITRFQTLLALHRSYLTPGDSSSGLTAGAAAYYVGYLQPRTFLLKYNENGTITDAVDCALDPLSETKCTLKSFTVEKGIYQTSNFRVQPTESIVRFPNITNLCPFGEVFNATRFASVYAWNRKRISNCVADYSVLYNSASFSTFKCYGVSPTKLNDLCFTNVYADSFVIRGDEVRQIAPGQTGKIADYNYKLPDDFTGCVIAWNSNNLDSKVGGNYNYLYRLFRKSNLKPFERDISTEIYQAGSTPCNGVEGFNCYFPLQSYGFQPTNGVGYQPYRVVVLSFELLHAPATVCGPKKSTNLVKNKCVNFNFNGLTGTGVLTESNKKFLPFQQFGRDIADTTDAVRDPQTLEILDITPCSFGGVSVITPGTNTSNQVAVLYQGVNCTEVPVAIHADQLTPTWRVYSTGSNVFQTRAGCLIGAEHVNNSYECDIPIGAGICASYQTQTNSPRRARSVASQSIIAYTMSLGAENSVAYSNNSIAIPTNFTISVTTEILPVSMTKTSVDCTMYICGDSTECSNLLLQYGSFCTQLNRALTGIAVEQDKNTQEVFAQVKQIYKTPPIKDFGGFNFSQILPDPSKPSKRSFIEDLLFNKVTLADAGFIKQYGDCLGDIAARDLICAQKFNGLTVLPPLLTDEMIAQYTSALLAGTITSGWTFGAGAALQIPFAMQMAYRFNGIGVTQNVLYENQKLIANQFNSAIGKIQDSLSSTASALGKLQDVVNQNAQALNTLVKCLSSNFGAISSVLNDILSRLDKVEAEVQIDRLITGRLQCLQTYVTQQLIRAAEIRASANLAATKMSECVLGQSKRVDFCGKGYHLMSFPQSAPHGVVFLHVTYVPAQEKNFTTAPAICHDGKAHFPREGVFVSNGTHWFVTQRNFYEPQIITTDNTFVSGNCDVVIGIVNNTVYDPLQPELDSGGSGYIPEAPRDGQAYVRKDGEWVLLSTFL

SEQ ID NO: 10385 - protein, 1177 aa, Artificial Sequence
  SARS-CoV-2/USA/WI-13/2020__EPI_ISL_417516 spike protein (1-1147)(Q965C_S1003C) Foldon construct
MFVFLVLLPLVSSQCVNLTTRTQLPPAYTNSFTRGVYYPDKVFRSSVLHSTQDLFLPFFSNVTWFHAIHVSGTNGTKRFDNPVLPFNDGVYFASTEKSNIIRGWIFGTTLDSKTQSLLIVNNATNVVIKVCEFQFCNDPFLGVYYHKNNKSWMESEFRVYSSANNCTFEYVSQPFLMDLEGKQGNFKNLREFVFKNIDGYFKIYSKHTPINLVRDLPQGFSALEPLVDLPIGINITRFQTLLALHRSYLTPGDSSSGWTAGAAAYYVGYLQPRTFLLKYNENGTITDAVDCALDPLSETKCTLKSFTVEKGIYQTSNFRVLPTESIVRFPNITNLCPFGEVFNATRFASVYAWNRKRISNCVADYSVLYNSASFSTFKCYGVSPTKLNDLCFTNVYADSFVIRGDEVRQIAPGQTGKIADYNYKLPDDFTGCVIAWNSNNLDSKVGGNYNYLYRLFRKSNLKPFERDISTEIYQAGSTPCNGVEGFNCYFPLQSYGFQPTNGVGYQPYRVVVLSFELLHAPATVCGPKKSTNLVKNKCVNFNFNGLTGTGVLTESNKKFLPFQQFGRDIADTTDAVRDPQTLEILDITPCSFGGVSVITPGTNTSNQVAVLYQGVNCTEVPVAIHADQLTPTWRVYSTGSNVFQTRAGCLIGAEHVNNSYECDIPIGAGICASYQTQTNSPRRARSVASQSIIAYTMSLGAENSVAYSNNSIAIPTNFTISVTTEILPVSMTKTSVDCTMYICGDSTECSNLLLQYGSFCTQLNRALTGIAVEQDKNTQEVFAQVKQIYKTPPIKDFGGFNFSQILPDPSKPSKRSFIEDLLFNKVTLADAGFIKQYGDCLGDIAARDLICAQKFNGLTVLPPLLTDEMIAQYTSALLAGTITSGWTFGAGAALQIPFAMQMAYRFNGIGVTQNVLYENQKLIANQFNSAIGKIQDSLSSTASALGKLQDVVNQNAQALNTLVKCLSSNFGAISSVLNDILSRLDKVEAEVQIDRLITGRLQCLQTYVTQQLIRAAEIRASANLAATKMSECVLGQSKRVDFCGKGYHLMSFPQSAPHGVVFLHVTYVPAQEKNFTTAPAICHDGKAHFPREGVFVSNGTHWFVTQRNFYEPQIITTDNTFVSGNCDVVIGIVNNTVYDPLQPELDSGGSGYIPEAPRDGQAYVRKDGEWVLLSTFL

SEQ ID NO: 10386 - protein, 1176 aa, Artificial Sequence
  SARS-CoV-2/India/1-27/2020__EPI_ISL_413522 spike protein (1-1146)(Q964C_S1002C) Foldon construct
MFVFLVLLPLVSSQCVNLTTRTQLPPAYTNSFTRGVYYPDKVFRSSVLHSTQDLFLPFFSNVTWFHAIHVSGTNGTKRFDNPVLPFNDGVYFASTEKSNIIRGWIFGTTLDSKTQSLLIVNNATNVVIKVCEFQFCNDPFLGVYHKNNKSWMESEFRVYSSANNCTFEYVSQPFLMDLEGKQGNFKNLREFVFKNIDGYFKIYSKHTPINLVRDLPQGFSALEPLVDLPIGINITRFQTLLALHRSYLTPGDSSSGWTAGAAAYYVGYLQPRTFLLKYNENGTITDAVDCALDPLSETKCTLKSFTVEKGIYQTSNFRVQPTESIVRFPNITNLCPFGEVFNATRFASVYAWNRKRISNCVADYSVLYNSASFSTFKCYGVSPTKLNDLCFTNVYADSFVIRGDEVIQIAPGQTGKIADYNYKLPDDFTGCVIAWNSNNLDSKVGGNYNYLYRLFRKSNLKPFERDISTEIYQAGSTPCNGVEGFNCYFPLQSYGFQPTNGVGYQPYRVVVLSFELLHAPATVCGPKKSTNLVKNKCVNFNFNGLTGTGVLTESNKKFLPFQQFGRDIADTTDAVRDPQTLEILDITPCSFGGVSVITPGTNTSNQVAVLYQDVNCTEVPVAIHADQLTPTWRVYSTGSNVFQTRAGCLIGAEHVNNSYECDIPIGAGICASYQTQTNSPRRARSVASQSIIAYTMSLGAENSVAYSNNSIAIPTNFTISVTTEILPVSMTKTSVDCTMYICGDSTECSNLLLQYGSFCTQLNRALTGIAVEQDKNTQEVFAQVKQIYKTPPIKDFGGFNFSQILPDPSKPSKRSFIEDLLFNKVTLADAGFIKQYGDCLGDIAARDLICAQKFNGLTVLPPLLTDEMIAQYTSALLAGTITSGWTFGAGAALQIPFAMQMAYRFNGIGVTQNVLYENQKLIANQFNSAIGKIQDSLSSTASALGKLQDVVNQNAQALNTLVKCLSSNFGAISSVLNDILSRLDKVEAEVQIDRLITGRLQCLQTYVTQQLIRAAEIRASANLAATKMSECVLGQSKRVDFCGKGYHLMSFPQSAPHGVVFLHVTYVPAQEKNFTTAPAICHDGKAHFPREGVFVSNGTHWFVTQRNFYEPQIITTDNTFVSGNCDVVIGIVNNTVYDPLQPELDSGGSGYIPEAPRDGQAYVRKDGEWVLLSTFL

SEQ ID NO: 10387 - protein, 1171 aa, Artificial Sequence
  SARS-CoV-2/pangolin/Guangxi/P4L/2017__EPI_ISL_410538 spike protein (1-1141)(Q959C_S997C) Foldon construct
MFVFLFVLPLVSSQCVNLTTRTGIPPGYTNSSTRGVYYPDKVFRSSILHLTQDLFLPFFSNVTWFNTINYQGGFKKFDNPVLPFNDGVYFASTEKSNIIRGWIFGTTLDARTQSLLIVNNATNVVIKVCEFQFCTDPFLGVYYHNNNKTWVENEFRVYSSANNCTFEYISQPFLMDLEGKQGNFKNLREFVFKNVDGYFKIYSKHTPIDLVRDLPRGFAALEPLVDLPIGINITRFQTLLALHRSYLTPGNLESGWTTGAAAYYVGYLQQRTFLLSYNQNGTITDAVDCSLDPLSETKCTLKSLTVEKGIYQTSNFRVQPTISIVRFPNITNLCPFGEVFNASKFASVYAWNRKRISNCVADYSVLYNSTSFSTFKCYGVSPTKLNDLCFTNVYADSFVVKGDEVRQIAPGQTGVIADYNYKLPDDFTGCVIAWNSVKQDALTGGNYGYLYRLFRKSKLKPFERDISTEIYQAGSTPCNGQVGLNCYYPLERYGFHPTTGVNYQPFRVVVLSFELLNGPATVCGPKLSTTLVKDKCVNFNFNGLTGTGVLTTSKKQFLPFQQFGRDISDTTDAVRDPQTLEILDITPCSFGGVSVITPGTNTSNQVAVLYQDVNCTEVPMAIHAEQLTPAWRVYSAGANVFQTRAGCLVGAEHVNNSYECDIPVGAGICASYHSMSSLRSVNQRSIIAYTMSLGAENSVAYSNNSIAIPTNFTISVTTEILPVSMTKTSVDCTMYICGDSIECSNLLLQYGSFCTQLNRALTGIAVEQDKNTQEVFAQVKQIYKTPPIKDFGGFNFSQILPDPSKPSKRSFIEDLLFNKVTLADAGFIKQYGDCLGDIAARDLICAQKFNGLTVLPPLLTDEMIAQYTSALLAGTITSGWTFGAGAALQIPFAMQMAYRFNGIGVTQNVLYENQKLIANQFNSAIGKIQDSLSSTASALGKLQDVVNQNAQALNTLVKCLSSNFGAISSVLNDILSRLDKVEAEVQIDRLITGRLQCLQTYVTQQLIRAAEIRASANLAATKMSECVLGQSKRVDFCGKGYHLMSFPQSAPHGVVFLHVTYVPAQEKNFTTAPAICHEGKAHFPREGVFVSNGTHWFITQRNFYEPQIITTDNTFVSGSCDVVIGIVNNTVYDPLQPELDSGGSGYIPEAPRDGQAYVRKDGEWVLLSTFL

SEQ ID NO: 10388 - protein, 1171 aa, Artificial Sequence
  SARS-CoV-2/pangolin/Guangxi/P5L/2017__EPI_ISL_410540 spike protein (1-1141)(Q959C_S997C) Foldon construct
MFVFLFVLPLVSSQCVNLTTRTGIPPGYTNSSTRGVYYPDKVFRSSILHLTQDLFLPFFSNVTWFNTINYQGGFKKFDNPVLPFNDGVYFASTEKSNIIRGWIFGTTLDARTQSLLIVNNATNVVIKVCEFQFCTDPFLGVYYHNNNKTWVENEFRVYSSANNCTFEYISQPFLMDLEGKQGNFKNLREFVFKNVDGYFKIYSKHTPIDLVRDLPRGFAALEPLVDLPIGINITRFQTLLALHRSYLTPGKLESGWTTGAAAYYVGYLQQRTFLLSYNQNGTITDAVDCSLDPLSETKCTLKSLTVEKGIYQTSNFRVQPTISIVRFPNITNLCPFGEVFNASKFASVYAWNRKRISNCVADYSVLYNSTSFSTFKCYGVSPTKLNDLCFTNVYADSFVVKGDEVRQIAPGQTGVIADYNYKLPDDFTGCVIAWNSVKQDALTGGNYGYLYRLFRKSKLKPFERDISTEIYQAGSTPCNGQVGLNCYYPLERYGFHPTTGVNYQPFRVVVLSFELLNGPATVCGPKLSTTLVKDKCVNFNFNGLTGTGVLTTSKKQFLPFQQFGRDISDTTDAVRDPQTLEILDITPCSFGGVSVITPGTNTSNQVAVLYQDVNCTEVPMAIHAEQLTPAWRVYSAGANVFQTRAGCLVGAEHVNNSYECDIPVGAGICASYHSMSSFRSVNQRSIIAYTMSLGAENSVAYSNNSIAIPTNFTISVTTEILPVSMTKTSVDCTMYICGDSIECSNLLLQYGSFCTQLNRALTGIAVEQDKNTQEVFAQVKQIYKTPPIKDFGGFNFSQILPDPSKPSKRSFIEDLLFNKVTLADAGFIKQYGDCLGDIAARDLICAQKFNGLTVLPPLLTDEMIAQYTSALLAGTITSGWTFGAGAALQIPFAMQMAYRFNGIGVTQNVLYENQKLIANQFNSAIGKIQDSLSSTASALGKLQDVVNQNAQALNTLVKCLSSNFGAISSVLNDILSRLDKVEAEVQIDRLITGRLQCLQTYVTQQLIRAAEIRASANLAATKMSECVLGQSKRVDFCGKGYHLMSFPQSAPHGVVFLHVTYVPAQEKNFTTAPAICHEGKAHFPREGVFVSNGTHWFITQRNFYEPQIITTDNTFVSGSCDVVIGIVNNTVYDPLQPELDSGGSGYIPEAPRDGQAYVRKDGEWVLLSTFL

SEQ ID NO: 10389 - protein, 1171 aa, Artificial Sequence
  SARS-CoV-2/pangolin/Guangxi/P5E/2017__EPI_ISL_410541 spike protein (1-1141)(Q959C_S997C) Foldon construct
MFVFLFVLPLVSSQCVNLTTRTGIPPGYTNSSTRGVYYPDKVFRSSILHLTQDLFLPFFSNVTWFNTITYQGGSKKFDNPVLPFNDGVYFASTEKSNIIRGWIFGTTLDARTQSLLIVNNATNVVIKVCEFQFCTDPFLGVYYHNNNKTWVENEFRVYSSANNCTFEYISQPFLMDLEGKQGNFKNLREFVFKNVDGYFKIYSKHTPIDLVRDLPRGFAALEPLVDLPIGINITRFQTLLALHRSYLTPGKLESGWTTGAAAYYVGYLQQRTFLLSYNQNGTITDAVDCSLDPLSETKCTLKSLTVEKGIYQTSNFRVQPTISIVRFPNITNLCPFGEVFNASKFASVYAWNRKRISNCVADYSVLYNSTSFSTFKCYGVSPTKLNDLCFTNVYADSFVVKGDEVRQIAPGQTGVIADYNYKLPDDFTGCVIAWNSVKQDALTGDNYGYLYRLFRKSKLKPFERDISTEIYQAGSTPCNGQVGLNCYYPLERYGFHPTTGVNYQPFRVVVLSFELLNGPATVCGPKLSTTLVKDKCVNFNFNGLTGTGVLTTSKKQFLPFQQFGRDISDTTDAVRDPQTLEILDITPCSFGGVSVITPGTNTSNQVAVLYQDVNCTEVPMAIHAEQLTPAWRVYSAGANVFQTRAGCLVGAEHVNNSYECDIPVGAGICASYHSMSSFRSVNQRSIIAYTMSLGAENSVAYSNNSIAIPTNFTISVTTEILPVSMTKTSVDCTMYICGDSIECSNLLLQYGSFCTQLNRALTGIAVEQDKNTQEVFAQVKQIYKTPPIKDFGGFNFSQILPDPSKPSKRSFIEDLLFNKVTLADAGFIKQYGDCLGDIAARDLICAQKFNGLTVLPPLLTDEMIAQYTSALLAGTITSGWTFGAGAALQIPFAMQMAYRFNGIGVTQNVLYENQKLIANQFNSAIGKIQDSLSSTASALGKLQDVVNQNAQALNTLVKCLSSNFGAISSVLNDILSRLDKVEAEVQIDRLITGRLQCLQTYVTQQLIRAAEIRASANLAATKMSECVLGQSKRVDFCGKGYHLMSFPQSAPHGVVFLHVTYVPAQEKNFTTAPAICHEGKAHFPREGVFVSNGTHWFITQRNFYEPQIITTDNTFVSGSCDVVIGIVNNTVYDPLQPELDSGGSGYIPEAPRDGQAYVRKDGEWVLLSTFL

SEQ ID NO: 10390 - protein, 1169 aa, Artificial Sequence
  SARS-CoV-2/pangolin/Guangxi/P1E/2017__EPI_ISL_410539 spike protein (1-1139)(Q957C_S995C) Foldon construct
MFVFLFVLPLVSSQCVNLTTRTGIQPGYTNSSTRGVYYPDKVFRSSILHLTQDLFLPFFSNVTWFNTINYQGGFKKFDNPVLPFNDGVYFASTEKSNIIRGWIFGTTLDARTQSLLIVNNATNVVIKVCEFQFCTDPFLGVYYHNNNKTWVENEFRVYSSANNCTFEYISQPFLMDLEGKQGNFKNLREFVFKNVDGYFKIYSKHTPIDLVRDLPRGFAALEPLVDLPIGINITRFQTLLALHRSYLTPGKLESGWTTGAAAYYVGYLQQRTFLLSYNQNGTITDAVDCSLDPLSETKCTLKSLTVEKGIYQTSNFRVQPTISIVRFPNITNLCPFGEVFNASKFASVYAWNRKRISNCVADYSVLYNSTSFSTFKCYGVSPTKLNDLCFTNVYADSFVVKGDEVRQIAPGQTGVIADYNYKLPDDFTGCVIAWNSVKQDALTGGNYLYRLFRKSKLKPFERDISTEIYQAGSTPCNGQVGLNCYYPLERYGFHPTTGVNYQPFRVVVLSFELLNGPATVCGPKLSTTLVKDKCVNFNFNGLTGTGVLTTSKKQFLPFQQFGRDISDTTDAVRDPQTLEILDITPCSFGGVSVITPGTNTSNQVAVLYQDVNCTEVPMAIHAEQLTPAWRVYSAGANVFQTRAGCLVGAEHVNNSYECDIPVGAGICASYHSMSSLRSVNQRSIIAYTMSLGAENSVAYSNNSIAIPTNFTISVTTEILPVSMTKTSVDCTMYICGDSIECSNLLLQYGSFCTQLNRALTGIAVEQDKNTQEVFAQVKQIYKTPPIKDFGGFNFSQILPDPSKPSKRSFIEDLLFNKVTLADAGFIKQYGDCLGDIAARDLICAQKFNGLTVLPPLLTDEMIAQYTSALLAGTITSGWTFGAGAALQIPFAMQMAYRFNGIGVTQNVLYENQKLIANQFNSAIGKIQDSLSSTASALGKLQDVVNQNAQALNTLVKCLSSNFGAISSVLNDILSRLDKVEAEVQIDRLITGRLQCLQTYVTQQLIRAAEIRASANLAATKMSECVLGQSKRVDFCGKGYHLMSFPQSAPHGVVFLHVTYVPAQEKNFTTAPAICHEGKAHFPREGVFVSNGTHWFITQRNFYEPQIITTDNTFVSGSCDVVIGIVNNTVYDPLQPELDSGGSGYIPEAPRDGQAYVRKDGEWVLLSTFL

SEQ ID NO: 10391 - protein, 1177 aa, Artificial Sequence
  SARS-CoV-2/Wuhan/WIV05/2019__EPI_ISL_402128 spike protein (1-1147)(F970C_G999C) Foldon construct
MFVFLVLLPLVSSQCVNLTTRTQLPPAYTNSFTRGVYYPDKVFRSSVLHSTQDLFLPFFSNVTWFHAIHVSGTNGTKRFDNPVLPFNDGVYFASTEKSNIIRGWIFGTTLDSKTQSLLIVNNATNVVIKVCEFQFCNDPFLGVYYHKNNKSWMESEFRVYSSANNCTFEYVSQPFLMDLEGKQGNFKNLREFVFKNIDGYFKIYSKHTPINLVRDLPQGFSALEPLVDLPIGINITRFQTLLALHRSYLTPGDSSSGWTAGAAAYYVGYLQPRTFLLKYNENGTITDAVDCALDPLSETKCTLKSFTVEKGIYQTSNFRVQPTESIVRFPNITNLCPFGEVFNATRFASVYAWNRKRISNCVADYSVLYNSASFSTFKCYGVSPTKLNDLCFTNVYADSFVIRGDEVRQIAPGQTGKIADYNYKLPDDFTGCVIAWNSNNLDSKVGGNYNYLYRLFRKSNLKPFERDISTEIYQAGSTPCNGVEGFNCYFPLQSYGFQPTNGVGYQPYRVVVLSFELLHAPATVCGPKKSTNLVKNKCVNFNFNGLTGTGVLTESNKKFLPFQQFGRDIADTTDAVRDPQTLEILDITPCSFGGVSVITPGTNTSNQVAVLYQDVNCTEVPVAIHADQLTPTWRVYSTGSNVFQTRAGCLIGAEHVNNSYECDIPIGAGICASYQTQTNSPRRARSVASQSIIAYTMSLGAENSVAYSNNSIAIPTNFTISVTTEILPVSMTKTSVDCTMYICGDSTECSNLLLQYGSFCTQLNRALTGIAVEQDKNTQEVFAQVKQIYKTPPIKDFGGFNFSQILPDPSKPSKRSFIEDLLFNKVTLADAGFIKQYGDCLGDIAARDLICAQKFNGLTVLPPLLTDEMIAQYTSALLAGTITSGWTFGAGAALQIPFAMQMAYRFNGIGVTQNVLYENQKLIANQFNSAIGKIQDSLSSTASALGKLQDVVNQNAQALNTLVKQLSSNCGAISSVLNDILSRLDKVEAEVQIDRLITCRLQSLQTYVTQQLIRAAEIRASANLAATKMSECVLGQSKRVDFCGKGYHLMSFPQSAPHGVVFLHVTYVPAQEKNFTTAPAICHDGKAHFPREGVFVSNGTHWFVTQRNFYEPQIITTDNTFVSGNCDVVIGIVNNTVYDPLQPELDSGGSGYIPEAPRDGQAYVRKDGEWVLLSTFL

SEQ ID NO: 10392 - protein, 1173 aa, Artificial Sequence
  SARS-CoV-2/bat/Yunnan/RaTG13/2013__EPI_ISL_402131 spike protein (1-1143)(F966C_G995C) Foldon construct
MFVFLVLLPLVSSQCVNLTTRTQLPPAYTNSSTRGVYYPDKVFRSSVLHLTQDLFLPFFSNVTWFHAIHVSGTNGIKRFDNPVLPFNDGVYFASTEKSNIIRGWIFGTTLDSKTQSLLIVNNATNVVIKVCEFQFCNDPFLGVYYHKNNKSWMESEFRVYSSANNCTFEYVSQPFLMDLEGKQGNFKNLREFVFKNIDGYFKIYSKHTPINLVRDLPPGFSALEPLVDLPIGINITRFQTLLALHRSYLTPGDSSSGWTAGAAAYYVGYLQPRTFLLKYNENGTITDAVDCALDPLSETKCTLKSFTVEKGIYQTSNFRVQPTDSIVRFPNITNLCPFGEVFNATTFASVYAWNRKRISNCVADYSVLYNSTSFSTFKCYGVSPTKLNDLCFTNVYADSFVITGDEVRQIAPGQTGKIADYNYKLPDDFTGCVIAWNSKHIDAKEGGNFNYLYRLFRKANLKPFERDISTEIYQAGSKPCNGQTGLNCYYPLYRYGFYPTDGVGHQPYRVVVLSFELLNAPATVCGPKKSTNLVKNKCVNFNFNGLTGTGVLTESNKKFLPFQQFGRDIADTTDAVRDPQTLEILDITPCSFGGVSVITPGTNASNQVAVLYQDVNCTEVPVAIHADQLTPTWRVYSTGSNVFQTRAGCLIGAEHVNNSYECDIPIGAGICASYQTQTNSRSVASQSIIAYTMSLGAENSVAYSNNSIAIPTNFTISVTTEILPVSMTKTSVDCTMYICGDSTECSNLLLQYGSFCTQLNRALTGIAVEQDKNTQEVFAQVKQIYKTPPIKDFGGFNFSQILPDPSKPSKRSFIEDLLFNKVTLADAGFIKQYGDCLGDIAARDLICAQKFNGLTVLPPLLTDEMIAQYTSALLAGTITSGWTFGAGAALQIPFAMQMAYRFNGIGVTQNVLYENQKLIANQFNSAIGKIQDSLSSTASALGKLQDVVNQNAQALNTLVKQLSSNCGAISSVLNDILSRLDKVEAEVQIDRLITCRLQSLQTYVTQQLIRAAEIRASANLAATKMSECVLGQSKRVDFCGKGYHLMSFPQSAPHGVVFLHVTYVPAQEKNFTTAPAICHDGKAHFPREGVFVSNGTHWFVTQRNFYEPQIITTDNTFVSGSCDVVIGIVNNTVYDPLQPELDSGGSGYIPEAPRDGQAYVRKDGEWVLLSTFL

SEQ ID NO: 10393 - protein, 1177 aa, Artificial Sequence
  SARS-CoV-2/Wuhan/HBCDC-HB-01/2019__EPI_ISL_402132 spike protein (1-1147)(F970C_G999C) Foldon construct
MFVFLVLLPLVSSQCVNLTTRTQLPPAYTNSITRGVYYPDKVFRSSVLHSTQDLFLPFFSNVTWFHAIHVSGTNGTKRFDNPVLPFNDGVYFASTEKSNIIRGWIFGTTLDSKTQSLLIVNNATNVVIKVCEFQFCNDPFLGVYYHKNNKSWMESEFRVYSSANNCTFEYVSQPFLMDLEGKQGNFKNLREFVFKNIDGYFKIYSKHTPINLVRDLPQGFSALEPLVDLPIGINITRFQTLLALHRSYLTPGDSSSGWTAGAAAYYVGYLQPRTFLLKYNENGTITDAVDCALDPLSETKCTLKSFTVEKGIYQTSNFRVQPTESIVRFPNITNLCPFGEVFNATRFASVYAWNRKRISNCVADYSVLYNSASFSTFKCYGVSPTKLNDLCFTNVYADSFVIRGDEVRQIAPGQTGKIADYNYKLPDDFTGCVIAWNSNNLDSKVGGNYNYLYRLFRKSNLKPFERDISTEIYQAGSTPCNGVEGFNCYFPLQSYGFQPTNGVGYQPYRVVVLSFELLHAPATVCGPKKSTNLVKNKCVNFNFNGLTGTGVLTESNKKFLPFQQFGRDIADTTDAVRDPQTLEILDITPCSFGGVSVITPGTNTSNQVAVLYQDVNCTEVPVAIHADQLTPTWRVYSTGSNVFQTRAGCLIGAEHVNNSYECDIPIGAGICASYQTQTNSPRRARSVASQSIIAYTMSLGAENSVAYSNNSIAIPTNFTISVTTEILPVSMTKTSVDCTMYICGDSTECSNLLLQYGSFCTQLNRALTGIAVEQDKNTQEVFAQVKQIYKTPPIKDFGGFNFSQILPDPSKPSKRSFIEDLLFNKVTLADAGFIKQYGDCLGDIAARDLICAQKFNGLTVLPPLLTDEMIAQYTSALLAGTITSGWTFGAGAALQIPFAMQMAYRFNGIGVTQNVLYENQKLIANQFNSAIGKIQDSLSSTASALGKLQDVVNQNAQALNTLVKQLSSNCGAISSVLNDILSRLDKVEAEVQIDRLITCRLQSLQTYVTQQLIRAAEIRASANLAATKMSECVLGQSKRVDFCGKGYHLMSFPQSAPHGVVFLHVTYVPAQEKNFTTAPAICHDGKAHFPREGVFVSNGTHWFVTQRNFYEPQIITTDNTFVSGNCDVVIGIVNNTVYDPLQPELDSGGSGYIPEAPRDGQAYVRKDGEWVLLSTFL

SEQ ID NO: 10394 - protein, 1177 aa, Artificial Sequence
  SARS-CoV-2/Guangdong/20SF028/2020__EPI_ISL_403936 spike protein (1-1147)(F970C_G999C) Foldon construct
MFVFLVLLPLVSSQCVNLTTRTQLPPAYTNSFTRGVYYPDKVFRSSVLYSTQDLFLPFFSNVTWFHAIHVSGTNGTKRFDNPVLPFNDGVYFASTEKSNIIRGWIFGTTLDSKTQSLLIVNNATNVVIKVCEFQFCNDPFLGVYYHKNNKSWMESEFRVYSSANNCTFEYVSQPFLMDLEGKQGNFKNLREFVFKNIDGYFKIYSKHTPINLVRDLPQGFSALEPLVDLPIGINITRFQTLLALHRSYLTPGDSSSGWTAGAAAYYVGYLQPRTFLLKYNENGTITDAVDCALDPLSETKCTLKSFTVEKGIYQTSNFRVQPTESIVRFPNITNLCPFGEVFNATRFASVYAWNRKRISNCVADYSVLYNSASFSTFKCYGVSPTKLNDLCFTNVYADSFVIRGDEVRQIAPGQTGKIADYNYKLPDDFTGCVIAWNSNNLDSKVGGNYNYLYRLFRKSNLKPFERDISTEIYQAGSTPCNGVEGFNCYFPLQSYGFQPTNGVGYQPYRVVVLSFELLHAPATVCGPKKSTNLVKNKCVNFNFNGLTGTGVLTESNKKFLPFQQFGRDIADTTDAVRDPQTLEILDITPCSFGGVSVITPGTNTSNQVAVLYQDVNCTEVPVAIHADQLTPTWRVYSTGSNVFQTRAGCLIGAEHVNNSYECDIPIGAGICASYQTQTNSPRRARSVASQSIIAYTMSLGAENSVAYSNNSIAIPTNFTISVTTEILPVSMTKTSVDCTMYICGDSTECSNLLLQYGSFCTQLNRALTGIAVEQDKNTQEVFAQVKQIYKTPPIKDFGGFNFSQILPDPSKPSKRSFIEDLLFNKVTLADAGFIKQYGDCLGDIAARDLICAQKFNGLTVLPPLLTDEMIAQYTSALLAGTITSGWTFGAGAALQIPFAMQMAYRFNGIGVTQNVLYENQKLIANQFNSAIGKIQDSLSSTASALGKLQDVVNQNAQALNTLVKQLSSNCGAISSVLNDILSRLDKVEAEVQIDRLITCRLQSLQTYVTQQLIRAAEIRASANLAATKMSECVLGQSKRVDFCGKGYHLMSFPQSAPHGVVFLHVTYVPAQEKNFTTAPAICHDGKAHFPREGVFVSNGTHWFVTQRNFYEPQIITTDNTFVSGNCDVVIGIVNNTVYDPLQPELDSGGSGYIPEAPRDGQAYVRKDGEWVLLSTFL

SEQ ID NO: 10395 - protein, 1177 aa, Artificial Sequence
  SARS-CoV-2/Shenzhen/SZTH-001/2020__EPI_ISL_406592 spike protein (1-1147)(F970C_G999C) Foldon construct
MFVFLVLLPLVSSQCVNLTTRTQLPPAYTNSFTRGVYYPDKVFRSSVLHSTQDLFLPFFSNVTWFHAIHVSGTNGTKRFDNPVLPFNDGVYFASTEKSNIIRGWIFGTTLDSKTQSLLIVNNATNVVIKVCEFQFCNDPFLGVYYHKNNKSWMESEFRVYSSANNCTFEYVSQPFLMDLEGKQGNFKNLREFVFKNIDGYFKIYSKHTPINLVRDLPQGFSALEPLVDLPIGINITRFQTLLALHRSYLTPGDSSSGWTAGAAAYYVGYLQPRTFLLKYNENGTITDAVDCALDPLSETKCTLKSFTVEKGIYQTSNFRVQPTESIVRFPNITNLCPFGEVFNATRFASVYAWNRKRISNCVADYSVLYNSASFSTFKCYGVSPTKLNDLCFTNVYADSFVIRGDEVRQIAPGQTGKIADYNYKLPDDFTGCVIAWNSNNLDSKVGGNYNYLYRLFRKSNLKPFERDISTEIYQAGSTPCNGVEGFNCYFPLQSYGFQPTNGVGYQPYRVVVLSFELLHAPATVCGPKKSTNLVKNKCVNFNFNGLTGTGVLTESNKKFLPFQQFGRDIADTTDAVRDPQTLEILDITPCSFGGVSVITPGTNTSNQVAVLYQDVNCTEVPVAIHADQLTPTWRVYSTGSNVFQTRAGCLIGAEHVNNSYECDIPIGAGICASYQTQTNSPRRARSVASQSIIAYTMSLGAENSVAYSNNSIAIPTNFTISVTTEILPVSMTKTSVDCTMYICGDSTECSNLLLQYGSFCTQLNRALTGIAVEQDKNTQEVFAQVKQIYKTPPIKDFGGFNFSQILPDPSKPSKRSFIEDLLFNKVTLADAGFIKQYGDCLGDIAARDLICAQKFNGLTVLPPLLTDEMIAQYTSALLAGTITSGWTFGAGAALQIPFAMQMAYRFNGIGVTQNVLYENQKLIANQFNSAIGKIQDSLSSTASALGKLQDVVNQNAQALNTLVKQLSSNCGAISSVLNDILSRLDKVEAEVQIDRLITCRLQSLQTYVTQQLIRAAEIRASANLAATKMSECVLGQSKRVDFCGKGYHLMSFPQSAPHGVVFLHVTYVPAQEKNFTTAPAICHDGKAHFPREGVFVSNGTHWFVTQRNFYEPQIITTDNTFVSGNCDVLIGIVNNTVYDPLQPELDSGGSGYIPEAPRDGQAYVRKDGEWVLLSTFL

SEQ ID NO: 10396 - protein, 1177 aa, Artificial Sequence
  SARS-CoV-2/Shenzhen/SZTH-004/2020__EPI_ISL_406595 spike protein (1-1147)(F970C_G999C) Foldon construct
MFVFLVLLPLVSSQCVNLTTRTQLPPAYTNSFTRGVYYPDKVFRSSVLHSTQDLFLPFFSNVTWFHAIHVSGTNGTKRFDNPVLPFNDGVYFASTEKSNIIRGWIFGTTLDSKTQSLLIVNNATNVVIKVCEFQFCNDPFLGVYYHKNNKSWMESEFRVYSSANNCTFEYVSQPFLMDLEGKQGNFKNLREFVFKNIDGYFKIYSKHTPINLVRDLPQGFSALEPLVDLPIGINITRFQTLLALHRSYLTPGDSSSGWTAGAAAYYVGYLQPRTFLLKYNENGTITDAVDCALDPLSETKCTLKSFTVEKGIYQTSNFRVQPTESIVRFPNITNLCPFGEVFNATRFASVYAWDRKRISNCVAYYSVLYNSASFSTFKCYGVSPTKLNDLCFTNVYADSFVIRGDEVRQIAPGQTGKIADYNYKLPDDFTGCVIAWNSNNLDSKVGGNYNYLYRLFRKSNLKPFERDISTEIYQAGSTPCNGVEGFNCYFPLQSYGFQPTNGVGYQPYRVVVLSFELLHAPATVCGPKKSTNLVKNKCVNFNFNGLTGTGVLTESNKKFLPFQQFGRDIADTTDAVRDPQTLEILDITPCSFGGVSVITPGTNTSNQVAVLYQDVNCTEVPVAIHADQLTPTWRVYSTGSNVFQTRAGCLIGAEHVNNSYECDIPIGAGICASYQTQTNSPRRARSVASQSIIAYTMSLGAENSVAYSNNSIAIPTNFTISVTTEILPVSMTKTSVDCTMYICGDSTECSNLLLQYGSFCTQLNRALTGIAVEQDKNTQEVFAQVKQIYKTPPIKDFGGFNFSQILPDPSKPSKRSFIEDLLFNKVTLADAGFIKQYGDCLGDIAARDLICAQKFNGLTVLPPLLTDEMIAQYTSALLAGTITSGWTFGAGAALQIPFAMQMAYRFNGIGVTQNVLYENQKLIANQFNSAIGKIQDSLSSTASALGKLQDVVNQNAQALNTLVKQLSSNCGAISSVLNDILSRLDKVEAEVQIDRLITCRLQSLQTYVTQQLIRAAEIRASANLAATKMSECVLGQSKRVDFCGKGYHLMSFPQSAPHGVVFLHVTYVPAQEKNFTTAPAICHDGKAHFPREGVFVSNGTHWFVTQRNFYEPQIITTDNTFVSGNCDVVIGIVNNTVYDPLQPELDSGGSGYIPEAPRDGQAYVRKDGEWVLLSTFL

SEQ ID NO: 10397 - protein, 1177 aa, Artificial Sequence
  SARS-CoV-2/France/IDF0372/2020__EPI_ISL_406596 spike protein (1-1147)(F970C_G999C) Foldon construct
MFVFLVLLPLVSSQCVNLTTRTQLPPAYTNSFTRGVYYPDKVFRSSVLHSTQDLFLPFFSNVTWFHAIHVSGTNGTKRFDNPVLPFNDGVYFASTEKSNIIRGWIFGTTLDSKTQSLLIVNNATNVVIKVCEFQFCNDPFLGVYYHKNNKSWMESEFRVYSSANNCTFEYVSQPFLMDLEGKQGNFKNLREFVFKNIDGYFKIYSKHTPINLVRDLPQGFSALEPLVDLPIGINITRFQTLLALHRSYLTPGDSSSGWTAGAAAYYVGYLQPRTFLLKYNENGTITDAVDCALDPLSETKCTLKSFTVEKGIYQTSNFRVQPTESIVRFPNITNLCPFGEVFNATRFASVYAWNRKRISNCVADYSFLYNSASFSTFKCYGVSPTKLNDLCFTNVYADSFVIRGDEVRQIAPGQTGKIADYNYKLPDDFTGCVIAWNSNNLDSKVGGNYNYLYRLFRKSNLKPFERDISTEIYQAGSTPCNGVEGFNCYFPLQSYGFQPTNGVGYQPYRVVVLSFELLHAPATVCGPKKSTNLVKNKCVNFNFNGLTGTGVLTESNKKFLPFQQFGRDIADTTDAVRDPQTLEILDITPCSFGGVSVITPGTNTSNQVAVLYQDVNCTEVPVAIHADQLTPTWRVYSTGSNVFQTRAGCLIGAEHVNNSYECDIPIGAGICASYQTQTNSPRRARSVASQSIIAYTMSLGAENSVAYSNNSIAIPTNFTISVTTEILPVSMTKTSVDCTMYICGDSTECSNLLLQYGSFCTQLNRALTGIAVEQDKNTQEVFAQVKQIYKTPPIKDFGGFNFSQILPDPSKPSKRSFIEDLLFNKVTLADAGFIKQYGDCLGDIAARDLICAQKFNGLTVLPPLLTDEMIAQYTSALLAGTITSGWTFGAGAALQIPFAMQMAYRFNGIGVTQNVLYENQKLIANQFNSAIGKIQDSLSSTASALGKLQDVVNQNAQALNTLVKQLSSNCGAISSVLNDILSRLDKVEAEVQIDRLITCRLQSLQTYVTQQLIRAAEIRASANLAATKMSECVLGQSKRVDFCGKGYHLMSFPQSAPHGVVFLHVTYVPAQEKNFTTAPAICHDGKAHFPREGVFVSNGTHWFVTQRNFYEPQIITTDNTFVSGNCDVVIGIVNNTVYDPLQPELDSGGSGYIPEAPRDGQAYVRKDGEWVLLSTFL

SEQ ID NO: 10398 - protein, 1177 aa, Artificial Sequence
  SARS-CoV-2/Australia/VIC01/2020__EPI_ISL_406844 spike protein (1-1147)(F970C_G999C) Foldon construct
MFVFLVLLPLVSSQCVNLTTRTQLPPAYTNSFTRGVYYPDKVFRSSVLHSTQDLFLPFFSNVTWFHAIHVSGTNGTKRFDNPVLPFNDGVYFASTEKSNIIRGWIFGTTLDSKTQSLLIVNNATNVVIKVCEFQFCNDPFLGVYYHKNNKSWMESEFRVYSSANNCTFEYVSQPFLMDLEGKQGNFKNLREFVFKNIDGYFKIYSKHTPINLVRDLPQGFSALEPLVDLPIGINITRFQTLLALHRRYLTPGDSSSGWTAGAAAYYVGYLQPRTFLLKYNENGTITDAVDCALDPLSETKCTLKSFTVEKGIYQTSNFRVQPTESIVRFPNITNLCPFGEVFNATRFASVYAWNRKRISNCVADYSVLYNSASFSTFKCYGVSPTKLNDLCFTNVYADSFVIRGDEVRQIAPGQTGKIADYNYKLPDDFTGCVIAWNSNNLDSKVGGNYNYLYRLFRKSNLKPFERDISTEIYQAGSTPCNGVEGFNCYFPLQSYGFQPTNGVGYQPYRVVVLSFELLHAPATVCGPKKSTNLVKNKCVNFNFNGLTGTGVLTESNKKFLPFQQFGRDIADTTDAVRDPQTLEILDITPCSFGGVSVITPGTNTSNQVAVLYQDVNCTEVPVAIHADQLTPTWRVYSTGSNVFQTRAGCLIGAEHVNNSYECDIPIGAGICASYQTQTNSPRRARSVASQSIIAYTMSLGAENSVAYSNNSIAIPTNFTISVTTEILPVSMTKTSVDCTMYICGDSTECSNLLLQYGSFCTQLNRALTGIAVEQDKNTQEVFAQVKQIYKTPPIKDFGGFNFSQILPDPSKPSKRSFIEDLLFNKVTLADAGFIKQYGDCLGDIAARDLICAQKFNGLTVLPPLLTDEMIAQYTSALLAGTITSGWTFGAGAALQIPFAMQMAYRFNGIGVTQNVLYENQKLIANQFNSAIGKIQDSLSSTASALGKLQDVVNQNAQALNTLVKQLSSNCGAISSVLNDILSRLDKVEAEVQIDRLITCRLQSLQTYVTQQLIRAAEIRASANLAATKMSECVLGQSKRVDFCGKGYHLMSFPQSAPHGVVFLHVTYVPAQEKNFTTAPAICHDGKAHFPREGVFVSNGTHWFVTQRNFYEPQIITTDNTFVSGNCDVVIGIVNNTVYDPLQPELDSGGSGYIPEAPRDGQAYVRKDGEWVLLSTFL

SEQ ID NO: 10399 - protein, 1177 aa, Artificial Sequence
  SARS-CoV-2/Germany/BavPat1/2020__EPI_ISL_406862 spike protein (1-1147)(F970C_G999C) Foldon construct
MFVFLVLLPLVSSQCVNLTTRTQLPPAYTNSFTRGVYYPDKVFRSSVLHSTQDLFLPFFSNVTWFHAIHVSGTNGTKRFDNPVLPFNDGVYFASTEKSNIIRGWIFGTTLDSKTQSLLIVNNATNVVIKVCEFQFCNDPFLGVYYHKNNKSWMESEFRVYSSANNCTFEYVSQPFLMDLEGKQGNFKNLREFVFKNIDGYFKIYSKHTPINLVRDLPQGFSALEPLVDLPIGINITRFQTLLALHRSYLTPGDSSSGWTAGAAAYYVGYLQPRTFLLKYNENGTITDAVDCALDPLSETKCTLKSFTVEKGIYQTSNFRVQPTESIVRFPNITNLCPFGEVFNATRFASVYAWNRKRISNCVADYSVLYNSASFSTFKCYGVSPTKLNDLCFTNVYADSFVIRGDEVRQIAPGQTGKIADYNYKLPDDFTGCVIAWNSNNLDSKVGGNYNYLYRLFRKSNLKPFERDISTEIYQAGSTPCNGVEGFNCYFPLQSYGFQPTNGVGYQPYRVVVLSFELLHAPATVCGPKKSTNLVKNKCVNFNFNGLTGTGVLTESNKKFLPFQQFGRDIADTTDAVRDPQTLEILDITPCSFGGVSVITPGTNTSNQVAVLYQGVNCTEVPVAIHADQLTPTWRVYSTGSNVFQTRAGCLIGAEHVNNSYECDIPIGAGICASYQTQTNSPRRARSVASQSIIAYTMSLGAENSVAYSNNSIAIPTNFTISVTTEILPVSMTKTSVDCTMYICGDSTECSNLLLQYGSFCTQLNRALTGIAVEQDKNTQEVFAQVKQIYKTPPIKDFGGFNFSQILPDPSKPSKRSFIEDLLFNKVTLADAGFIKQYGDCLGDIAARDLICAQKFNGLTVLPPLLTDEMIAQYTSALLAGTITSGWTFGAGAALQIPFAMQMAYRFNGIGVTQNVLYENQKLIANQFNSAIGKIQDSLSSTASALGKLQDVVNQNAQALNTLVKQLSSNCGAISSVLNDILSRLDKVEAEVQIDRLITCRLQSLQTYVTQQLIRAAEIRASANLAATKMSECVLGQSKRVDFCGKGYHLMSFPQSAPHGVVFLHVTYVPAQEKNFTTAPAICHDGKAHFPREGVFVSNGTHWFVTQRNFYEPQIITTDNTFVSGNCDVVIGIVNNTVYDPLQPELDSGGSGYIPEAPRDGQAYVRKDGEWVLLSTFL

SEQ ID NO: 10400 - protein, 1177 aa, Artificial Sequence
  SARS-CoV-2/Wuhan/HBCDC-HB-02/2020__EPI_ISL_412978 spike protein (1-1147)(F970C_G999C) Foldon construct
MFVFLVLLPLVSSQCVNLTTRTQLPPAYTNSFTRGVYYPDKVFRSSVLHSTQDLFLPFFSNVTWFHAIHVSGTNGTKRFDNPVLPFNDGVYFASTEKSNIIRGWIFGTTLDSKTQSLLIVNNATNVVIKVCEFQFCNDPFLGVYYHKNNKSWMESEFRVYSSANNCTFEYVSQPFLMDLEGKQGNFKNLREFVFKNIDGYFKIYSKHTPINLVRDLPQGFSALEPLVDLPIGINITRFQTLLALHRSYLTPGDSSSGWTAGAAAYYVGYLQPRTFLLKYNENGTITDAVDCALDPLSETKCTLKSFTVEKGIYQTSNFRVQPTESIVRFPNITNLCPFGEVFNATRFASVYAWNRKRISNCVADYSVLYNSASFSTFKCYGVSPTKLNDLCFTNVYADSFVIRGDEVRQIAPGQTGKIADYNYKLPDDFTGCVIAWNSNNLDSKVGGNYNYLYRLFRKSNLKPFERDISTEIYQAGSTPCNGVEGFNCYFPLQSYGFQPTNGVGYQPYRVVVLSFELLHAPATVCGPKKSTNLVKNKCVNFNFNGLTGTGVLTESNKKFLPFQQFGRDIADTTDAVRDPQTLEILDITPCSFGGVSVITPGTNTSNQVAVLYQDVNCTEVPVAIHADQLTPTWRVYSTGSNVFQTRAGCLIGAEHVNNSYECDIPIGAGICASYQTQTNSPRRARSVASQSIIAYTMSLGAENSVAYSNNSIAIPTNFTISVTTEILPVSMTKTSVDCTMYICGDSTECSNFLLQYGSFCTQLNRALTGIAVEQDKNTQEVFAQVKQIYKTPPIKDFGGFNFSQILPDPSKPSKRSFIEDLLFNKVTLADAGFIKQYGDCLGDIAARDLICAQKFNGLTVLPPLLTDEMIAQYTSALLAGTITSGWTFGAGAALQIPFAMQMAYRFNGIGVTQNVLYENQKLIANQFNSAIGKIQDSLSSTASALGKLQDVVNQNAQALNTLVKQLSSNCGAISSVLNDILSRLDKVEAEVQIDRLITCRLQSLQTYVTQQLIRAAEIRASANLAATKMSECVLGQSKRVDFCGKGYHLMSFPQSAPHGVVFLHVTYVPAQEKNFTTAPAICHDGKAHFPREGVFVSNGTHWFVTQRNFYEPQIITTDNTFVSGNCDVVIGIVNNTVYDPLQPELDSGGSGYIPEAPRDGQAYVRKDGEWVLLSTFL

SEQ ID NO: 10401 - protein, 1177 aa, Artificial Sequence
  SARS-CoV-2/Australia/QLD02/2020__EPI_ISL_407896 spike protein (1-1147)(F970C_G999C) Foldon construct
MFVFLVLLPLVSSQCVNLTTRTQLPPAYTNSFTRGVYYPDKVFRSSVLHSTQDLFLPFFSNVTWFHAIHVSGTNGTKRFDNPVLPFNDGVYFASTEKSNIIRGWIFGTTLDSKTQSLLIVNNATNVVIKVCEFQFCNDPFLGVYYHKNNKSWMESEFRVYSSANNCTFEYVSQPFLMDLEGKQGNFKNLREFVFKNIDGYFKIYSKHTPINLVRDLPQGFSALEPLVDLPIGINITRFQTLLALHRSYLTPGDSSSGWTAGAAAYYVGYLQPRTFLLKYNENGTITDAVDCALDPLSETKCTLKSFTVEKGIYQTSNFRVQPTESIVRFPNITNLCPFGEVFNATRFASVYAWNRKRISNCVADYSVLYNSASFSTFKCYGVSPTKLNDLCFTNVYADSFVIRGDEVRQIAPGQTGKIADYNYKLPDDFTGCVIAWNSNNLDSKVGGNYNYLYRLFRKSNLKPFERDISTEIYQAGSTPCNGVEGFNCYFPLQSYGFQPTNGVGYQPYRVVVLSFELLHAPATVCGPKKSTNLVKNKCVNFNFNGLTGTGVLTESNKKFLPFQQFGRDIADTTDAVRDPQTLEILDITPCSFGGVSVITPGTNTSNQVAVLYQDVNCTEVPVAIHADQLTPTWRVYSTGSNVFQTRAGCLIGAEHVNNSYECDIPIGAGICASYQTQTNSPRRARSVASQSIIAYTMSLGAENSVAYSNNSIAIPTNFTISVTTEILPVSMTKTSVDCTMYICGDSTECSNLLLQYGSFCTQLNRALTGIAVEQDKNTQEVFAQVKQIYKTPPIKDFGGFNFSQILPDPSKPSKRSFIEDLLFNKVTLADAGFIKQYGDCLGDIAARDLICAQKFNGLTVLPPLLTDEMIAQYTSALLAGTITSGWTFGAGAALQIPFAMQMAYRFNGIGVTQNVLYENQKLIANQFNSAIGKIQDSLSSTASALGKLQDVVNQNAQALNTLVKQLSSNCGAISSVLNDILSRLDKVEAEVQIDRLITCRLQSLQTYVTQQLIRAAEIRASANLAATKMSECVLGQSKRVDFCGKGYHLMSFPQSAPHGVVFLHVTYVPAQEKNFTTAPAICHDGKAHFPREGVFVSNGTHWFVTQRNFYEPQIITTDNTFVSGNCDVVIGIVNNTVYDPLQLELDSGGSGYIPEAPRDGQAYVRKDGEWVLLSTFL

SEQ ID NO: 10402 - protein, 1177 aa, Artificial Sequence
  SARS-CoV-2/India/1-31/2020__EPI_ISL_413523 spike protein (1-1147)(F970C_G999C) Foldon construct
MFVFLVLLPLVSSQCVNLTTRTQLPPAYTNSFTRGVYYPDKVFRSSVLHSTQDLFLPFFSNVTWFHAIHVSGTNGTKRFDNPVLPFNDGVYFASTEKSNIIRGWIFGTTLDSKTQSLLIVNNATNVVIKVCEFQFCNDPFLGVYYHKNNKSWMESEFRVYSSANNCTFEYVSQPFLMDLEGKQGNFKNLREFVFKNIDGYFKIYSKHTPINLVRDLPQGFSALEPLVDLPIGINITRFQTLLALHRSYLTPGDSSSGWTAGAAAYYVGYLQPRTFLLKYNENGTITDAVDCALDPLSETKCTLKSFTVEKGIYQTSNFRVQPTESIVRFPNITNLCPFGEVFNATRFASVYAWNRKRISNCVADYSVLYNSASFSTFKCYGVSPTKLNDLCFTNVYADSFVIRGDEVRQIAPGQTGKIADYNYKLPDDFTGCVIAWNSNNLDSKVGGNYNYLYRLFRKSNLKPFERDISTEIYQAGSTPCNGVEGFNCYFPLQSYGFQPTNGVGYQPYRVVVLSFELLHAPATVCGPKKSTNLVKNKCVNFNFNGLTGTGVLTESNKKFLPFQQFGRDIADTTDAVRDPQTLEILDITPCSFGGVSVITPGTNTSNQVAVLYQDVNCTEVPVAIHADQLTPTWRVYSTGSNVFQTRAGCLIGAEHVNNSYECDIPIGAGICASYQTQTNSPRRARSVASQSIIAYTMSLGAENSVAYSNNSIAIPTNFTISVTTEILPVSMTKTSVDCTMYICGDSTECSNLLLQYGSFCTQLNRALTGIAVEQDKNTQEVFAQVKQIYKTPPIKDFGGFNFSQILPDPSKPSKRSFIEDLLFNKVTLADAGFIKQYGDCLGDIAARDLICAQKFNGLTVLPPLLTDEMIAQYTSALLAGTITSGWTFGAGAALQIPFAMQMAYRFNGIGVTQNVLYENQKLIANQFNSVIGKIQDSLSSTASALGKLQDVVNQNAQALNTLVKQLSSNCGAISSVLNDILSRLDKVEAEVQIDRLITCRLQSLQTYVTQQLIRAAEIRASANLAATKMSECVLGQSKRVDFCGKGYHLMSFPQSAPHGVVFLHVTYVPAQEKNFTTAPAICHDGKAHFPREGVFVSNGTHWFVTQRNFYEPQIITTDNTFVSGNCDVVIGIVNNTVYDPLQPELDSGGSGYIPEAPRDGQAYVRKDGEWVLLSTFL

SEQ ID NO: 10403 - protein, 1177 aa, Artificial Sequence
  SARS-CoV-2/Guangdong/GD2020087-P0008/2020__EPI_ISL_413863 spike protein (1-1147)(F970C_G999C) Foldon construct
MFVFLVLLPLVSSQCVNLTTRTQLPPAYTNSFTRGVYYPDKVFRSSVLHSTQDLFLPFFSNVTWFHAIHVSGTNGTKRFDNPVLPFNDGVYFASTEKSNIIRGWIFGTTLDSKTQSLLIVNNATNVVIKVCEFQFCNDPFLGVYYHKNNKSWMESEFRVYSSANNCTFEYVSQPFLMDLEGKQGNFKNLREFVFKNIDGYFKIYSKHTPINLVRDLPQGFSALEPLVDLPIGINITRFQTLLALHRSYLTPGDSSSGWTAGAAAYYVGYLQPRTFLLKYNENGTITDAVDCALDPLSETKCTLKSFTVEKGIYQTSNFRVQPTESIVRFPNITNLCPFGEVFNATRFASVYAWNRKRISNCVADYSVLYNSASFSTFKCYGVSPTKLNDLCFTNVYADSFVIRGDEVREIAPGQTGKIADYNYKLPDDFTGCVIAWNSNNLDSKVGGNYNYLYRLFRKSNLKPFERDISTEIYQAGSTPCNGVEGFNCYFPLQSYGFQPTNGVGYQPYRVVVLSFELLHAPATVCGPKKSTNLVKNKCVNFNFNGLTGTGVLTESNKKFLPFQQFGRDIADTTDAVRDPQTLEILDITPCSFGGVSVITPGTNTSNQVAVLYQDVNCTEVPVAIHADQLTPTWRVYSTGSNVFQTRAGCLIGAEHVNNSYECDIPIGAGICASYQTQTNSPRRARSVASQSIIAYTMSLGAENSVAYSNNSIAIPTNFTISVTTEILPVSMTKTSVDCTMYICGDSTECSNLLLQYGSFCTQLNRALTGIAVEQDKNTQEVFAQVKQIYKTPPIKDFGGFNFSQILPDPSKPSKRSFIEDLLFNKVTLADAGFIKQYGDCLGDIAARDLICAQKFNGLTVLPPLLTDEMIAQYTSALLAGTITSGWTFGAGAALQIPFAMQMAYRFNGIGVTQNVLYENQKLIANQFNSAIGKIQDSLSSTASALGKLQDVVNQNAQALNTLVKQLSSNCGAISSVLNDILSRLDKVEAEVQIDRLITCRLQSLQTYVTQQLIRAAEIRASANLAATKMSECVLGQSKRVDFCGKGYHLMSFPQSAPHGVVFLHVTYVPAQEKNFTTAPAICHDGKAHFPREGVFVSNGTHWFVTQRNFYEPQIITTDNTFVSGNCDVVIGIVNNTVYDPLQPELDSGGSGYIPEAPRDGQAYVRKDGEWVLLSTFL

SEQ ID NO: 10404 - protein, 1177 aa, Artificial Sequence
  SARS-CoV-2/Sweden/01/2020__EPI_ISL_411951 spike protein (1-1147)(F970C_G999C) Foldon construct
MFVFLVLLPLVSSQCVNLTTRTQLPPAYTNSFTRGVYYPDKVFRSSVLHSTQDLFLPFFSNVTWFHAIHVSGTNGTKRFDNPVLPFNDGVYFASTEKSNIIRGWIFGTTLDSKTQSLLIVNNATNVVIKVCEFQFCNDPFLGVYYHKNNKSWMESEFRVYSSANNCTFEYVSQPFLMDLEGKQGNFKNLREFVFKNIDGYFKIYSKHTPINLVRDLPQGFSALEPLVDLPIGINITRFQTLLALHRSYLTPGDSSSGWTAGAAAYYVGYLQPRTFLLKYNENGTITDAVDCALDPLSETKCTLKSFTVEKGIYQTSNFRVQPTESIVRFPNITNLCPFGEVFNATRFASVYAWNRKRISNCVADYSVLYNSASFSTFKCYGVSPTKLNDLCFTNVYADSFVIRGDEVRQIAPGQTGKIADYNYKLPDDFTGCVIAWNSNNLDSKVGGNYNYLYRLFRKSNLKPFERDISTEIYQAGSTPCNGVEGFNCYFPLQSYGFQPTNGVGYQPYRVVVLSFELLHAPATVCGPKKSTNLVKNKCVNFNFNGLTGTGVLTESNKKFLPFQQFGRDIADTTDAVRDPQTLEILDITPCSFGGVSVITPGTNTSNQVAVLYQDVNCTEVPVAIHADQLTPTWRVYSTGSNVFQTRAGCLIGAEHVNNSYECDIPIGAGICASYQTQTNSPRRARSVASQSIIAYTMSLGAENSVAYSNNSIAIPTNFTISVTTEILPVSMTKTSVDCTMYICGDSTECSNLLLQYGSFCTQLNRALTGIAVEQDKNTQEVFAQVKQIYKTPPIKDCGGFNFSQILPDPSKPSKRSFIEDLLFNKVTLADAGFIKQYGDCLGDIAARDLICAQKFNGLTVLPPLLTDEMIAQYTSALLAGTITSGWTFGAGAALQIPFAMQMAYRFNGIGVTQNVLYENQKLIANQFNSAIGKIQDSLSSTASALGKLQDVVNQNAQALNTLVKQLSSNCGAISSVLNDILSRLDKVEAEVQIDRLITCRLQSLQTYVTQQLIRAAEIRASANLAATKMSECVLGQSKRVDFCGKGYHLMSFPQSAPHGVVFLHVTYVPAQEKNFTTAPAICHDGKAHFPREGVFVSNGTHWFVTQRNFYEPQIITTDNTFVSGNCDVVIGIVNNTVYDPLQPELDSGGSGYIPEAPRDGQAYVRKDGEWVLLSTFL

SEQ ID NO: 10405 - protein, 1177 aa, Artificial Sequence
  SARS-CoV-2/Tianmen/HBCDC-HB-07/2020__EPI_ISL_412983 spike protein (1-1147)(F970C_G999C) Foldon construct
MFVFLVLLPLVSSQCVNLTTRTQLPPAYTNSFTRGVYYPDKVFRSSVLHSTQDLFLPFFSNVTWFHAIHVSGTNGTKRFDNPVLPFNDGVYFASTEKSNIIRGWIFGTTLDSKTQSLLIVNNATNVVIKVCEFQFCNDPFLGVYYHKNNKSWMESEFRVYSSANNCTFEYVSQPFLMDLEGKQGNFKNLREFVFKNIDGYFKIYSKHTPINLVRDLPQGFSALEPLVDLPIGINITRFQTLLALHRSYLTPGDSSSGWTAGAAAYYVGYLQPRTFLLKYNENGTITDAVDCALDPLSETKCTLKSFTVEKGIYQTSNFRVQPTESIVRFPNITNLCPFGEVFNATRFASVYAWNRKRISNCVADYSVLYNSASFSTFKCYGVSPTKLNDLCFTNVYADSFVIRGDEVRQIAPGQTGKIADYNYKLPDDFTGCVIAWNSNNLDSKVGGNYNYLYRLFRKSNLKPFERDISTEIYQAGSTPCNGVEGFNCYFPLQSYGFQPTNGVGYQPYRVVVLSFELLHAPATVCGPKKSTNLVKNKCVNFNFNGLTGTGVLTESNKKFLPFQQFGRDIADTTDAVRDPQTLEILDITPCSFGGVSVITPGTNTSNQVAVLYQDLNCTEVPVAIHADQLTPTWRVYSTGSNVFQTRAGCLIGAEHVNNSYECDIPIGAGICASYQTQTNSPRRARSVASQSIIAYTMSLGAENSVAYSNNSIAIPTNFTISVTTEILPVSMTKTSVDCTMYICGDSTECSNLLLQYGSFCTQLNRALTGIAVEQDKNTQEVFAQVKQIYKTPPIKDFGGFNFSQILPDPSKPSKRSFIEDLLFNKVTLADAGFIKQYGDCLGDIAARDLICAQKFNGLTVLPPLLTDEMIAQYTSALLAGTITSGWTFGAGAALQIPFAMQMAYRFNGIGVTQNVLYENQKLIANQFNSAIGKIQDSLSSTASALGKLQDVVNQNAQALNTLVKQLSSNCGAISSVLNDILSRLDKVEAEVQIDRLITCRLQSLQTYVTQQLIRAAEIRASANLAATKMSECVLGQSKRVDFCGKGYHLMSFPQSAPHGVVFLHVTYVPAQEKNFTTAPAICHDGKAHFPREGVFVSNGTHWFVTQRNFYEPQIITTDNTFVSGNCDVVIGIVNNTVYDPLQPELDSGGSGYIPEAPRDGQAYVRKDGEWVLLSTFL

SEQ ID NO: 10406 - protein, 1177 aa, Artificial Sequence
  SARS-CoV-2/Hong Kong/case42_VM20002493/2020__EPI_ISL_414527 spike protein (1-1147)(F970C_G999C) Foldon construct
MFVFLVLLPLVSSQCVNLTTRTQLPPAYTNSFTRGVYYPDKVFRSSVLHSTQDLFLPFFSNVTWFHAIHVSGTNGTKRFDNPVLPFNDGVYFASTEKSNIIRGWIFGTTLDSKTQSLLIVNNATNVVIKVCEFQFCNDPFLGVYYHKNNKSWMESEFRVYSSANNCTFEYVSQPFLMDLEGKQGNFKNLREFVFKNIDGYFKIYSKHTPINLVRDLPQGFSALEPLVDLPIGINITRFQTLLALHRSYLTPGDSSSGWTAGAAAYYVGYLQPRTFLLKYNENGTITDAVDCALDPLSETKCTLKSFTVEKGIYQTSNFRVQPTESIVRFPNITNLCPFGEVFNATRFASVYAWNRKRISNCVADYSVLYNSASFSTFKCYGVSPTKLNDLCFTNVYADSFVIRGDEVRQIAPGQTGKIADYNYKLPDDFTGCVIAWNSNNLDSKVGGNYNYLYRLFRKSNLKPFERDISTEIYQAGSTPCNGVEGFNCYFPLQSYGFQPTNGVGYQPYRVVVLSFELLHAPATVCGPKKSTNLVKNKCVNFNFNGLTGTGVLTESNKKFLPFQQFGRDIADTTDAVRDPQTLEILDITPCSFGGVSVITPGTNTSNQVAVLYQDVNCTEVPVAIHADQLTPTWRVYSTGSNVFQTRAGCLIGAEHVNNSYECDIPIGAGICASYQTQTNSPRRARSVASQSIIAYTMSLGAENSVAYSNNSIAIPTNFAISVTTEILPVSMTKTSVDCTMYICGDSTECSNLLLQYGSFCTQLNRALTGIAVEQDKNTQEVFAQVKQIYKTPPIKDFGGFNFSQILPDPSKPSKRSFIEDLLFNKVTLADAGFIKQYGDCLGDIAARDLICAQKFNGLTVLPPLLTDEMIAQYTSALLAGTITSGWTFGAGAALQIPFAMQMAYRFNGIGVTQNVLYENQKLIANQFNSAIGKIQDSLSSTASALGKLQDVVNQNAQALNTLVKQLSSNCGAISSVLNDILSRLDKVEAEVQIDRLITCRLQSLQTYVTQQLIRAAEIRASANLAATKMSECVLGQSKRVDFCGKGYHLMSFPQSAPHGVVFLHVTYVPAQEKNFTTAPAICHDGKAHFPREGVFVSNGTHWFVTQRNFYEPQIITTDNTFVSGNCDVVIGIVNNTVYDPLQPELDSGGSGYIPEAPRDGQAYVRKDGEWVLLSTFL

SEQ ID NO: 10407 - protein, 1177 aa, Artificial Sequence
  SARS-CoV-2/USA/CruiseA-23/2020__EPI_ISL_414482 spike protein (1-1147)(F970C_G999C) Foldon construct
MFVFLVLLPLVSSQCVNLTTRTQLPPAYTNSFTRGVYYPDKVFRSSVLHSTQDLFLPFFSNVTWFHAIHVSGTNGTKRFDNPVLPFNDGVYFASTEKSNIIRGWIFGTTLDSKTQSLLIVNNATNVVIKVCEFQFCNDPFLGVYYHKNNKSWMESEFRVYSSANNCTFEYVSQPFLMDLEVKQGNFKNLREFVFKNIDGYFKIYSKHTPINLVRDLPQGFSALEPLVDLPIGINITRFQTLLALHRSYLTPGDSSSGWTAGAAAYYVGYLQPRTFLLKYNENGTITDAVDCALDPLSETKCTLKSFTVEKGIYQTSNFRVQPTESIVRFPNITNLCPFGEVFNATRFASVYAWNRKRISNCVADYSVLYNSASFSTFKCYGVSPTKLNDLCFTNVYADSFVIRGDEVRQIAPGQTGKIADYNYKLPDDFTGCVIAWNSNNLDSKVGGNYNYLYRLFRKSNLKPFERDISTEIYQAGSTPCNGVEGFNCYFPLQSYGFQPTNGVGYQPYRVVVLSFELLHAPATVCGPKKSTNLVKNKCVNFNFNGLTGTGVLTESNKKFLPFQQFGRDIADTTDAVRDPQTLEILDITPCSFGGVSVITPGTNTSNQVAVLYQDVNCTEVPVAIHADQLTPTWRVYSTGSNVFQTRAGCLIGAEHVNNSYECDIPIGAGICASYQTQTNSPRRARSVASQSIIAYTMSLGAENSVAYSNNSIAIPTNFTISVTTEILPVSMTKTSVDCTMYICGDSTECSNLLLQYGSFCTQLNRALTGIAVEQDKNTQEVFAQVKQIYKTPPIKDFGGFNFSQILPDPSKPSKRSFIEDLLFNKVTLADAGFIKQYGDCLGDIAARDLICAQKFNGLTVLPPLLTDEMIAQYTSALLAGTITSGWTFGAGAALQIPFAMQMAYRFNGIGVTQNVLYENQKLIANQFNSAIGKIQDSLSSTASALGKLQDVVNQNAQALNTLVKQLSSNCGAISSVLNDILSRLDKVEAEVQIDRLITCRLQSLQTYVTQQLIRAAEIRASANLAATKMSECVLGQSKRVDFCGKGYHLMSFPQSAPHGVVFLHVTYVPAQEKNFTTAPAICHDGKAHFPREGVFVSNGTHWFVTQRNFYEPQIITTDNTFVSGNCDVVIGIVNNTVYDPLQPELDSGGSGYIPEAPRDGQAYVRKDGEWVLLSTFL

SEQ ID NO: 10408 - protein, 1177 aa, Artificial Sequence
  SARS-CoV-2/Hong Kong/case85_VM20002868/2020__EPI_ISL_414519 spike protein (1-1147)(F970C_G999C) Foldon construct
MFVFLVLVPLVSSQCVNLTTRTQLPPAYTNSFTRGVYYPDKVFRSSVLHSTQDLFLPFFSNVTWFHAIHVSGTNGTKRFDNPVLPFNDGVYFASTEKSNIIRGWIFGTTLDSKTQSLLIVNNATNVVIKVCEFQFCNDPFLGVYYHKNNKSWMESEFRVYSSANNCTFEYVSQPFLMDLEGKQGNFKNLREFVFKNIDGYFKIYSKHTPINLVRDLPQGFSALEPLVDLPIGINITRFQTLLALHRSYLTPGDSSSGWTAGAAAYYVGYLQPRTFLLKYNENGTITDAVDCALDPLSETKCTLKSFTVEKGIYQTSNFRVQPTESIVRFPNITNLCPFGEVFNATRFASVYAWNRKRISNCVADYSVLYNSASFSTFKCYGVSPTKLNDLCFTNVYADSFVIRGDEVRQIAPGQTGKIADYNYKLPDDFTGCVIAWNSNNLDSKVGGNYNYLYRLFRKSNLKPFERDISTEIYQAGSTPCNGVEGFNCYFPLQSYGFQPTNGVGYQPYRVVVLSFELLHAPATVCGPKKSTNLVKNKCVNFNFNGLTGTGVLTESNKKFLPFQQFGRDIADTTDAVRDPQTLEILDITPCSFGGVSVITPGTNTSNQVAVLYQDVNCTEVPVAIHADQLTPTWRVYSTGSNVFQTRAGCLIGAEHVNNSYECDIPIGAGICASYQTQTNSPRRARSVASQSIIAYTMSLGAENSVAYSNNSIAIPTNFTISVTTEILPVSMTKTSVDCTMYICGDSTECSNLLLQYGSFCTQLNRALTGIAVEQDKNTQEVFAQVKQIYKTPPIKDFGGFNFSQILPDPSKPSKRSFIEDLLFNKVTLADAGFIKQYGDCLGDIAARDLICAQKFNGLTVLPPLLTDEMIAQYTSALLAGTITSGWTFGAGAALQIPFAMQMAYRFNGIGVTQNVLYENQKLIANQFNSAIGKIQDSLSSTASALGKLQDVVNQNAQALNTLVKQLSSNCGAISSVLNDILSRLDKVEAEVQIDRLITCRLQSLQTYVTQQLIRAAEIRASANLAATKMSECVLGQSKRVDFCGKGYHLMSFPQSAPHGVVFLHVTYVPAQEKNFTTAPAICHDGKAHFPREGVFVSNGTHWFVTQRNFYEPQIITTDNTFVSGNCDVVIGIVNNTVYDPLQPELDSGGSGYIPEAPRDGQAYVRKDGEWVLLSTFL

SEQ ID NO: 10409 - protein, 1177 aa, Artificial Sequence; identical to SEQ ID NO: 10399
  SARS-CoV-2/England/200990660/2020__EPI_ISL_414523 spike protein (1-1147)(F970C_G999C) Foldon construct

SEQ ID NO: 10410 - protein, 1177 aa, Artificial Sequence
  SARS-CoV-2/Australia/NSW09/2020__EPI_ISL_413595 spike protein (1-1147)(F970C_G999C) Foldon construct
MFVFLVLLPLVSSQCVNLTTRTQLPPAYTNSFTRGVYYPDKVFRSSVLHSTQDLFLPFFSNVTWFHAIHVSGTNGTKRFDNPVLPFNDGVYFASTEKSNIIRGWIFGTTLDSKTQSLLIVNNATNVVIKVCEFQFCNDPFLGVYYHKNNKSWMESEFRVYSSANNCTFEYVSQPFLMDLEGKQGNFKNLREFVFKNIDGYFKIYSKHTPINLVRDLPQGFSALEPLVDLPIGINITRFQTLLALHRSYLTPGDSSSGWTAGAAAYYVGYLQPRTFLLKYNENGTITDAVDCALDPLSETKCTLKSFTVEKGIYQTSNFRVQPTESIVRFPNITNLCPFGEVFNATRFASVYAWNRKRISNCVADYSVLYNSASFSTFKCYGVSPTKLNDLCFTNVYADSFVIRGDEVRQIAPGQTGKIADYNYKLPDDFTGCVIAWNSNNLDSKVGGNYNYLYRLFRKSNLKPFERDISTEIYQAGSTPCNGVEGFNCYFPLQSYGFQPTNGVGYQPYRVVVLSFELLHAPATVCGPKKSTNLVKNKCVNFNFNGLTGTGVLTESNKKFLPFQQFGRDIADTTDAVRDPQTLEILDITPCSFGGVSVITPGTNTSNQVAVLYQDVNCTEVPVAIHADQLTPTWRVYSTGSNVFQTRAGCLIGAEHVNNSYECDIPIGAGICASYQTQTNSPRRARSVASQSIIAYTMSLGAENSVAYSNNSIAIPTNFTISVTTEILPVSMTKTSVDCTMYICGDSTECSNLLLQYGSFCTQLNRALTGIAVEQDKNTQEVFAQVKQIYKTPPIKDFGGFNFSQILPDPSKPSKRSFIEDLLFNKVTLADAGFIKQYGDCLGDIAARDLICAQKFNGLTVLPPLLTDEMIAQYTSALLAGTITSGWTFGAGAALQIPFAMQMAYRFNGIGVTQNVLYENQKLIANQFNSAIGKIQDSLSFTASALGKLQDVVNQNAQALNTLVKQLSSNCGAISSVLNDILSRLDKVEAEVQIDRLITCRLQSLQTYVTQQLIRAAEIRASANLAATKMSECVLGQSKRVDFCGKGYHLMSFPQSAPHGVVFLHVTYVPAQEKNFTTAPAICHDGKAHFPREGVFVSNGTHWFVTQRNFYEPQIITTDNTFVSGNCDVVIGIVNNTVYDPLQPELDSGGSGYIPEAPRDGQAYVRKDGEWVLLSTFL

SEQ ID NO: 10411 - protein, 1177 aa, Artificial Sequence; identical to SEQ ID NO: 10391
  SARS-CoV-2/Australia/NSW10/2020__EPI_ISL_413596 spike protein (1-1147)(F970C_G999C) Foldon construct

SEQ ID NO: 10412 - protein, 1177 aa, Artificial Sequence
  SARS-CoV-2/Switzerland/1000477797/2020__EPI_ISL_413023 spike protein (1-1147)(F970C_G999C) Foldon construct
MFVFLVLLPLVSSQCVNLTTRTQLPPAYTNSFTRGVYYPDKVFRSSVLHSTQDLFLPFFSNVTWFHAIHVSGTNGTKRFDNPVLPFNDGVYFASTEKSNIIRGWIFGTTLDSKTQSLLIVNNATNVVIKVCEFQFCNDPFLGVYYHKNNKSWMESEFRVYSSANNCTFEYVSQPFLMDLEGKQGNFKNLREFVFKNIDGYFNIYSKHTPINLVRDLPQGFSALEPLVDLPIGINITRFQTLLALHRSYLTPGDSSSGWTAGAAAYYVGYLQPRTFLLKYNENGTITDAVDCALDPLSETKCTLKSFTVEKGIYQTSNFRVQPTESIVRFPNITNLCPFGEVFNATRFASVYAWNRKRISNCVADYSVLYNSASFSTFKCYGVSPTKLNDLCFTNVYADSFVIRGDEVRQIAPGQTGKIADYNYKLPDDFTGCVIAWNSNNLDSKVGGNYNYLYRLFRKSNLKPFERDISTEIYQAGSTPCNGVEGFNCYFPLQSYGFQPTNGVGYQPYRVVVLSFELLHAPATVCGPKKSTNLVKNKCVNFNFNGLTGTGVLTESNKKFLPFQQFGRDIADTTDAVRDPQTLEILDITPCSFGGVSVITPGTNTSNQVAVLYQGVNCTEVPVAIHADQLTPTWRVYSTGSNVFQTRAGCLIGAEHVNNSYECDIPIGAGICASYQTQTNSPRRARSVASQSIIAYTMSLGAENSVAYSNNSIAIPTNFTISVTTEILPVSMTKTSVDCTMYICGDSTECSNLLLQYGSFCTQLNRALTGIAVEQDKNTQEVFAQVKQIYKTPPIKDFGGFNFSQILPDPSKPSKRSFIEDLLFNKVTLADAGFIKQYGDCLGDIAARDLICAQKFNGLTVLPPLLTDEMIAQYTSALLAGTITSGWTFGAGAALQIPFAMQMAYRFNGIGVTQNVLYENQKLIANQFNSAIGKIQDSLSSTASALGKLQDVVNQNAQALNTLVKQLSSNCGAISSVLNDILSRLDKVEAEVQIDRLITCRLQSLQTYVTQQLIRAAEIRASANLAATKMSECVLGQSKRVDFCGKGYHLMSFPQSAPHGVVFLHVTYVPAQEKNFTTAPAICHDGKAHFPREGVFVSNGTHWFVTQRNFYEPQIITTDNTFVSGNCDVVIGIVNNTVYDPLQPELDSGGSGYIPEAPRDGQAYVRKDGEWVLLSTFL

SEQ ID NO: 10413 - protein, 1177 aa, Artificial Sequence
  SARS-CoV-2/Belgium/BA-02291/2020__EPI_ISL_415159 spike protein (1-1147)(F970C_G999C) Foldon construct
MFVFLVLLPLVSSQCVNLTTRTQLPPAYTNSFTRGVYYPDKVFRSSVLHSTQDLFLPFFSNVTWFHAIHVSGTNGTKRFDNPVLPFNDGVYFASTEKSNIIRGWIFGTTLDSKTQSLLIVNNATNVVIKVCEFQFCNDPFLGVYYHKNNKSWMESEFRVYSSANNCTFEYVSQPFLMDLEGKQGNFKNLREFVFKNIDGYFKIYSKHTPINLVRDLPQGFSALEPLVDLPIGINITRFQTLLALHRSYLTPGDSSSGWTAGAAAYYVGYLQPRTFLLKYNENGTITDAVDCALDPLSETKCTLKSFTVEKGIYQTSNFRVQPTESIVRFPNITNLCPFGEVFNATRFASVYAWNRKRISNCVADYSVLYNSASFSTFKCYGVSPTKLNDLCFTNVYADSFVIRGDEVRQIAPGQTGKIADYNYKLPDDFTGCVIAWNSNNLDSKVGGNYNYLYRLFRRSNLKPFERDISTEIYQAGSTPCNGVEGFNCYFPLQSYGFQPTNGVGYQPYRVVVLSFELLPAPATVCGPKKSTNLVKNKCVNFNFNGLTGTGVLTESNKKFLPFQQFGRDIADTTDAVRDPQTLEILDITPCSFGGVSVITPGTNTSNQVAVLYQGVNCTEVPVAIHADQLTPTWRVYSTGSNVFQTRAGCLIGAEHVNNSYECDIPIGAGICASYQTQTNSPRRARSVASQSIIAYTMSLGAENSVAYSNNSIAIPTNFTISVTTEILPVSMTKTSVDCTMYICGDSTECSNLLLQYGSFCTQLNRALTGIAVEQDKNTQEVFAQVKQIYKTPPIKDFGGFNFSQILPDPSKPSKRSFIEDLLFNKVTLADAGFIKQYGDCLGDIAARDLICAQKFNGLTVLPPLLTDEMIAQYTSALLAGTITSGWTFGAGAALQIPFAMQMAYRFNGIGVTQNVLYENQKLIANQFNSAIGKIQDSLSSAAPALGKLQDVVNQNAQALNTLVKQLSSNCGAISSVLNDILSRLDKVEAEVQIDRLITCRLQSLQTYVTQQLIRAAEIRASANLAATKMSECVLGQSKRVDFCGKGYHLMSFPQSAPHGVVFLHVTYVPAQEKNFTTAPAICHDGKAHFPREGVFVSNGTHWFVTQRNFYEPQIITTDNTFVSGNCDVVIGIVNNTVYDPLQPELDSGGSGYIPEAPRDGQAYVRKDGEWVLLSTFL

SEQ ID NO: 10414 - protein, 1177 aa, Artificial Sequence
  SARS-CoV-2/USA/WA8-UW5/2020__EPI_ISL_413486 spike protein (1-1147)(F970C_G999C) Foldon construct
MFVFLVLLPLVSSQCVNLTTRTQLPPAYTNSFTRGVYYPDKVFRSSVLHSTQDLFLPFFSNVTWFHAIHVSGTNGTKRFDNPVLPFNDGVYFASTEKSNIIRGWIFGTTLDSKTQSLLIVNNATNVVIKVCEFQFCNDPFLGVYYHKNNKSWMESEFRVYSSANNCTFEYVSQPFLMDLEGKQGNFKNLREFVFKNIDGYFKIYSKHTPINLVRDLPQGFSALEPLVDLPIGINITRFQTLLALHRSYLTPGDSSSGWTAGAAAYYVGYLQPRTFLLKYNENGTITDAVDCALDPLSETKCTLKSFTVEKGIYQTSNFRVQPTESIVRFPNITNLCPFGEVFNATRFASVYAWNRKRISNCVADYSVLYNSASFSTFKCYGVSPTKLNDLCFTNVYADSFVIRGDEVRQIAPGQTGKIADYNYKLPDDFTGCVIAWNSNNLDSKVGGNYNYLYRLFRKSNLKPFERDISTEIYQAGSTPCNGVEGFNCYFPLQSYGFQPTNGVGYQPYRVVVLSFELLHAPATVCGPKKSTNLVKNKCVNFNFNGLTGTGVLTESNKKFLPFQQFGRDIADTTDAVRDPQTLEILDITPCSFGGVSVITPGTNTSNQVAVLYQDVNCTEVPVAIHADQLTPTWRVYSTGSNVFQTRAGCLIGAEYVNNSYECDIPIGAGICASYQTQTNSPRRARSVASQSIIAYTMSLGAENSVAYSNNSIAIPTNFTISVTTEILPVSMTKTSVDCTMYICGDSTECSNLLLQYGSFCTQLNRALTGIAVEQDKNTQEVFAQVKQIYKTPPIKDFGGFNFSQILPDPSKPSKRSFIEDLLFNKVTLADAGFIKQYGDCLGDIAARDLICAQKFNGLTVLPPLLTDEMIAQYTSALLAGTITSGWTFGAGAALQIPFAMQMAYRFNGIGVTQNVLYENQKLIANQFNSAIGKIQDSLSSTASALGKLQDVVNQNAQALNTLVKQLSSNCGAISSVLNDILSRLDKVEAEVQIDRLITCRLQSLQTYVTQQLIRAAEIRASANLAATKMSECVLGQSKRVDFCGKGYHLMSFPQSAPHGVVFLHVTYVPAQEKNFTTAPAICHDGKAHFPREGVFVSNGTHWFVTQRNFYEPQIITTDNTFVSGNCDVVIGIVNNTVYDPLQPELDSGGSGYIPEAPRDGQAYVRKDGEWVLLSTFL

SEQ ID NO: 10415 - protein, 1177 aa, Artificial Sequence
  SARS-CoV-2/England/20102000506/2020__EPI_ISL_415147 spike protein (1-1147)(F970C_G999C) Foldon construct
MFVFLVLLPLVSSQCVNLTTRTQLPPAYTNSFTRGVYYPDKVFRSSVLHSTQDLFLPFFSNVTWFHAIHVSGTNGTKRFDNPVLPFNDGVYFASTEKSNIIRGWIFGTTLDSKTQSLLIVNNATNVVIKVCEFQFCNDPFLGVYYHKNNKSWMESEFRVYSSANNCTFEYVSQPFLMDLEGKQGNFKNLREFVFKNIDGYFKIYSKHTPINLVRDLPQGFSALEPLVDLPIGINITRFQTLLALHRSYLTPGDSSSGWTAGAAAYYVGYLQPRTFLLKYNENGTITDAVDCALDPLSETKCTLKSFTVEKGIYQTSNFRVQPTESIVRFPNITNLCPFGEVFNATRFASVYAWNRKRISNCVADYSVLYNSASFSTFKCYGVSPTKLNDLCFTNVYADSFVIRGDEVRQIAPGQTGKIADYNYKLPDDFTGCVIAWNSNNLDSKVGGNYNYLYRLFRKSNLKPFERDISTEIYQAGSTPCNGVEGFNCYFPLQSYGFQPTNGVGYQPYRVVVLSFELLHAPATVCGPKKSTNLVKNKCVNFNFNGLTGTGVLTESNKKFLPFQQFGRDIADTTDAVRDPQTLEILDITPCSFGGVSVITPGTNTSNQVAVLYQGVNCTEVPVAIHADQLTPTWRVYSTGSNVFQTRAGCLIGAEHVNNSYECDIPIGAGICASYQTQTNSPRRARSVASQSIIAYTMSLGAENSVAYSNNSIAIPTNFTISVTTEILPVSMTKTSVDCTMYICGDSTECSNLLLQYGSFCTQLNRALTGIAVEQDKNTQEVFAQVKQIYKTPPIKDFGGFNFSQILPDPSKPSKRSFIEDLLFNKVTLADAGFIKQYGYCLGDIAARDLICAQKFNGLTVLPPLLTDEMIAQYTSALLAGTITSGWTFGAGAALQIPFAMQMAYRFNGIGVTQNVLYENQKLIANQFNSAIGKIQDSLSSTASALGKLQDVVNQNAQALNTLVKQLSSNCGAISSVLNDILSRLDKVEAEVQIDRLITCRLQSLQTYVTQQLIRAAEIRASANLAATKMSECVLGQSKRVDFCGKGYHLMSFPQSAPHGVVFLHVTYVPAQEKNFTTAPAICHDGKAHFPREGVFVSNGTHWFVTQRNFYEPQIITTDNTFVSGNCDVVIGIVNNTVYDPLQPELDSGGSGYIPEAPRDGQAYVRKDGEWVLLSTFL

SEQ ID NO: 10416 - protein, 1177 aa, Artificial Sequence
  SARS-CoV-2/Belgium/VAG-03013/2020__EPI_ISL_415155 spike protein (1-1147)(F970C_G999C) Foldon construct
MFVFLVLLPLVSSQCVNLTTRTQLPPAYTNSFTRGVYYPDKVFRSSVLHSTQDLFLPFFSNVTWFHAIHVSGTNGTKRFDNPVLPFNDGVYFASTEKSNIIRGWIFGTTLDSKTQSLLIVNNATNVVIKVCEFQFCNDPFLGVYYHKNNKSWMESEFRVYSSANNCTFEYVSQPFLMDLEGKQGNFKNLREFVFKNIDGYFKIYSKHTPINLVRDLPQGFSALEPLVDLPIGINITRFQTLLALHRSYLTPGDSSSGWTAGAAAYYVGYLQPRTFLLKYNENGTITDAVDCALDPLSETKCTLKSFTVEKGIYQTSNFRVQPTESIVRFPNITNLCPFGEVFNATRFASVYAWNRKRISNCVADYSVLYNSASFSTFKCYGVSPTKLNDLCFTNVYADSFVIRGDEVRQIAPGQTGKIADYNYKLPDDFTGCVIAWNSNNLDSKVGGNYNYLYRLFRKSNLKPFERDISTEIYQAGSTPCNGVEGFNCYFPLQSYGFQPTNGVGYQPYRVVVLSFELLHAPATVCGPKKSTNLVKNKCVNFNFNGLTGTGVLTESNKKFLPFQQFGRDIADTTDAVRDPQTLEILDITPCSFGGVSVITPGTNTSNQVAVLYQGVNCTEVPVAIHADQLTPTWRVYSTGSNVFQTRAGCLIGAEHVNNSYECDIPIGAGICASYQTQTNSPRRARSVASQSIIAYTMSLGAENSVAYSNNSIAIPTNFTISVTTEILPVSMTKTSVDCTMYICGDSTECSNLLLQYGSFCTQLNRALTGIAVEQDKNTQEVFAQVKQIYKTPPIKDFGGFNFSQILPDPSKPSKRSFIEDLLFNKVTLADAGFIKQYGDCLGDIAARDLICAQKFNGLTVLPPLLTDEMIAQYTSALLAGTITSGWTFGAGAALQIPFAMQMAYRFNGIGVTQNVLYENQKLIANQFNSAIGKIQDSLSSTATALGKLQDVVNQNAQALNTLVKQLSSNCGAISSVLNDILSRLDKVEAEVQIDRLITCRLQSLQTYVTQQLIRAAEIRASANLAATKMSECVLGQSKRVDFCGKGYHLMSFPQSAPHGVVFLHVTYVPAQEKNFTTAPAICHDGKAHFPREGVFVSNGTHWFVTQRNFYEPQIITTDNTFVSGNCDVVIGIVNNTVYDPLQPELDSGGSGYIPEAPRDGQAYVRKDGEWVLLSTFL

SEQ ID NO: 10417 - protein, 1177 aa, Artificial Sequence
  SARS-CoV-2/Belgium/BC-03016/2020__EPI_ISL_415157 spike protein (1-1147)(F970C_G999C) Foldon construct
MFVFLVLLPLVSSQCVNLTTRTQLPPAYTNSFTRGVYYPDKVFRSSVLHSTQDLFLPFFSNVTWFHAIHVSGTNGTKRFDNPVLPFNDGVYFASTEKSNIIRGWIFGTTLDSKTQSLLIVNNATNVVIKVCEFQFCNDPFLGVYYHKNNKSWMESEFRVYSSANNCTFEYVSQPFLMDLEGKQGNFKNLREFVFKNIDGYFKIYSKHTPINLVRDLPQGFSALEPLVDLPIGINITRFQTLLALHRSYLTPGDSSSGWTAGAAAYYVGYLQPRTFLLKYNENGTITDAVDCALDPLSETKCTLKSFTVEKGIYQTSNFRVQPTESIVRFPNITNLCPFGEVFNATRFASVYAWNRKRISNCVADYSVLYNSASFSTFKCYGVSPTKLNDLCFTNVYADSFVIRGDEVRQIAPGQTGKIADYNYKLPDDFTGCVIAWNSNNLDSKVGGNYNYLYRLFRKSNLKPFERDISTEIYQAGSTPCNGVEGFNCYFPLQSYGFQPTNGVGYQPYRVVVLSFELLHAPATVCGPKKSTNLVKNKCVNFNFNGLTGTGVLTESNKKFLPFQQFGRDIADTTDAVRDPQTLEILDITPCSFGGVSVITPGTNTSNQVAVLYQGVNCTEVPVAIHADQLTPTWRVYSTGSNVFQTRAGCLIGAEHVNNSYECDIPIGAGICASYQTQTNSPRRARSVASQSIIAYTMSLGAENSVAYSNNSIAIPTNFTISVTTEILPVSMTKTSVDCTMYICGDSTECSNLLLQYGSFCTQLNRALTGIAVEQDKNTQEVFAQVKQIYKTPPIKDFGGFNFSQILPDPSKPSKRSFIEDLLFNKVTLADAGFIKQYGDCLGDIAARDLICAQKFNGLTVLPPLLTDEMIAQYTSALLAGTITSGWTFGAGAALQIPFAMQMAYRFNGIGVTQNVLYENQKLIANQFNSAIGKIQDSLSSTAPALGKLQDVVNQNAQALNTLVKQLSSNCGAISSVLNDILSRLDKVEAEVQIDRLITCRLQSLQTYVTQQLIRAAEIRASANLAATKMSECVLGQSKRVDFCGKGYHLMSFPQSAPHGVVFLHVTYVPAQEKNFTTAPAICHDGKAHFPREGVFVSNGTHWFVTQRNFYEPQIITTDNTFVSGNCDVVIGIVNNTVYDPLQPELDSGGSGYIPEAPRDGQAYVRKDGEWVLLSTFL

SEQ ID NO: 10418 - protein, 1177 aa, Artificial Sequence
  SARS-CoV-2/Germany/BavPat3/2020__EPI_ISL_414521 spike protein (1-1147)(F970C_G999C) Foldon construct
MFVFLVLLPLVSSQCVNLTTRTQLPPAYTNSFTRGVYYPDKVFRSSVLHSTQDLFLPFFSNVTWFHAIHVSGTNGTKRFDNPVLPFNDGVYFASTEKSNIIRGWIFGTTLDSKTQSLLIVNNATNVVIKVCEFQFCNDPFLGVYYHKNNKSWMESEFRVYSSANNCTFEYVSQPFLMDLEGKQGNFKNLREFVFKNIDGYFKIYSKHTPINLVRDLPQGFSALEPLVDLPIGINITRFQTLLALHRSYLTPGDSSSGWTAGAAAYYVGYLQPRTFLLKYNENGTITDAVDCALDPLSETKCTLKSFTVEKGIYQTSNFRVQPTESIVRFPNITNLCPFGEVFNATRFASVYAWNRKRISNCVADYSVLYNSASFSTFKCYGVSPTKLNDLCFTNVYADSFVIRGDEVRQIAPGQTGKIADYNYKLPDDFTGCVIAWNSNNLDSKVGGNYNYLYRLFRKSNLKPFERDISTEIYQAGSTPCNGVEGFNCYFPLQSYGFQPTNGVGYQPYRVVVLSFELLHAPATVCGPKKSTNLVKNKCVNFNFNGLTGTGVLTESNKKFLPFQQFGRDIADTTDAVRDPQTLEILDITPCSFGGVSVITPGTNTSNQVAVLYQDVNCTEVPVAIHADQLTPTWRVYSTGSNVFQTRAGCLIGAEHVNNSYECDIPIGAGICASYQTQTNSPRRARSVASQSIIAYTMSLGAENSVAYSNNSIAIPTNFTISVTTEILPVSMTKTSVDCTMYICGDSTECSNLLLQYGSFCTQLNRALTGIAVEQDKNTQQVFAQVKQIYKTPPIKDFGGFNFSQILPDPSKPSKRSFIEDLLFNKVTLADAGFIKQYGDCLGDIAARDLICAQKFNGLTVLPPLLTDEMIAQYTSALLAGTITSGWTFGAGAALQIPFAMQMAYRFNGIGVTQNVLYENQKLIANQFNSAIGKIQDSLSSTASALGKLQDVVNQNAQALNTLVKQLSSNCGAISSVLNDILSRLDKVEAEVQIDRLITCRLQSLQTYVTQQLIRAAEIRASANLAATKMSECVLGQSKRVDFCGKGYHLMSFPQSAPHGVVFLHVTYVPAQEKNFTTAPAICHDGKAHFPREGVFVSNGTHWFVTQRNFYEPQIITTDNTFVSGNCDVVIGIVNNTVYDPLQPELDSGGSGYIPEAPRDGQAYVRKDGEWVLLSTFL

SEQ ID NO: 10419 - protein, 1177 aa, Artificial Sequence
  SARS-CoV-2/France/HF1805/2020__EPI_ISL_414628 spike protein (1-1147)(F970C_G999C) Foldon construct
MFVFLVLLPLVSSQCVNLTTRTQLPPAYTNSFTRGVYYPDKVFRSSVLHSTQDLFLPFFSNVTWFHAIHVSGTNGTKRFDNPVLPFNDGVYFASTEKSNIIRGWIFGTTLDSKTQSLLIVNNATNVVIKVCEFQFCNDPFLGVYYHKNNKSWMESEFRVYSSANNCTFEYVSQPFLMDLEGKQGNFKNLREFVFKNIDGYFKIYSKHTPINLVRDLPQGFSALEPLVDLPIGINITRFQTLLALHRSYLTPGDSSSGWTAGAAAYYVGYLQPRTFLLKYNENGTITDAVDCALDPLSETKCTLKSFTVEKGIYQTSNFRVQPTESIVRFPNITNLCPFGEVFNATRFASVYAWNRKRISNCVADYSVLYNSASFSTFKCYGVSPTKLNDLCFTNVYADSFVIRGDEVRQIAPGQTGKIADYNYKLPDDFTGCVIAWNSNNLDSKVGGNYNYLYRLFRKSNLKPFERDISTEIYQAGSTPCNGVEGFNCYFPLQSYGFQPTNGVGYQPYRVVVLSFELLHAPATVCGPKKSTNLVKNKCVNFNFNGLTGTGVLTESNKKFLPFQQFGRDIADTTDAVRDPQTLEILDITPCSFGGVSVITPGTNTSNQVAVLYQGVNCTEVPVAIHADQLTPTWRVYSTGSNVFQTRAGCLIGAEHVNNSYECDIPIGAGICASYQTQTNSPRRARSVASQSIIAYTMSLGAENSVAYSNNSIAIPTNFTISVTTEILPVSMTKTSVDCTMYICGDSTECSNLLLQYGSFCTQLNRALTGIAVEQDKNTQEVFAQVKQIYKTPPIKDFGGFNFSQILPDPSKPSKRSFIEDLLFNKVTLADAGFIKQYGDCLGDIAARDLICAQKFNGLTVLPPLLTDEMIAQYTSALLAGTITSGWTFGAGAALQIPFAMQMAYRFNGIGVTQNVLYENQKLIANQFNSAIGKIQDSLSSTASALGKLQDVVNQNAQALNTLVKQLSSNCGAISSVLNDILSRLDKVEAEVQIDRLITCRLQSLQTYVTQQLIRAAEIRASANLAATKMSECVLGQSKRVDFCGKGYHLMSFPQSAPHGVVFLHVTYVPAQEKNFTTAPAICHDGKAHFPREGVFVSNGTHWFVTQRNFYEPQIITTDNTFVSGNCDVVIGVVNNTVYDPLQPELDSGGSGYIPEAPRDGQAYVRKDGEWVLLSTFL

SEQ ID NO: 10420 - protein, 1177 aa, Artificial Sequence
  SARS-CoV-2/Netherlands/ZuidHolland_9/2020__EPI_ISL_414445 spike protein (1-1147)(F970C_G999C) Foldon construct
MFVFLVLLPLVSSQCVNLTTRTQLPPAYTNSFTRGVYYPDKVFRSSVLHSTQDLFLPFFSNVTWFHAIHVSGTNGTKRFDNPVLPFNDGVYFASTEKSNIIRGWIFGTTLDSKTQSLLIVNNATNVVIKVCEFQFCNDPFLGVYYHKNNKSWMESEFRVYSSANNCTFEYVSQPFLMDLEGKQGNFKNLREFVFKNIDGYFKIYSKHTPINLVRDLPQGFSALEPLVDLPIGINITRFQTLLALHRSYLTPGDSSSGWTAGAAAYYVGYLQPRTFLLKYNENGTITDAVDCALDPLSETKCTLKSFTVEKGIYQTSNFRVQPTESIVRFPNITNLCPFGEVFNATRFASVYAWNRKRISNCVADYSVLYNSASFSTFKCYGVSPTKLNDLCFTNVYADSFVIRGDEVRQIAPGQTGKIADYNYKLPDDFTGCVIAWNSNNLDSKVGGNYNYLYRLFRKSNLKPFERDISTEIYQAGSTPCNGVEGFNCYFPLQSYGFQPTNGVGYQPYRVVVLSFELLHAPATVCGPKKSTNLVKNKCVNFNFNGLTGTGVLTESNKKFLPFQQFGRDIADTTDAVRDPQTLEILDITPCSFGGVSVITPGTNTSNQVAVLYQGVNCTEVPVAIHADQLTPTWRVYSTGSNVFQTRAGCLIGAEHVNNSYECDIPIGAGICASYQTQTNSPRRARSVASQSIIAYTMSLGAENSVAYSNNSIAIPTNFTISVTTEILPVSMTKTSVDCTMYICGDSTECSNLLLQYGSFCTQLNRALTGIAVEQDKNTQEVFAQVKQIYKTPPIKDFGGFNFSQILPDPSKPSKRSFIEDLLFNKVTLADAGFIKQYGDCLGDIAARDLICVQKFNGLTVLPPLLTDEMIAQYTSALLAGTITSGWTFGAGAALQIPFAMQMAYRFNGIGVTQNVLYENQKLIANQFNSAIGKIQDSLSSTASALGKLQDVVNQNAQALNTLVKQLSSNCGAISSVLNDILSRLDKVEAEVQIDRLITCRLQSLQTYVTQQLIRAAEIRASANLAATKMSECVLGQSKRVDFCGKGYHLMSFPQSAPHGVVFLHVTYVPAQEKNFTTAPAICHDGKAHFPREGVFVSNGTHWFVTQRNFYEPQIITTDNTFVSGNCDVVIGIVNNTVYDPLQPELDSGGSGYIPEAPRDGQAYVRKDGEWVLLSTFL

SEQ ID NO: 10421 - protein, 1177 aa, Artificial Sequence
  SARS-CoV-2/Finland/FIN03032020A/2020__EPI_ISL_413602 spike protein (1-1147)(F970C_G999C) Foldon construct
MFVFLVLLPLVSSQCVNLTTRTQLPPAYTNSFTRGVYYPDKVFRSSVLHSTQDLFLPFFSNVTWFHAIHVSGTNGTKRFDNPVLPFNDGVYFASTEKSNIIRGWIFGTTLDSKTQSLLIVNNATNVVIKVCEFQFCNDPFLGVYYHKNNKSWMESEFRVYSSANNCTFEYVSQPFLMDLEGKQGNFKNLREFVFKNIDGYFKIYSKHTPINLVRDLPQGFSALEPLVDLPIGINITRFQTLLALHRSYLTPGDSSSGWTAGAAAYYVGYLQPRTFLLKYNENGTITDAVDCALDPLSETKCTLKSFTVEKGIYQTSNFRVQPTESIVRFPNITNLCPFGEVFNATRFASVYAWNRKRISNCVADYSVLYNSASFSTFKCYGVSPTKLNDLCFTNVYADSFVIRGDEVRQIAPGQTGKIADYNYKLPDDFTGCVISWNSNNLDSKVGGNYNYLYRLFRKSNLKPFERDISTEIYQAGSTPCNGVEGFNCYFPLQSYGFQPTNGVGYQPYRVVVLSFELLHAPATVCGPKKSTNLVKNKCVNFNFNGLTGTGVLTESNKKFLPFQQFGRDIADTTDAVRDPQTLEILDITPCSFGGVSVITPGTNTSNQVAVLYQGVNCTEVPVAIHADQLTPTWRVYSTGSNVFQTRAGCLIGAEHVNNSYECDIPIGAGICASYQTQTNSPRRARSVASQSIIAYTMSLGAENSVAYSNNSIAIPTNFTISVTTEILPVSMTKTSVDCTMYICGDSTECSNLLLQYGSFCTQLNRALTGIAVEQDKNTQEVFAQVKQIYKTPPIKDFGGFNFSQILPDPSKPSKRSFIEDLLFNKVTLADAGFIKQYGDCLGDIAARDLICAQKFNGLTVLPPLLTDEMIAQYTSALLAGTITSGWTFGAGAALQIPFAMQMAYRFNGIGVTQNVLYENQKLIANQFNSAIGKIQDSLSSTASALGKLQDVVNQNAQALNTLVKQLSSNCGAISSVLNDILSRLDKVEAEVQIDRLITCRLQSLQTYVTQQLIRAAEIRASANLAATKMSECVLGQSKRVDFCGKGYHLMSFPQSAPHGVVFLHVTYVPAQEKNFTTAPAICHDGKAHFPREGVFVSNGTHWFVTQRNFYEPQIITTDNTFVSGNCDVVIGIVNNTVYDPLQPELDSGGSGYIPEAPRDGQAYVRKDGEWVLLSTFL

SEQ ID NO: 10422 - protein, 1177 aa, Artificial Sequence
  SARS-CoV-2/France/GE1977/2020__EPI_ISL_414632 spike protein (1-1147)(F970C_G999C) Foldon construct
MFVFLVLLPLVSSQCVNLTTRTQLPPAYTNSFTRGVYYPDKVFRSSVLHSTQDLFLPFFSNVTWFHAIHVSGTNGTKRFDNPVLPFNDGVYFASTEKSNIIRGWIFGTTLDSKTQSLLIVNNATNVVIKVCEFQFCNDPFLGVYYHKNNKSWMESEFRVYSSANNCTFEYVSQPFLMDLEGKQGNFKNLREFVFKNIDGYFKIYSKHTPINLVRDLPQGFSALEPLVDLPIGINITRFQTLLALHRSYLTPGDSSSGWTAGAAAYYVGYLQPRTFLLKYNENGTITDAVDCALDPLSETKCTLKSFTVEKGIYQTSNFRVQPTESIVRFPNITNLCPFGEVFNATRFASVYAWNRKRISNCVADYSVLYNSASFSTFKCYGVSPTKLNDLCFTNVYADSFVIRGDEVRQIAPGQTGKIADYNYKLPDDFTGCVIAWNSNNLDSKVGGNYNYLYRLFRKSNLKPFERDISTEIYQAGSTPCNGVEGFNCYFPLQSYGFQPTNGVGYQPYRVVVLSFELLHAPATVCGPKKSTNLVKNKCVNFNFNGLTGTGVLTESNKKFLPFQQFGRDIADTTDAVRDPQTLEILDITPCSFGGVSVITPGTNTSNQVAVLYQGVNCTEVPVAIHADQLTPTWRVYSTGSNVFQTRAGCLIGAEHVNNSYECDIPIGAGICASYQTQTNSPRRARSVASQSIIAYTMSLGAENSVAYSNNSIAIPTNFTISVTTEILPVSMTKTSVDCTMYICGDSTECSNLLLQYGSFCTQLNRALTGIAVEQDKNTQEVFAQVKQIYKTPPIKDFGGFNFSQILPDPSKPSKRSFIEDLLFNKVTLADAGFIKQYGDCLGDIAARDLICAQKFNGLTVLPPLLTDEMIAQYTSALLAGTITSGWTFGAGAALQIPFAMQMAYRFNGIGVTQNVLYENQKLIANQFNSAIGKIQDSLFSTASALGKLQDVVNQNAQALNTLVKQLSSNCGAISSVLNDILSRLDKVEAEVQIDRLITCRLQSLQTYVTQQLIRAAEIRASANLAATKMSECVLGQSKRVDFCGKGYHLMSFPQSAPHGVVFLHVTYVPAQEKNFTTAPAICHDGKAHFPREGVFVSNGTHWFVTQRNFYEPQIITTDNTFVSGNCDVVIGIVNNTVYDPLQPELDSGGSGYIPEAPRDGQAYVRKDGEWVLLSTFL

SEQ ID NO: 10423 - protein, 1177 aa, Artificial Sequence
  SARS-CoV-2/Finland/FIN-313/2020__EPI_ISL_414641 spike protein (1-1147)(F970C_G999C) Foldon construct
MFVFLVLLPLVSSQCVNLTTRTQLPPAYTNSFTRGVYYPDKVFRSSVLHSTQDLFLPFFSNVTWFHAIHVSGTNGTKRFDNPVLPFNDGVYFASTEKSNIIRGWIFGTTLDSKTQSLLIVNNATNVVIKVCEFQFCNDPFLGVYYHKNNKSWMESEFRVYSSANNCTFEYVSQPFLMDLEGKQGNFKNLREFVFKNIDGYFKIYSKHTPINLVRDLPQGFSALEPLVDLPIGINITRFKTLLALHRSYLTPGDSSSGWTAGAAAYYVGYLQPRTFLLKYNENGTITDAVDCALDPLSETKCTLKSFTVEKGIYQTSNFRVQPTESIVRFPNITNLCPFGEVFNATRFASVYAWNRKRISNCVADYSVLYNSASFSTFKCYGVSPTKLNDLCFTNVYADSFVIRGDEVRQIAPGQTGKIADYNYKLPDDFTGCVIAWNSNNLDSKVGGNYNYLYRLFRKSNLKPFERDISTEIYQAGSTPCNGVEGFNCYFPLQSYGFQPTNGVGYQPYRVVVLSFELLHAPATVCGPKKSTNLVKNKCVNFNFNGLTGTGVLTESNKKFLPFQQFGRDIADTTDAVRDPQTLEILDITPCSFGGVSVITPGTNTSNQVAVLYQGVNCTEVPVAIHADQLTPTWRVYSTGSNVFQTRAGCLIGAEHVNNSYECDIPIGAGICASYQTQTNSPRRARSVASQSIIAYTMSLGAENSVAYSNNSIAIPTNFTISVTTEILPVSMTKTSVDCTMYICGDSTECSNLLLQYGSFCTQLNRALTGIAVEQDKNTQEVFAQVKQIYKTPPIKDFGGFNFSQILPDPSKPSKRSFIEDLLFNKVTLADAGFIKQYGDCLGDIAARDLICAQKFNGLTVLPPLLTDEMIAQYTSALLAGTITSGWTFGAGAALQIPFAMQMAYRFNGIGVTQNVLYENQKLIANQFNSAIGKIQDSLSSTASALGKLQDVVNQNAQALNTLVKQLSSNCGAISSVLNDILSRLDKVEAEVQIDRLITCRLQSLQTYVTQQLIRAAEIRASANLAATKMSECVLGQSKRVDFCGKGYHLMSFPQSAPHGVVFLHVTYVPAQEKNFTTAPAICHDGKAHFPREGVFVSNGTHWFVTQRNFYEPQIITTDNTFVSGNCDVVIGIVNNTVYDPLQPELDSGGSGYIPEAPRDGQAYVRKDGEWVLLSTFL

SEQ ID NO: 10424 - protein, 1177 aa, Artificial Sequence
  SARS-CoV-2/Netherlands/ZuidHolland_2/2020__EPI_ISL_414556 spike protein (1-1147)(F970C_G999C) Foldon construct
MFVFLVLLPLVSSQCVNLTTRTQLPPAYTNSFTRGVYYPDKVFRSSVLHSTQDLFLPFFSNVTWFHAIHVSGTNGTKRFDNPVLPFNDGVYFASTEKSNIIRGWIFGTTLDSKTQSLLIVNNATNVVIKVCEFQFCNDPFLGVYYHKNNKSWMESEFRVYSSANNCTFEYVSQPFLMDLEGKQGNFKNLREFVFKNIDGYFKIYSKHTPINLVRDLPQGFSALEPLVDLPIGINITRFQTLLALHRSYLTPGDSSSGWTAGAAAYYVGYLQPRTFLLKYNENGTITDAVDCALDPLSETKCTLKSFTVEKGIYQTSNFRVQPTESIVRFPNITNLCPFGEVFNATRFASVYAWNRKRISNCVADYSVLYNSASFSTFKCYGVSPTKLNDLCFTNVYADSFVIRGDEVRQIAPGQTGKIADYNYKLPDDFTGCVIAWNSNNLDSKVGGNYNYLYRLFRKSNLKPFERDISTEIYQAGSTPCNGVEGFNCYFPLQSYGFQPTNGVGYQPYRVVVLSFELLHAPATVCGPKKSTNLVKNKCVNFNFNGLTGTGVLTESNKKFLPFQQFGRDIADTTDAVRDPQTLEILDITPCSFGGVSVITPGTNTSNQVAVLYQGVNCTEVPVAIHADQLTPTWRVYSTGSNVFQTRAGCLIGAEHVNNSYECDIPIGAGICASYQTQTNSPRRARSVASQSIIAYTMSLGAENSVAYSNNSIAIPTNFTISVTTEILPVSMTKTSVDCTMYICGDSTECSNLLLQYGSFCTQLNRALTGIALEQDKNTQEVFAQVKQIYKTPPIKDFGGFNFSQILPDPSKPSKRSFIEDLLFNKVTLADAGFIKQYGDCLGDIAARDLICAQKFNGLTVLPPLLTDEMIAQYTSALLAGTITSGWTFGAGAALQIPFAMQMAYRFNGIGVTQNVLYENQKLIANQFNSAIGKIQDSLSSTASALGKLQDVVNQNAQALNTLVKQLSSNCGAISSVLNDILSRLDKVEAEVQIDRLITCRLQSLQTYVTQQLIRAAEIRASANLAATKMSECVLGQSKRVDFCGKGYHLMSFPQSAPHGVVFLHVTYVPAQEKNFTTAPAICHDGKAHFPREGVFVSNGTHWFVTQRNFYEPQIITTDNTFVSGNCDVVIGIVNNTVYDPLQPELDSGGSGYIPEAPRDGQAYVRKDGEWVLLSTFL

SEQ ID NO: 10425 - protein, 1177 aa, Artificial Sequence
  SARS-CoV-2/USA/WA-UW31/2020__EPI_ISL_414618 spike protein (1-1147)(F970C_G999C) Foldon construct
MFVFLVLLPLVSSQCVNLTTRTQLPPAYTNSFTRGVYYPDKVFRSSVLHSTQDLFLPFFSNVTWFHAIHVSGTNGTKRFDNPVLPFNDGVYFASTEKSNIIRGWIFGTTLDSKTQSLLIVNNATNVVIKVCEFQFCNDPFLGVYYHKNNKSWMESEFRVYSSANNCTFEYVSQPFLMDLEGKQGNFKNLREFVFKNIDGYFKIYSKHTPINLVRDLPQGFSALEPLVDLPIGINITRFQTLLALHRSYLTPGDSSSGWTAGAAAYYVGYLQPRTFLLKYNENGTITDAVDCALDPLSETKCTLKSFTVEKGIYQTSNFRVQPTESIVRFPNITNLCPFGEVFNATRFASVYAWNRKRISNCVADYSVLYNSASFSTFKCYGVSPTKLNDLCFTNVYADSFVIRGDEVRQIAPGQTGKIADYNYKLPDDFTGCVIAWNSNNLDSKVGGNYNYLYRLFRKSNLKPFERDISTEIYQAGSTPCNGAEGFNCYFPLQSYGFQPTNGVGYQPYRVVVLSFELLHAPATVCGPKKSTNLVKNKCVNFNFNGLTGTGVLTESNKKFLPFQQFGRDIADTTDAVRDPQTLEILDITPCSFGGVSVITPGTNTSNQVAVLYQDVNCTEVPVAIHADQLTPTWRVYSTGSNVFQTRAGCLIGAEHVNNSYECDIPIGAGICASYQTQTNSPRRARSVASQSIIAYTMSLGAENSVAYSNNSIAIPTNFTISVTTEILPVSMTKTSVDCTMYICGDSTECSNLLLQYGSFCTQLNRALTGIAVEQDKNTQEVFAQVKQIYKTPPIKDFGGFNFSQILPDPSKPSKRSFIEDLLFNKVTLADAGFIKQYGDCLGDIAARDLICAQKFNGLTVLPPLLTDEMIAQYTSALLAGTITSGWTFGAGAALQIPFAMQMAYRFNGIGVTQNVLYENQKLIANQFNSAIGKIQDSLSSTASALGKLQDVVNQNAQALNTLVKQLSSNCGAISSVLNDILSRLDKVEAEVQIDRLITCRLQSLQTYVTQQLIRAAEIRASANLAATKMSECVLGQSKRVDFCGKGYHLMSFPQSAPHGVVFLHVTYVPAQEKNFTTAPAICHDGKAHFPREGVFVSNGTHWFVTQRNFYEPQIITTDNTFVSGNCDVVIGIVNNTVYDPLQPELDSGGSGYIPEAPRDGQAYVRKDGEWVLLSTFL

SEQ ID NO: 10426 - protein, 1177 aa, Artificial Sequence
  SARS-CoV-2/South Korea/SNU01/2020__EPI_ISL_411929 spike protein (1-1147)(F970C_G999C) Foldon construct
MFVFLVLLPLVSSQCVNLTTRTQLPPAYTNSFTRGVYYPDKVFRSSVLHSTQDLFLPFFSNVTWFHAIHVSGTNGTKRFDNPVLPFNDGVYFASTEKSNIIRGWIFGTTLDSKTQSLLIVNNATNVVIKVCEFQFCNDPFLGVYYHKNNKSWMESEFRVYSSANNCTFEYVSQPFLMDLEGKQGNFKNLREFVFKNIDGYFKIYSKHTPINLVRDLPQGFWALEPLVDLPIGINITRFQTLLALHRSYLTPGDSSSGWTAGAAAYYVGYLQPRTFLLKYNENGTITDAVDCALDPLSETKCTLKSFTVEKGIYQTSNFRVQPTESIVRFPNITNLCPFGEVFNATRFASVYAWNRKRISNCVADYSVLYNSASFSTFKCYGVSPTKLNDLCFTNVYADSFVIRGDEVRQIAPGQTGKIADYNYKLPDDFTGCVIAWNSNNLDSKVGGNYNYLYRLFRKSNLKPFERDISTEIYQAGSTPCNGVEGFNCYFPLQSYGFQPTNGVGYQPYRVVVLSFELLHAPATVCGPKKSTNLVKNKCVNFNFNGLTGTGVLTESNKKFLPFQQFGRDIADTTDAVRDPQTLEILDITPCSFGGVSVITPGTNTSNQVAVLYQDVNCTEVPVAIHADQLTPTWRVYSTGSNVFQTRAGCLIGAEHVNNSYECDIPIGAGICASYQTQTNSPRRARSVASQSIIAYTMSLGAENSVAYSNNSIAIPTNFTISVTTEILPVSMTKTSVDCTMYICGDSTECSNLLLQYGSFCTQLNRALTGIAVEQDKNTQEVFAQVKQIYKTPPIKDFGGFNFSQILPDPSKPSKRSFIEDLLFNKVTLADAGFIKQYGDCLGDIAARDLICAQKFNGLTVLPPLLTDEMIAQYTSALLAGTITSGWTFGAGAALQIPFAMQMAYRFNGIGVTQNVLYENQKLIANQFNSAIGKIQDSLSSTASALGKLQDVVNQNAQALNTLVKQLSSNCGAISSVLNDILSRLDKVEAEVQIDRLITCRLQSLQTYVTQQLIRAAEIRASANLAATKMSECVLGQSKRVDFCGKGYHLMSFPQSAPHGVVFLHVTYVPAQEKNFTTAPAICHDGKAHFPREGVFVSNGTHWFVTQRNFYEPQIITTDNTFVSGNCDVVIGIVNNTVYDPLQPELDSGGSGYIPEAPRDGQAYVRKDGEWVLLSTFL

SEQ ID NO: 10427 - protein, 1177 aa, Artificial Sequence
  SARS-CoV-2/China/WF0004/2020__EPI_ISL_413694 spike protein (1-1147)(F970C_G999C) Foldon construct
MFVFLVLLPLVSSQCVNLTTRTQLPPAYTNSFTRGVYYPDKVFRSSVLHSTQDLFLPFFSNVTWFHAIHVSGTNGTKRFDNPVLPFNDGVYFASTEKSNIIRGWIFGTTLDSKTQSLLIVNNATNVVIKVCEFQFCNDPFLGVYYHKNNKSWTESEFRVYSSANNCTFEYVSQPFLMDLEGKQGNFKNLREFVFKNIDGYFKIYSKHTPINLVRDLPQGFSALEPLVDLPIGINITRFQTLLALHRSYLTPGDSSSGWTAGAAAYYVGYLQPRTFLLKYNENGTITDAVDCALDPLSETKCTLKSFTVEKGIYQTSNFRVQPTESIVRFPNITNLCPFGEVFNATRFASVYAWNRKRISNCVADYSVLYNSASFSTFKCYGVSPTKLNDLCFTNVYADSFVIRGDEVRQIAPGQTGKIADYNYKLPDDFTGCVIAWNSNNLDSKVGGNYNYLYRLFRKSNLKPFERDISTEIYQAGSTPCNGVEGFNCYFPLQSYGFQPTNGVGYQPYRVVVLSFELLHAPATVCGPKKSTNLVKNKCVNFNFNGLTGTGVLTESNKKFLPFQQFGRDIADTTDAVRDPQTLEILDITPCSFGGVSVITPGTNTSNQVAVLYQDVNCTEVPVAIHADQLTPTWRVYSTGSNVFQTRAGCLIGAEHVNNSYECDIPIGAGICASYQTQTNSPRRARSVASQSIIAYTMSLGAENSVAYSNNSIAIPTNFTISVTTEILPVSMTKTSVDCTMYICGDSTECSNLLLQYGSFCTQLNRALTGIAVEQDKNTQEVFAQVKQIYKTPPIKDFGGFNFSQILPDPSKPSKRSFIEDLLFNKVTLADAGFIKQYGDCLGDIAARDLICAQKFNGLTVLPPLLTDEMIAQYTSALLAGTITSGWTFGAGAALQIPFAMQMAYRFNGIGVTQNVLYENQKLIANQFNSAIGKIQDSLSSTASALGKLQDVVNQNAQALNTLVKQLSSNCGAISSVLNDILSRLDKVEAEVQIDRLITCRLQSLQTYVTQQLIRAAEIRASANLAATKMSECVLGQSKRFDFCGKGYHLMSFPQSAPHGVVFLHVTYVPAQEKNFTTAPAICHDGKAHFPREGVFVSNGTHWFVTQRNFYEPQIITTDNTFVSGNCDVVIGIVNNTVYDPLQPELDSGGSGYIPEAPRDGQAYVRKDGEWVLLSTFL

SEQ ID NO: 10428 - protein, 1177 aa, Artificial Sequence
  SARS-CoV-2/China/WF0028/2020__EPI_ISL_413791 spike protein (1-1147)(F970C_G999C) Foldon construct
MFVFLVLLPLVSSQCVNLTTRTQLPPAYTNSFTRGVYYPDKVFRSSVLHSTQDLFLPFFSNVTWFHAIHVSGTNGTKRFDNPVLPFNDGVYFASTEKSNIIRGWIFGTTLDSKTQSLLIVNNATNVVIKVCEFQFCNDPFLGVYYHKNNKSWMESEFRVYSSANNCTFEYVSQPFLMDLEGKQGNFKNLREFVFKNIDGYFKIYSKHTPINLVRDLPQGFSALEPLVDLPIGINITRFQTLLALHRSYLTPGDSSSGWTAGAAAYYVGYLQPRTFLLKYNENGTITDAVDCALDPLSETKCTLKSFTVEKGIYQTSNFRVQPTESIVRFPNITNLCPFGEVFNATRFASVYAWNRKRISNCVADYSVLYNSASFSTFKCYGVSPTKLNDLCFTNVYADSFVIRGDEVRQIAPGQTGKIADYNYKLPDDFTGCVIAWNSNNLDSKVGGNYNYLYRLFRKSNLKPFERDISTEIYQAGSTPCNGVEGFNCYFPLQSYGFQPTNGVGYQPYRVVVLSFELLHAPATVCGPKKSTNLVKNKCVNFNFNGLTGTGVLTESNKKFLPFQQFGRDIADTTDAVRDPQTLEILDITPCSFGGVSVITPGTNTSNQVAVLYQDVNCTEVPVAIHADQLTPTWRVYSTGSNVFQTRAGCLIGAEHVNNSYECDIPIGAGICASYQTQTNSPRRARSVASQSIIAYTMSLGAENSVAYSNNSIAIPTNFTISVTTEILPVSMTKTSVDCTMYICGDSTECSNLLLQYGSFCTQLNRALTGIAVEQDKNTQEVFAQVKQIYKTPPIKDFGGFNFSQILPDPSKPSKRSFIEDLLFNKVTLADAGFIKQYGDCLGDIAARDLICAQKFNGLTVLPPLLTDEMIAQYTSALLAGTITSGWTFGAGAALQIPFAMQMAYRFNGIGVTQNVLYENQKLIANQFNSAIGKIQDSLSSTASALGKLQDVVNQNAQALNTLVKQLSSNCGAISSVLNDILSRLDKVEAEVQIDRLITCRLQSLQTYVTQQLIRAAEIRASANLAATKMSECVLGQSKRVDFCGKGYHLMSFPQSAPHGVVFLHVTYVPAQEKNFTTAPAICHDGKAHFPREGVFVSNGTHWFVTQRNFYEPQIITTDNTFVSGNCDVVIGIVNNTVYDPLQPELESGGSGYIPEAPRDGQAYVRKDGEWVLLSTFL

SEQ ID NO: 10429 - protein, 1177 aa, Artificial Sequence
  SARS-CoV-2/2019-nCoV/USA-CruiseA-18/2020__MT159716.1 spike protein (1-1147)(F970C_G999C) Foldon construct
MFVFLVLLPLVSSQCVNLTTRTQLPPAYTNSFTRGVYYPDKVFRSSVLHSTQDLFLPFFSNVTWFHAIHVSGTNGTKRFDNPVLPFNDGVYFASTEKSNIIRGWIFGTTLDSKTQSLLIVNNATNVVIKVCEFQFCNDPFLGVYYHKNNKSWMESELRVYSSANNCTFEYVSQPFLMDLEGKQGNFKNLREFVFKNIDGYFKIYSKHTPINLVRDLPQGFSALEPLVDLPIGINITRFQTLLALHRSYLTPGDSSSGWTAGAAAYYVGYLQPRTFLLKYNENGTITDAVDCALDPLSETKCTLKSFTVEKGIYQTSNFRVQPTESIVRFPNITNLCPFGEVFNATRFASVYAWNRKRISNCVADYSVLYNSASFSTFKCYGVSPTKLNDLCFTNVYADSFVIRGDEVRQIAPGQTGKIADYNYKLPDDFTGCVIAWNSNNLDSKVGGNYNYLYRLFRKSNLKPFERDISTEIYQAGSTPCNGVEGFNCYFPLQSYGFQPTNGVGYQPYRVVVLSFELLHAPATVCGPKKSTNLVKNKCVNFNFNGLTGTGVLTESNKKFLPFQQFGRDIADTTDAVRDPQTLEILDITPCSFGGVSVITPGTNTSNQVAVLYQDVNCTEVPVAIHADQLTPTWRVYSTGSNVFQTRAGCLIGAEHVNNSYECDIPIGAGICASYQTQTNSPRRARSVASQSIIAYTMSLGAENSVAYSNNSIAIPTNFTISVTTEILPVSMTKTSVDCTMYICGDSTECSNLLLQYGSFCTQLNRALTGIAVEQDKNTQEVFAQVKQIYKTPPIKDFGGFNFSQILPDPSKPSKRSFIEDLLFNKVTLADAGFIKQYGDCLGDIAARDLICAQKFNGLTVLPPLLTDEMIAQYTSALLAGTITSGWTFGAGAALQIPFAMQMAYRFNGIGVTQNVLYENQKLIANQFNSAIGKIQDSLSSTASALGKLQDVVNQNAQALNTLVKQLSSNCGAISSVLNDILSRLDKVEAEVQIDRLITCRLQSLQTYVTQQLIRAAEIRASANLAATKMSECVLGQSKRVDFCGKGYHLMSFPQSAPHGVVFLHVTYVPAQEKNFTTAPAICHDGKAHFPREGVFVSNGTHWFVTQRNFYEPQIITTDNTFVSGNCDVVIGIVNNTVYDPLQPELDSGGSGYIPEAPRDGQAYVRKDGEWVLLSTFL

SEQ ID NO: 10430 - protein, 1177 aa, Artificial Sequence
  SARS-CoV-2/SARS-CoV-2/Yunnan-01/human/2020/CHN__MT049951.1 spike protein (1-1147)(F970C_G999C) Foldon construct
MFVFLVLLPLVSSQCVNLTTRTQLPPANTNSFTRGVYYPDKVFRSSVLHSTQDLFLPFFSNVTWFHAIHVSGTNGTKRFDNPVLPFNDGVYFASTEKSNIIRGWIFGTTLDSKTQSLLIVNNATNVVIKVCEFQFCNDPFLGVYYHKNNKSWMESEFRVYSSANNCTFEYVSQPFLMDLEGKQGNFKNLREFVFKNIDGYFKIYSKHTPINLVRDLPQGFSALEPLVDLPIGINITRFQTLLALHRSYLTPGDSSSGWTAGAAAYYVGYLQPRTFLLKYNENGTITDAVDCALDPLSETKCTLKSFTVEKGIYQTSNFRVQPTESIVRFPNITNLCPFGEVFNATRFASVYAWNRKRISNCVADYSVLYNSASFSTFKCYGVSPTKLNDLCFTNVYADSFVIRGDEVRQIAPGQTGKIADYNYKLPDDFTGCVIAWNSNNLDSKVGGNYNYLYRLFRKSNLKPFERDISTEIYQAGSTPCNGVEGFNCYFPLQSYGFQPTNGVGYQPYRVVVLSFELLHAPATVCGPKKSTNLVKNKCVNFNFNGLTGTGVLTESNKKFLPFQQFGRDIADTTDAVRDPQTLEILDITPCSFGGVSVITPGTNTSNQVAVLYQDVNCTEVPVAIHADQLTPTWRVYSTGSNVFQTRAGCLIGAEHVNNSYECDIPIGAGICASYQTQTNSPRRARSVASQSIIAYTMSLGAENSVAYSNNSIAIPTNFTISVTTEILPVSMTKTSVDCTMYICGDSTECSNLLLQYGSFCTQLNRALTGIAVEQDKNTQEVFAQVKQIYKTPPIKDFGGFNFSQILPDPSKPSKRSFIEDLLFNKVTLADAGFIKQYGDCLGDIAARDLICAQKFNGLTVLPPLLTDEMIAQYTSALLAGTITSGWTFGAGAALQIPFAMQMAYRFNGIGVTQNVLYENQKLIANQFNSAIGKIQDSLSSTASALGKLQDVVNQNAQALNTLVKQLSSNCGAISSVLNDILSRLDKVEAEVQIDRLITCRLQSLQTYVTQQLIRAAEIRASANLAATKMSECVLGQSKRVDFCGKGYHLMSFPQSAPHGVVFLHVTYVPAQEKNFTTAPAICHDGKAHFPREGVFVSNGTHWFVTQRNFYEPQIITTDNTFVSGNCDVVIGIVNNTVYDPLQPELDSGGSGYIPEAPRDGQAYVRKDGEWVLLSTFL

SEQ ID NO: 10431 - protein, 1177 aa, Artificial Sequence
  SARS-CoV-2/USA/WA-UW292/2020__EPI_ISL_418077 spike protein (1-1147)(F970C_G999C) Foldon construct
MFVFLVLLPLVSSQCVNLTTRTQLPPAYTNSFTRGVYYPDKVFRSSVLHSTQDLFLPFFSNVTWFHAIHVSGTNGTKRFDNPVLPFNDGVYFASTEKSNIIRGWIFGTTLDSKTQSLLIVNNATNVVIKVCEFQFCNDPFLGVYYHKNNKSWMESEFRVYSSANNCTFEYVSQPFLMDLEGKQGNFKNLREFVFKNIDGYFKIYSKHTPINLVRDLPQGFSALEPLVDLPIGINITRFQTLLALHRSYLTPGDSSSGWTAGAAAYYVGYLQPRTFLLKYNENGTITDAVDCALDPLSETKCTLKSFTVEKGIYQTSNFRVQPTESIVRFPNITNLCPFGEVFNATRFASVYAWNRKRISNCVADYSVLYNSASFSTFKCYGVSPTKLNDLCFTNVYADSFVIRGDEVRQIAPGQTGKIADYNYKLPDDFTGCVIAWNSNNLDSKVGGNYNYLYRLFRKSNLKPFERDISTEIYQASSTPCNGVEGFNCYFPLQSYGFQPTNGVGYQPYRVVVLSFELLHAPATVCGPKKSTNLVKNKCVNFNFNGLTGTGVLTESNKKFLPFQQFGRDIADTTDAVRDPQTLEILDITPCSFGGVSVITPGTNTSNQVAVLYQDVNCTEVPVAIHADQLTPTWRVYSTGSNVFQTRAGCLIGAEHVNNSYECDIPIGAGICASYQTQTNSPRRARSVASQSIIAYTMSLGAENSVAYSNNSIAIPTNFTISVTTEILPVSMTKTSVDCTMYICGDSTECSNLLLQYGSFCTQLNRALTGIAVEQDKNTQEVFAQVKQIYKTPPIKDFGGFNFSQILPDPSKPSKRSFIEDLLFNKVTLADAGFIKQYGDCLGDIAARDLICAQKFNGLTVLPPLLTDEMIAQYTSALLAGTITSGWTFGAGAALQIPFAMQMAYRFNGIGVTQNVLYENQKLIANQFNSAIGKIQDSLSSTASALGKLQDVVNQNAQALNTLVKQLSSNCGAISSVLNDILSRLDKVEAEVQIDRLITCRLQSLQTYVTQQLIRAAEIRASANLAATKMSECVLGQSKRVDFCGKGYHLMSFPQSAPHGVVFLHVTYVPAQEKNFTTAPAICHDGKAHFPREGVFVSNGTHWFVTQRNFYEPQIITTDNTFVSGNCDVVIGIVNNTVYDPLQPELDSGGSGYIPEAPRDGQAYVRKDGEWVLLSTFL

SEQ ID NO: 10432 - protein, 1177 aa, Artificial Sequence
  SARS-CoV-2/Iceland/192/2020__EPI_ISL_417819 spike protein (1-1147)(F970C_G999C) Foldon construct
MFVFFVLLPLVSSQCVNLTTRTQLPPAYTNSFTRGVYYPDKVFRSSVLHSTQDLFLPFFSNVTWFHAIHVSGTNGTKRFDNPVLPFNDGVYFASTEKSNIIRGWIFGTTLDSKTQSLLIVNNATNVVIKVCEFQFCNDPFLGVYYHKNNKSWMESEFRVYSSANNCTFEYVSQPFLMDLEGKQGNFKNLREFVFKNIDGYFKIYSKHTPINLVRDLPQGFSALEPLVDLPIGINITRFQTLLALHRSYLTPGDSSSGWTAGAAAYYVGYLQPRTFLLKYNENGTITDAVDCALDPLSETKCTLKSFTVEKGIYQTSNFRVQPTESIVRFPNITNLCPFGEVFNATRFASVYAWNRKRISNCVADYSVLYNSASFSTFKCYGVSPTKLNDLCFTNVYADSFVIRGDEVRQIAPGQTGKIADYNYKLPDDFTGCVIAWNSNNLDSKVGGNYNYLYRLFRKSNLKPFERDISTEIYQAGSTPCNGVEGFNCYFPLQSYGFQPTNGVGYQPYRVVVLSFELLHAPATVCGPKKSTNLVKNKCVNFNFNGLTGTGVLTESNKKFLPFQQFGRDIADTTDAVRDPQTLEILDITPCSFGGVSVITPGTNTSNQVAVLYQGVNCTEVPVAIHADQLTPTWRVYSTGSNVFQTRAGCLIGAEHVNNSYECDIPIGAGICASYQTQTNSPRRARSVASQSIIAYTMSLGAENSVAYSNNSIAIPTNFTISVTTEILPVSMTKTSVDCTMYICGDSTECSNLLLQYGSFCTQLNRALTGIAVEQDKNTQEVFAQVKQIYKTPPIKDFGGFNFSQILPDPSKPSKRSFIEDLLFNKVTLADAGFIKQYGDCLGDIAARDLICAQKFNGLTVLPPLLTDEMIAQYTSALLAGTITSGWTFGAGAALQIPFAMQMAYRFNGIGVTQNVLYENQKLIANQFNSAIGKIQDSLSSTASALGKLQDVVNQNAQALNTLVKQLSSNCGAISSVLNDILSRLDKVEAEVQIDRLITCRLQSLQTYVTQQLIRAAEIRASANLAATKMSECVLGQSKRVDFCGKGYHLMSFPQSAPHGVVFLHVTYVPAQEKNFTTAPAICHDGKAHFPREGVFVSNGTHWFVTQRNFYEPQIITTDNTFVSGNCDVVIGIVNNTVYDPLQPELDSGGSGYIPEAPRDGQAYVRKDGEWVLLSTFL

SEQ ID NO: 10433 - protein, 1177 aa, Artificial Sequence
  SARS-CoV-2/Belgium/ULG-6939/2020__EPI_ISL_417020 spike protein (1-1147)(F970C_G999C) Foldon construct
MFVFLVLLPLVSSQCVNLTTRTQLPPAYTNSFTRGVYYPDKVFRSSVLHSTQDLFLPFFSNVTWFHAIHVSGTNGTKRFDNPVLPFNDGVYFASTEKSNIIRGWIFGTTLDSKTQSLLIVNNATNVVIKVCEFQFCNDPFLGVYYHKNNKSWMESEFRVYSSANNCTFEYVSQPFLMDLEGKQGNFKNLREFVFKNIDGYFKIYSKHTPINLVRDLPQGFSALEPLVDLPIGINITRFQTLLALHRSYLTPGDSSSGWTAGAAAYYVGYLQPRTFLLKYNENGTITDAVDCALDPLSETKCTLKSFTVEKGIYQTSNFRVQPTESIVRFPNITNLCPFGEVFNATRFASVYAWNRKRISNCVADYSVLYNSASFSTFKCYGVSPTKLNDLCFTNVYADSFVIRGDEVRQIAPGQTGKIADYNYKLPDDFTGCVIAWNSNNLDSKVGGNYNYLYRLFRKSNLKPFERDISTEIYQAGSTPCNGVEGFNCYFPLQSYGFQPTNGVGYQPYRVVVLSFELLHAPATVCGPKKSTNLVKNKCVNFNFNGLTGTGVLTESNKKFLPFQQFGRDIADTTDAVRDPQTLEILDITPCSFGGVSVITPGTNTSNQVAVLYQGVNCTEVPVAIHADQLTPTWRVYSTGSNVFQTRAGCLIGAEHVNNSYECDIPIGAGICASYQTQTNSPRRARSVASQSIIAYTMSLGAENSVVYSNNSIAIPTNFTISVTTEILPVSMTKTSVDCTMYICGDSTECSNLLLQYGSFCTQLNRALTGIAVEQDKNTQEVFAQVKQIYKTPPIKDFGGFNFSQILPDPSKPSKRSFIEDLLFNKVTLADAGFIKQYGDCLGDIAARDLICAQKFNGLTVLPPLLTDEMIAQYTSALLAGTITSGWTFGAGAALQIPFAMQMAYRFNGIGVTQNVLYENQKLIANQFNSAIGKIQDSLSSTASALGKLQDVVNQNAQALNTLVKQLSSNCGAISSVLNDILSRLDKVEAEVQIDRLITCRLQSLQTYVTQQLIRAAEIRASANLAATKMSECVLGQSKRVDFCGKGYHLMSFPQSAPHGVVFLHVTYVPAQEKNFTTAPAICHDGKAHFPREGVFVSNGTHWFVTQRNFYEPQIITTDNTFVSGNCDVVIGIVNNTVYDPLQPELDSGGSGYIPEAPRDGQAYVRKDGEWVLLSTFL

SEQ ID NO: 10434 - protein, 1177 aa, Artificial Sequence
  SARS-CoV-2/France/HF2496/2020__EPI_ISL_418231 spike protein (1-1147)(F970C_G999C) Foldon construct
MFVFLVLLPLVSSQCVNLTTRTQLPPAYTNSFTRGVYYPDKVFRSSVLHSTQDLFLPFFSNVTWFHAIHVSGTNGTKRFDNPVLPFNDGVYFASTEKSNIIRGWIFGTTLDSKTQSLLIVNNATNVVIKVCEFQFCNDPFLGVYYHKNNKSWMESEFRVYSSANNCTFEYVSQPFLMDLEGKQGNFKNLREFVFKNIDGYFKIYSKHTPINLVRDLPQGFSALEPLVDLPIGINITRFQTLLALHRSYLTPGDSSSGWTAGAAAYYVGYLQPRTFLLKYNENGTITDAVDCALDPLSETKCTLKSFTVEKGIYQTSNFRVQPTESIVRFPNITNLCPFGEVFNATRFASVYAWNRKRISNCVADYSVLYNSASFSTFKCYGVSPTKLNDLCFTNVYADSFVIRGDEVRQIAPGQTGKIADYNYKLPDDFTGCVIAWNSNNLDSKVGGNYNYLYRLFRKSNLKPFERDISTEIYQAGSTPCNGVEGFNCYFPLQSYGFQPTNGVGYQPYRVVVLSFELLHAPATVCGPKKSTNLVKNKCVNFNFNGLTGTGVLTESNKKFLPFQQFGRDIADTTDAVRDPQTLEILDITPCSFGGVSVITPGTNTSNQVAVLYQGVNCTEVPVAIHADQLTPTWRVYSTGSNVFQTRAGCLIGAEHVNNSYECDIPIGAGICASYQTQTNSPRRARSVASQSIIAYTMSLGAENSVAYSNNSIAIPTNFTISVTTEILPVSMTKTSVDCTMYICGDSTECSNLLLQYGSFCTQLNRALTGIAVEQDKNTQEVFAQVKQIYKTPPIKDFGGFNFSQILPDPSKPSKRSFIEDLLFNKVTLADAGFIKQYGDCLGDIVARDLICAQKFNGLTVLPPLLTDEMIAQYTSALLAGTITSGWTFGAGAALQIPFAMQMAYRFNGIGVTQNVLYENQKLIANQFNSAIGKIQDSLSSTASALGKLQDVVNQNAQALNTLVKQLSSNCGAISSVLNDILSRLDKVEAEVQIDRLITCRLQSLQTYVTQQLIRAAEIRASANLAATKMSECVLGQSKRVDFCGKGYHLMSFPQSAPHGVVFLHVTYVPAQEKNFTTAPAICHDGKAHFPREGVFVSNGTHWFVTQRNFYEPQIITTDNTFVSGNCDVVIGIVNNTVYDPLQPELDSGGSGYIPEAPRDGQAYVRKDGEWVLLSTFL

SEQ ID NO: 10435 - protein, 1177 aa, Artificial Sequence
  SARS-CoV-2/USA/WA-UW291/2020__EPI_ISL_418076 spike protein (1-1147)(F970C_G999C) Foldon construct
MFVFLVLLPLVSSQCVNLTTRTQLPPAYTNSFTRGVYYPDKVFRSSVLHSTQDLFLPFFSNVTWFHAIHVSGTNGTKRFDNPVLPFNDGVYFASTEKSNIIRGWIFGTTLDSKTQSLLIVNNATNVVIKVCEFQFCNDPFLGVYYHKNNKSWMESEFRVYSSANNCTFEYVSQPFLMDLEGKQGNFKNLREFVFKNIDGYFKIYSKHTPINLVRDLPQGFSALEPLVDLPIGINITRFQTLLALHRSYLTPGDSSSGWTAGAAAYYVGYLQPRTFLLKYNENGTITDAVDCALDPLSETKCTLKSFTVEKGIYQTSNFRVQPTESIVRFPNITNLCPFGEVFNATRFASVYAWNRKRISNCVADYSVLYNSASFSTFKCYGVSPTKLNDLCFTNVYADSFVIRGDEVRQIAPGQTGKIADYNYKLPDDFTGCVIAWNSNNLDSKVGGNYNYLYRLFRKSNLKPFERDISTEIYQAGSTPCNGVEGFNCYFPLQSYGFQPTNGVGYQPYRVVVLSFELLHAPATVCGPKKSTNLVKNKCVNFNFNGLTGTGVLTESNKKFLPFQQFGRDIADTTDAVRDPQTLEILDITPCSFGGVSVITPGTNTSNQVAVLYQGVNCTEVPVAIHADQLTPTWRVYSTGSNVFQTRAGCLIGAEHVNNSYECDIPIGAGICASYQTQTNSPRRARSVASQSIIAYTMSLGAENSVAYSNNSIAIPTNFTISVTTEILPVSMTKTSVDCTMYICGDSTECSNLLLQYGSFCTQLNRALTGIAVEQDKNTQEVFAQVKQIYKTPPIKDFGGFNFSQILPDPSKPSKRSFIEDLLFNKVTLADAGFIKQYGDCLGDIAARDLICAQKFNGLTVLPPLLTDEMIAQYTSALLAGTITSGWTFGAGAALQIPFAMQMAYRFNGIGVTQNVLYENQKLIANQFNSAIGKIQYSLSSTASALGKLQDVVNQNAQALNTLVKQLSSNCGAISSVLNDILSRLDKVEAEVQIDRLITCRLQSLQTYVTQQLIRAAEIRASANLAATKMSECVLGQSKRVDFCGKGYHLMSFPQSAPHGVVFLHVTYVPAQEKNFTTAPAICHDGKAHFPREGVFVSNGTHWFVTQRNFYEPQIITTDNTFVSGNCDVVIGIVNNTVYDPLQPELDSGGSGYIPEAPRDGQAYVRKDGEWVLLSTFL

SEQ ID NO: 10436 - protein, 1177 aa, Artificial Sequence; identical to SEQ ID NO: 10399
  SARS-CoV-2/Portugal/PT0034/2020__EPI_ISL_418019 spike protein (1-1147)(F970C_G999C) Foldon construct

SEQ ID NO: 10437 - protein, 1177 aa, Artificial Sequence; identical to SEQ ID NO: 10391
  SARS-CoV-2/Iceland/202/2020__EPI_ISL_417750 spike protein (1-1147)(F970C_G999C) Foldon construct

SEQ ID NO: 10438 - protein, 1177 aa, Artificial Sequence
  SARS-CoV-2/USA/WA-UW261/2020__EPI_ISL_418046 spike protein (1-1147)(F970C_G999C) Foldon construct
MFVFLVLLPLVSSQCVNLTTRTQLPPAYTNSFTRGVYYPDKVFRSSVLHSTQDLFLPFFSNVTWFHAIHVSGTNGTKRFDNPVLPFNDGVYFASTEKSNIIRGWIFGTTLDSKTQSLLIVNNATNVVIKVCEFQFCNDPFLGVYYHKNNKSWMESEFRVYSSANNCTFEYVSQPFLMDLEGKQGNFKNLREFVFKNIDGYFKIYSKHTPINLVRDLPQGFSALEPLVDLPIGINITRFQTLLALHRSYLTPGDSSSGWTAGAAAYYVGYLQPRTFLLKYNENGTITDAVDCALDPLSETKCTLKSFTVEKGIYQTSNFRVQPTESIVRFPNITNLCPFGEVFNATRFTSVYAWNRKRISNCVADYSVLYNSASFSTFKCYGVSPTKLNDLCFTNVYADSFVIRGDEVRQIAPGQTGKIADYNYKLPDDFTGCVIAWNSNNLDSKVGGNYNYLYRLFRKSNLKPFERDISTEIYQAGSTPCNGVEGFNCYFPLQSYGFQPTNGVGYQPYRVVVLSFELLHAPATVCGPKKSTNLVKNKCVNFNFNGLTGTGVLTESNKKFLPFQQFGRDIADTTDAVRDPQTLEILDITPCSFGGVSVITPGTNTSNQVAVLYQDVNCTEVPVAIHADQLTPTWRVYSTGSNVFQTRAGCLIGAEHVNNSYECDIPIGAGICASYQTQTNSPRRARSVASQSIIAYTMSLGAENSVAYSNNSIAIPTNFTISVTTEILPVSMTKTSVDCTMYICGDSTECSNLLLQYGSFCTQLNRALTGIAVEQDKNTQEVFAQVKQIYKTPPIKDFGGFNFSQILPDPSKPSKRSFIEDLLFNKVTLADAGFIKQYGDCLGDIAARDLICAQKFNGLTVLPPLLTDEMIAQYTSALLAGTITSGWTFGAGAALQIPFAMQMAYRFNGIGVTQNVLYENQKLIANQFNSAIGKIQDSLSSTASALGKLQDVVNQNAQALNTLVKQLSSNCGAISSVLNDILSRLDKVEAEVQIDRLITCRLQSLQTYVTQQLIRAAEIRASANLAATKMSECVLGQSKRVDFCGKGYHLMSFPQSAPHGVVFLHVTYVPAQEKNFTTAPAICHDGKAHFPREGVFVSNGTHWFVTQRNFYEPQIITTDNTFVSGNCDVVIGIVNNTVYDPLQPELDSGGSGYIPEAPRDGQAYVRKDGEWVLLSTFL

SEQ ID NO: 10439 - protein, 1177 aa, Artificial Sequence
  SARS-CoV-2/Portugal/PT0035/2020__EPI_ISL_418020 spike protein (1-1147)(F970C_G999C) Foldon construct
MFVFLVLLPLVSSQCVNLTTRTQLPPAYTNSFTRGVYYPDKVFRSSVLHSTQDLFLPFFSNVTWFHAIHVSGTNGTKRFDNPVLPFNDGVYFASTEKSNIIRGWIFGTTLDSKTQSLLIVNNATNVVIKVCEFQFCNDPFLGVYYHKNNKSWMESEFRVYSSANNCTFEYVSQPFLMDLEGKQGNFKNLREFVFKNIDGYFKIYSKHTPINLVRDLPQGFSALEPLVDLPIGINITRFQTLLALHRSYLTPGDSSSGWTAGAAAYYVGYLQPRTFLLKYNENGTITDAVDCALDPLSETKCTLKSFTVEKGIYQTSNFRVQPTESIVRFPNITNLCPFGEVFNATRFASVYAWNRKRISNCVADYSVLYNSASFSTFKCYGVSPTKLNDLCFTNVYADSFVIRGDEVRQIAPGQTGKIADYNYKLPDDFTGCVIAWNSNNLDSKVGGNYNYLYRLFRKSNLKPFERDISTEIYQAGSTPCNGVEGFNCYFPLQSYGFQPTNGVGYQPYRVVVLSFELLHAPATVCGPKKSTNLVKNKCVNFNFNGLTGTGVLTESNKKFLPFQQFGRDIADTTDAVRDPQTLEILDITPCSFGGVSVITPGTNTSNQVAVLYQDVNCTEVPVAIHADQLTPTWRVYSTGSNVFQTRAGCLIGAEHVNNSYECDIPIGAGICASYQTQTNSPRRARSVASQSIIAYTMSLGAENSVAYSNNSIAIPTNFTISVTTEILPVSMTKTSVDCTMYICGDSTECSNLLLQYGSFCTQLNRALTGIAVEQDKNTQEVFAQVKQIYKTPPIKDFGGFNFSQILPDPSKPSKRSFIEDLLFNKVTLADAGFIKQYGDCLGDISARDLICAQKFNGLTVLPPLLTDEMIAQYTSALLAGTITSGWTFGAGAALQIPFAMQMAYRFNGIGVTQNVLYENQKLIANQFNSAIGKIQDSLSSTASALGKLQDVVNQNAQALNTLVKQLSSNCGAISSVLNDILSRLDKVEAEVQIDRLITCRLQSLQTYVTQQLIRAAEIRASANLAATKMSECVLGQSKRVDFCGKGYHLMSFPQSAPHGVVFLHVTYVPAQEKNFTTAPAICHDGKAHFPREGVFVSNGTHWFVTQRNFYEPQIITTDNTFVSGNCDVVIGIVNNTVYDPLQPELDSGGSGYIPEAPRDGQAYVRKDGEWVLLSTFL

SEQ ID NO: 10440 - protein, 1177 aa, Artificial Sequence
  SARS-CoV-2/USA/NY-NYUMC7/2020__EPI_ISL_418192 spike protein (1-1147)(F970C_G999C) Foldon construct
MFVFLVLLPLVSSQCVNLTTRTQLPPAYTNSFTRGVYYPDKVFRSSVLHSTQDLFLPFFSNVTWFHAIHVSGTNGTKRFDNPVLPFNDGVYFASTEKSNIIRGWIFGTTLDSKTQSLLIVNNATNVVIKVCEFQFCNDPFLGVYHHKNNKSWMESEFRVYSSANNCTFEYVSQPFLMDLEGKQGNFKNLREFVFKNIDGYFKIYSKHTPINLVRDLPQGFSALEPLVDLPIGINITRFQTLLALHRSYLTPGDSSSGWTAGAAAYYVGYLQPRTFLLKYNENGTITDAVDCALDPLSETKCTLKSFTVEKGIYQTSNFRVQPTESIVRFPNITNLCPFGEVFNATRFASVYAWNRKRISNCVADYSVLYNSASFSTFKCYGVSPTKLNDLCFTNVYADSFVIRGDEVRQIAPGQTGKIADYNYKLPDDFTGCVIAWNSNNLDSKVGGNYNYLYRLFRKSNLKPFERDISTEIYQAGSTPCNGVEGFNCYFPLQSYGFQPTNGVGYQPYRVVVLSFELLHAPATVCGPKKSTNLVKNKCVNFNFNGLTGTGVLTESNKKFLPFQQFGRDIADTTDAVRDPQTLEILDITPCSFGGVSVITPGTNTSNQVAVLYQGVNCTEVPVAIHADQLTPTWRVYSTGSNVFQTRAGCLIGAEHVNNSYECDIPIGAGICASYQTQTNSPRRARSVASQSIIAYTMSLGAENSVAYSNNSIAIPTNFTISVTTEILPVSMTKTSVDCTMYICGDSTECSNLLLQYGSFCTQLNRALTGIAVEQDKNTQEVFAQVKQIYKTPPIKDFGGFNFSQILPDPSKPSKRSFIEDLLFNKVTLADAGFIKQYGDCLGDIAARDLICAQKFNGLTVLPPLLTDEMIAQYTSALLAGTITSGWTFGAGAALQIPFAMQMAYRFNGIGVTQNVLYENQKLIANQFNSAIGKIQDSLSSTASALGKLQDVVNQNAQALNTLVKQLSSNCGAISSVLNDILSRLDKVEAEVQIDRLITCRLQSLQTYVTQQLIRAAEIRASANLAATKMSECVLGQSKRVDFCGKGYHLMSFPQSAPHGVVFLHVTYVPAQEKNFTTAPAICHDGKAHFPREGVFVSNGTHWFVTQRNFYEPQIITTDNTFVSGNCDVVIGIVNNTVYDPLQPELDSGGSGYIPEAPRDGQAYVRKDGEWVLLSTFL

SEQ ID NO: 10441 - protein, 1177 aa, Artificial Sequence
  SARS-CoV-2/Iceland/189/2020__EPI_ISL_417709 spike protein (1-1147)(F970C_G999C) Foldon construct
MFVFLVLLPLVSSQCVNLTTRTQLPPAYTNSFTRGVYYPDKVFRSSVLHSTQDLFLPFFSNVTWFHAIHVSGTNGTKRFDNPVLPFNDGVYFASTEKSNIIRGWIFGTTLDSKTQSLLIVNNATNVVIKVCEFQFCNDPFLGVYYHKNNKSWMESEFRVYSSANNCTFEYVSQPFLMDLEGKQGNFKNLREFVFKNIDGYFKIYSKHTPINLVRDLPQGFSALEPLVDLPIGINITRFQTLLALHRSYLTPGDSSSGWTAGAAAYYVGYLQPRTFLLKYNENGTITDAVDCALDPLSETKCTLKSFTVEKGIYQTSNFRVQPTESIVRFPNITNLCPFGEVFNATRFASVYAWNRKRISNCVADYSVLYNSASFSTFKCYGVSPTKLNDLCFTNVYADSFVIRGDEVRQIAPGQTGKIADYNYKLPDDFTGCVIAWNSNNLDSKVGGNYNYLYRLFRKSNLKPFERDISTEIYQAGSTPCNGVEGFNCYFPLQSYGFQPTNGVGYQPYRVVVLSFELLHAPATVCGPKKSTNLVKNKCVNFNFNGLTGTGVLTESNKKFLPFQQFGRDIADTTDAVRDPQTLEILDITPCSFGGVSVITPGTNTSNQVAVLYQGVNCTEVPVAIHADQLTPTWRVYSTGSNVFQTRAGCLIGAEHVNNSYECDIPIGAGICASYQTQTNSPRRARSVASQSIIAYTMSLGAENSVAYSNNSIAIPTNFTISVTTEILPVSMTKTSVDCTMYICGDSTECSNLLLQYGSFCTQLNRALTGIAVEQDKNTQEVFAQVKQIYKTPPIKDFGGFNFSQILPDPSKPSKRSFIEDLLFNKVTLADAGFTKQYGDCLGDIAARDLICAQKFNGLTVLPPLLTDEMIAQYTSALLAGTITSGWTFGAGAALQIPFAMQMAYRFNGIGVTQNVLYENQKLIANQFNSAIGKIQDSLSSTASALGKLQDVVNQNAQALNTLVKQLSSNCGAISSVLNDILSRLDKVEAEVQIDRLITCRLQSLQTYVTQQLIRAAEIRASANLAATKMSECVLGQSKRVDFCGKGYHLMSFPQSAPHGVVFLHVTYVPAQEKNFTTAPAICHDGKAHFPREGVFVSNGTHWFVTQRNFYEPQIITTDNTFVSGNCDVVIGIVNNTVYDPLQPELDSGGSGYIPEAPRDGQAYVRKDGEWVLLSTFL

SEQ ID NO: 10442 - protein, 1177 aa, Artificial Sequence
  SARS-CoV-2/Australia/NSW56/2020__EPI_ISL_417408 spike protein (1-1147)(F970C_G999C) Foldon construct
MFVFLVLLPLVSSQCVNLTTRTQLPPAYTNSFTRGVYYPDKVFRSSVLHSTQDLFLPFFSNVTWFHAIHVSGTNGTKRFDNPVLPFNDGVYFASTEKSNIIRGWIFGTTLDSKTQSLLIVNNATNVVIKVCEFQFCNDPFLGVYYHKNNKSWMESEFRVYSSANNCTFEYVSQPFLMDLEGKQGNFKNLREFVFKNIDGYFKIYSKHTPINLVRDLPQGFSALEPLVDLPIGINITRFQTLLALHRSYLTPGDSSSGWTAGAAAYYVGYLQPRTFLLKYNENGTITDAVDCALDPLSETKCTLKSFTVEKGIYQTSNFRVQPTESIVRFPNITNLCPFGEVFNATRFASVYAWNRKRISNCVADYSVLYNSASFSTFKCYGVSPTKLNDLCFTNVYADSFVIRGDEVRQIAPGQTGKIADYNYKLPDDFTGCVIAWNSNNLDSKVGGNYNYLYRLFRKSNLKPFERDISTEIYQAGSTPCNGVEGFNCYFPLQSYGFQPTNGVGYQPYRVVVLSFELLHAPATVCGPKKSTNLVKNKCVNFNFNGLTGTGVLTESNKKFLPFQQFGRDIADTTDAVRDPQTLEILDITPCSFGGVSVITPGTNTSNQVAVLYQDVNCTEVPVAIHADQLTPTWRVYSTGSNVFQTRAGCLIGAEHVNNSYECDIPIGAGICASYQTQTNSPRRARSVASQSIIAYTMSLGAENSVAYSNNSIAIPTNFTISVTTEILPVSMTKTSVDCTMYICGDSTECSNLLLQYGSFCTQLNRALTGIAVEQDKNTQEVFAQVKQIYKTPPIKDFGGFNFSQILPDSSKPSKRSFIEDLLFNKVTLADAGFIKQYGDCLGDIAARDLICAQKFNGLTVLPPLLTDEMIAQYTSALLAGTITSGWTFGAGAALQIPFAMQMAYRFNGIGVTQNVLYENQKLIANQFNSAIGKIQDSLSSTASALGKLQDVVNQNAQALNTLVKQLSSNCGAISSVLNDILSRLDKVEAEVQIDRLITCRLQSLQTYVTQQLIRAAEIRASANLAATKMSECVLGQSKRVDFCGKGYHLMSFPQSAPHGVVFLHVTYVPAQEKNFTTAPAICHDGKAHFPREGVFVSNGTHWFVTQRNFYEPQIITTDNTFVSGNCDVVIGIVNNTVYDPLQPELDSGGSGYIPEAPRDGQAYVRKDGEWVLLSTFL

SEQ ID NO: 10443 - protein, 1177 aa, Artificial Sequence
  SARS-CoV-2/Iceland/280/2020__EPI_ISL_417608 spike protein (1-1147)(F970C_G999C) Foldon construct
MFVFLVLLPLVSSQCVNLTTRTQLPPAYTNSFTRGVYYPDKVFRSSVLHSTQDLFLPFFSNVTWFHAIHVSGTNGTKRFDNPVLPFNDGVYFASTEKSNIIRGWIFGTTLDSKTQSLLIVNNATNVVIKVCEFQFCNDPFLGVYYHKNNKSWMESEFRVYSSANNCTFEYVSQPFLMDLEGKQGNFKNLREFVFKNIDGYFKIYSKHTPINLVRDLPQGFSALEPLVDLPIGINITRFQTLLALHRSYLTPGDSSSGWTAGAAAYYVGYLQPRTFLLKYNENGTITDAVDCALDPLSETKCTLKSFTVEKGIYQTSNFRVQPTESIVRFPNITNLCPFGEVFNATRFASVYAWNRKRISNCVADYSVLYNSASFSTFKCYGVSPTKLNDLCFTNVYADSFVIRGDEVRQIAPGQTGKIADYNYKLPDDFTGCVIAWNSNNLDSKVGGNYNYLYRLFRKSNLKPFERDISTEIYQAGSTPCNGVEGFNCYFPLQSYGFQPTNGVGYQPYRVVVLSFELLHAPATVCGPKKSTNLVKNKCVNFNFNGLTGTGVLTESNKKFLPFQQFGRDIADTTDAVRDPQTLEILDITPCSFGGVSVITPGTNTSNQVAVLYQGVNCTEVPVAIHADQLTPTWRVYSTGSNVFQTRAGCLIGAEHVNNSYECDIPIGAGICASYHTQTNSPRRARSVASQSIIAYTMSLGAENSVAYSNNSIAIPTNFTISVTTEILPVSMTKTSVDCTMYICGDSTECSNLLLQYGSFCTQLNRALTGIAVEQDKNTQEVFAQVKQIYKTPPIKDFGGFNFSQILPDPSKPSKRSFIEDLLFNKVTLADAGFIKQYGDCLGDIAARDLICAQKFNGLTVLPPLLTDEMIAQYTSALLAGTITSGWTFGAGAALQIPFAMQMAYRFNGIGVTQNVLYENQKLIANQFNSAIGKIQDSLSSTASALGKLQDVVNQNAQALNTLVKQLSSNCGAISSVLNDILSRLDKVEAEVQIDRLITCRLQSLQTYVTQQLIRAAEIRASANLAATKMSECVLGQSKRVDFCGKGYHLMSFPQSAPHGVVFLHVTYVPAQEKNFTTAPAICHDGKAHFPREGVFVSNGTHWFVTQRNFYEPQIITTDNTFVSGNCDVVIGIVNNTVYDPLQPELDSGGSGYIPEAPRDGQAYVRKDGEWVLLSTFL

SEQ ID NO: 10444 - protein, 1177 aa, Artificial Sequence; identical to SEQ ID NO: 10399
  SARS-CoV-2/Iceland/247/2020__EPI_ISL_417575 spike protein (1-1147)(F970C_G999C) Foldon construct

SEQ ID NO: 10445 - protein, 1177 aa, Artificial Sequence
  SARS-CoV-2/Iceland/238/2020__EPI_ISL_417566 spike protein (1-1147)(F970C_G999C) Foldon construct
MFVFLVLLPLVSSQCVNLTTRTQLPPAYTNSFTRGVYYPDKVFRSSVLHSTQDLFLPFFSNVTWFHAIHVSGTNGTKRFDNPVLPFNDGVYFASTEKSNIIRGWIFGTTLDSKTQSLLIVNNATNVVIKVCEFQFCNDPFLGVYYHKNNKSWMESEFRVYSSANNCTFEYVSQPFLMDLEGKQGNFKNLREFVFKNIDGYFKIYSKHTPINLVRDLPQGFSALEPLVDLPIGINITRFQTLLALHRSYLTPGDSSSGWTAGAAAYYVGYLQPRTFLLKYNENGTITDAVDCALDPLSETKCTLKSFTVEKGIYQTSNFRVQPTESIVRFPNITNLCPFGEVFNATRFASVYAWNRKRISNCVADYSVLYNSASFSTFKCYGVSPTKLNDLCFTNVYADSFVIRGDEVRQIAPGQTGKIADYNYKLPDDFTGCVIAWNSNNLDSKVGGNYNYLYRLFRKSNLKPFERDISTEIYQAGSTPCNGVEGFNCYFPLQSYGFQPTNGVGYQPYRVVVLSFELLHAPATVCGPKKSTNLVKNKCVNFNFNGLTGTGVLTESNKKFLPFQQFGRDIADTTDAVRDPQTLEILDITPCSFGGVSVITPGTNTSNQVAVLYQGVNCTEVPVAIHADQLTPTWRVYSTGSNVFQTRAGCLIGAEHVNNSYECDIPIGAGICASYQTQTNSPRRARSVASQSIIAYTMSLGAENSVAYSNNSIAIPTNFTISVTTEILPVSMTKTSVDCTMYICGDSTECSNLLLQYGSFCTQLNRALTGIAVEQDKNTQEVFAQVKQIYKTPPIKDFGGFNFSQILPDPSKPSKRSFIEDLLFNKVTLADVGFIKQYGDCLGDIAARDLICAQKFNGLTVLPPLLTDEMIAQYTSALLAGTITSGWTFGAGAALQIPFAMQMAYRFNGIGVTQNVLYENQKLIANQFNSAIGKIQDSLSSTASALGKLQDVVNQNAQALNTLVKQLSSNCGAISSVLNDILSRLDKVEAEVQIDRLITCRLQSLQTYVTQQLIRAAEIRASANLAATKMSECVLGQSKRVDFCGKGYHLMSFPQSAPHGVVFLHVTYVPAQEKNFTTAPAICHDGKAHFPREGVFVSNGTHWFVTQRNFYEPQIITTDNTFVSGNCDVVIGIVNNTVYDPLQPELDSGGSGYIPEAPRDGQAYVRKDGEWVLLSTFL

SEQ ID NO: 10446 - protein, 1177 aa, Artificial Sequence
  SARS-CoV-2/Greece/16/2020__EPI_ISL_418265 spike protein (1-1147)(F970C_G999C) Foldon construct
MFVFLVLLPLVSSQCVNLTTRTQLPPAYTNSFTRGVYYPDKVFRSSVLHSTQDLFLPFFSNVTWFHAIHVSGTNGTKRFDNPVLPFNDGVYFASTEKSNIIRGWIFGTTLDSKTQSLLIVNNATNVVIKVCEFQFCNDPFLGVYYHKNNKSWMESEFRVYSSANNCTFEYVSQPFLMDLEGKQGNFKNLREFVFKNVDGYFKIYSKHTPINLVRDLPQGFSALEPLVDLPIGINITRFQTLLALHRSYLTPGDSSSGWTAGAAAYYVGYLQPRTFLLKYNENGTITDAVDCALDPLSETKCTLKSFTVEKGIYQTSNFRVQPTESIVRFPNITNLCPFGEVFNATRFASVYAWNRKRISNCVADYSVLYNSASFSTFKCYGVSPTKLNDLCFTNVYADSFVIRGDEVRQIAPGQTGKIADYNYKLPDDFTGCVIAWNSNNLDSKVGGNYNYLYRLFRKSNLKPFERDISTEIYQAGSTPCNGVEGFNCYFPLQSYGFQPTNGVGYQPYRVVVLSFELLHAPATVCGPKKSTNLVKNKCVNFNFNGLTGTGVLTESNKKFLPFQQFGRDIADTTDAVRDPQTLEILDITPCSFGGVSVITPGTNTSNQVAVLYQDVNCTEVPVAIHADQLTPTWRVYSTGSNVFQTRAGCLIGAEHVNNSYECDIPIGAGICASYQTQTNSPRRARSVASQSIIAYTMSLGAENSVAYSNNSIAIPTNFTISVTTEILPVSMTKTSVDCTMYICGDSTECSNLLLQYGSFCTQLNRALTGIAVEQDKNTQEVFAQVKQIYKTPPIKDFGGFNFSQILPDPSKPSKRSFIEDLLFNKVTLADAGFIKQYGDCLGDIAARDLICAQKFNGLTVLPPLLTDEMIAQYTSALLAGTITSGWTFGAGAALQIPFAMQMAYRFNGIGVTQNVLYENQKLIANQFNSAIGKIQDSLSSTASALGKLQDVVNQNAQALNTLVKQLSSNCGAISSVLNDILSRLDKVEAEVQIDRLITCRLQSLQTYVTQQLIRAAEIRASANLAATKMSECVLGQSKRVDFCGKGYHLMSFPQSAPHGVVFLHVTYVPAQEKNFTTAPAICHDGKAHFPREGVFVSNGTHWFVTQRNFYEPQIITTDNTFVSGNCDVVIGIVNNTVYDPLQPELDSGGSGYIPEAPRDGQAYVRKDGEWVLLSTFL

SEQ ID NO: 10447 - protein, 1177 aa, Artificial Sequence
  SARS-CoV-2/Iceland/319/2020__EPI_ISL_417648 spike protein (1-1147)(F970C_G999C) Foldon construct
MFVFLVLLPLVSSQCVNLTTRTQLPPAYTNSFTRGVYYPDKVFRSSVLHSTQDLFLPFFSNVTWFHAIHVSGTNGTKRFDNPVLPFNDGVYFASTEKSNIIRGWIFGTTLDSKTQSLLIVNNATNVVIKVCEFQFCNDPFLGVYYHKNNKSWMESEFRVYSSANNCTFEYVSQPFLIDLEGKQGNFKNLREFVFKNIDGYFKIYSKHTPINLVRDLPQGFSALEPLVDLPIGINITRFQTLLALHRSYLTPGDSSSGWTAGAAAYYVGYLQPRTFLLKYNENGTITDAVDCALDPLSETKCTLKSFTVEKGIYQTSNFRVQPTESIVRFPNITNLCPFGEVFNATRFASVYAWNRKRISNCVADYSVLYNSASFSTFKCYGVSPTKLNDLCFTNVYADSFVIRGDEVRQIAPGQTGKIADYNYKLPDDFTGCVIAWNSNNLDSKVGGNYNYLYRLFRKSNLKPFERDISTEIYQAGSTPCNGVEGFNCYFPLQSYGFQPTNGVGYQPYRVVVLSFELLHAPATVCGPKKSTNLVKNKCVNFNFNGLTGTGVLTESNKKFLPFQQFGRDIADTTDAVRDPQTLEILDITPCSFGGVSVITPGTNTSNQVAVLYQGVNCTEVPVAIHADQLTPTWRVYSTGSNVFQTRAGCLIGAEHVNNSYECDIPIGAGICASYQTQTNSPRRARSVASQSIIAYTMSLGAENSVAYSNNSIAIPTNFTISVTTEILPVSMTKTSVDCTMYICGDSTECSNLLLQYGSFCTQLNRALTGIAVEQDKNTQEVFAQVKQIYKTPPIKDFGGFNFSQILPDPSKPSKRSFIEDLLFNKVTLADAGFIKQYGDCLGDIAARDLICAQKFNGLTVLPPLLTDEMIAQYTSALLAGTITSGWTFGAGAALQIPFAMQMAYRFNGIGVTQNVLYENQKLIANQFNSAIGKIQDSLSSTASALGKLQDVVNQNAQALNTLVKQLSSNCGAISSVLNDILSRLDKVEAEVQIDRLITCRLQSLQTYVTQQLIRAAEIRASANLAATKMSECVLGQSKRVDFCGKGYHLMSFPQSAPHGVVFLHVTYVPAQEKNFTTAPAICHDGKAHFPREGVFVSNGTHWFVTQRNFYEPQIITTDNTFVSGNCDVVIGIVNNTVYDPLQPELDSGGSGYIPEAPRDGQAYVRKDGEWVLLSTFL

SEQ ID NO: 10448 - protein, 1177 aa, Artificial Sequence
  SARS-CoV-2/Congo/94/2020__EPI_ISL_417947 spike protein (1-1147)(F970C_G999C) Foldon construct
MFVFLVLLPLVSSQCVNLTTRTQLPPAYTNSFTRGVYYPDKVFRSSVLHSTQDLFLPFFSNVTWFHAIHVSGTNGTKRFDNPVLPFNDGVYFASTEKSNIIRGWIFGTTLDSKTQSLLIVNNATNVVIKVCEFQFCNDPFLGVYYHKNNKSWMESEFRVYSSANNCTFEYVSQPFLMDLEGKQGNFKNLREFVFKNIDGYFKIYSKHTPINLVRDLPQGFSALEPLVDLPIGINITRFQTLLALHRSYLTPGDSSSGWTAGAAAYYVGYLQPRTFLLKYNENGTITDAVDCALDPLSETKCTLKSFTVEKGIYQTSNFRVQPTESIVRFPNITNLCPFGEVFNATRFASVYAWNRKRISNCVADYSVLYNSASFSTFKCYGVSPTKLNDLCFTNVYADSFVIRGDEVRQIAPGQTGKIADYNYKLPDDFTGCVIAWNSNNLDSKVGGNYNYLYRLFRKSNLKPFERDISTEIYQAGSTPCNGVEGFNCYFPLQSYGFQPTNGVGYQPYRVVVLSFELLHAPATVCGPKKSTNLVKNKCVNFNFNGLTGTGVLTESNKKFLPFQQFGRDIADTTDAVRDPQTLEILDITPCSFGGVSVITPGTNTSNQVAVLYQGVNCTEVPVAIHADQLTPTWRVYSTGSNVFQTRAGCLIGAEHVNNSYECDIPIGAGICASYQTQTNSPRRARSVASQSIIAYTMSLGAENSVAYSNNSIAIPTNFTISVTTEILPVSMTKTSVDCTMYICGDSTECSNLLLQYGSFCTQLNRALTGIAVEQDKNTQEVFAQVKQIYKTPPIKDFGGFNFSQILPDPSKPSKRSFIEDILFNKVTLADAGFIKQYGDCLGDIAARDLICAQKFNGLTVLPPLLTDEMIAQYTSALLAGTITSGWTFGAGAALQIPFAMQMAYRFNGIGVTQNVLYENQKLIANQFNSAIGKIQDSLSSTASALGKLQDVVNQNAQALNTLVKQLSSNCGAISSVLNDILSRLDKVEAEVQIDRLITCRLQSLQTYVTQQLIRAAEIRASANLAATKMSECVLGQSKRVDFCGKGYHLMSFPQSAPHGVVFLHVTYVPAQEKNFTTAPAICHDGKAHFPREGVFVSNGTHWFVTQRNFYEPQIITTDNTFVSGNCDVVIGIVNNTVYDPLQPELDSGGSGYIPEAPRDGQAYVRKDGEWVLLSTFL

SEQ ID NO: 10449 - protein, 1177 aa, Artificial Sequence
  SARS-CoV-2/Congo/158/2020__EPI_ISL_417950 spike protein (1-1147)(F970C_G999C) Foldon construct
MFVFLVLLPLVSSQCVNLTTRTQLPPAYTNSFTRGVYYPDKVFRSSVLHSTQDLFLPFFSNVTWFHAIHVSGTNGTKRFDNPVLPFNDGVYFASTEKSNIIRGWIFGTTLDSKTQSLLIVNNATNVVIKVCEFQFCNDPFLGVYYHKNNKSWMESEFRVYSSANNCTFEYVSQPFLMDLEGKQGNFKNLREFVFKNIDGYFKIYSKHTPINLVRDLPQGFSALEPLVDLPIGINITRFQTLLALHRSYLTPGDSSSGWTAGAAAYYVGYLQPRTFLLKYNENGTITDAVDCALDPLSETKCTLKSFTVEKGIYQTSNFRVQPTESIVRFPNITNLCPFGEVFNATRFASVYAWNRKRISNCVADYSVLYNSASFSTFKCYGVSPTKLNDLCFTNVYADSFVIRGDEVRQIAPGQTGKIADYNYKLPDDFTGCVIAWNSNNLDSKVGGNYNYLYRLFRKSNLKPFERDISTEIYQAGSTPCNGVEGFNCYFPLQSYGFQPTNGVGYQPYRVVVLSFELLHAPATVCGPKKSTNLVKNKCVNFNFNGLTGTGVLTESNKKFLPFQQFGRDIADTTDAVRDPQTLEILDITPCSFGGVSVITPGTNTSNQVAVLYQDVNCTEVPVAIHADQLTPTWRVYSTGSNVFQTRAGCLIGAEHVNNSYECDIPIGAGICASYQTQTNSPRRARSVASQSIIAYTMSLGAENSVAYSNNSIAIPTNFTISVTTEILPVSMTKTSVDCTMYICGDSTECSNLLLQYGSFCTQLNRALTGIAVEQDKNTQEVFAQVKQIYKTPPIKDFGGFNFSQILPDPSKPSKRSFIEDLLFNKVTLADAGFIKQYGDCLGDIAARDLICAQKFNGLTVLPPLLTDEMIAQYTSALLAGTITSGWTFGAGAALQIPFAMQMAYRFNGIGVTQNVLYENQKLIANQFNSAIGKIQDSLSSTASALGKLQDVVNQNAQALNTLVKQLSSNCGAISSVLNDILSRLDKVEAEVQIDRLITCRLQSLQTYVTQQLIRAAEIRASANLAATKMSECVLGQSKRVDFCGKGYHLMSFPQSAPHGVVFLHVTYVPAQEKNFTTAPAICHDGKAHFPREGVFVSNGTHWFVTQRNFYEPQIITTDNTFLSGNCDVVIGIVNNTVYDPLQPELDSGGSGYIPEAPRDGQAYVRKDGEWVLLSTFL

SEQ ID NO: 10450 - protein, 1177 aa, Artificial Sequence
  SARS-CoV-2/USA/UT-00034/2020__EPI_ISL_417977 spike protein (1-1147)(F970C_G999C) Foldon construct
MFVFLVLLPLVSSQCVNLTTRTQLPPAYTNSFTRGVYYPDKVFRSSVLHSTQDLFLPFFSNVTWFHAIHVSGTNGTKRFDNPVLPFNDGVYFASTEKSNIIRGWIFGTTLDSKTQSLLIVNNATNVVIKVCEFQFCNDPFLGVYYYKNNKSWMESEFRVYSSANNCTFEYVSQPFLMDLEGKQGNFKNLREFVFKNIDGYFKIYSKHTPINLVRDLPQGFSALEPLVDLPIGINITRFQTLLALHRSYLTPGDSSSGWTAGAAAYYVGYLQPRTFLLKYNENGTITDAVDCALDPLSETKCTLKSFTVEKGIYQTSNFRVQPTESIVRFPNITNLCPFGEVFNATRFASVYAWNRKRISNCVADYSVLYNSASFSTFKCYGVSPTKLNDLCFTNVYADSFVIRGDEVRQIAPGQTGKIADYNYKLPDDFTGCVIAWNSNNLDSKVGGNYNYLYRLFRKSNLKPFERDISTEIYQAGSTPCNGVEGFNCYFPLQSYGFQPTNGVGYQPYRVVVLSFELLHAPATVCGPKKSTNLVKNKCVNFNFNGLTGTGVLTESNKKFLPFQQFGRDIADTTDAVRDPQTLEILDITPCSFGGVSVITPGTNTSNQVAVLYQGVNCTEVPVAIHADQLTPTWRVYSTGSNVFQTRAGCLIGAEHVNNSYECDIPIGAGICASYQTQTNSPRRARSVASQSIIAYTMSLGAENSVAYSNNSIAIPTNFTISVTTEILPVSMTKTSVDCTMYICGDSTECSNLLLQYGSFCTQLNRALTGIAVEQDKNTQEVFAQVKQIYKTPPIKDFGGFNFSQILPDPSKPSKRSFIEDLLFNKVTLADAGFIKQYGDCLGDIAARDLICAQKFNGLTVLPPLLTDEMIAQYTSALLAGTITSGWTFGAGAALQIPFAMQMAYRFNGIGVTQNVLYENQKLIANQFNSAIGKIQDSLSSTASALGKLQDVVNQNAQALNTLVKQLSSNCGAISSVLNDILSRLDKVEAEVQIDRLITCRLQSLQTYVTQQLIRAAEIRASANLAATKMSECVLGQSKRVDFCGKGYHLMSFPQSAPHGVVFLHVTYVPAQEKNFTTAPAICHDGKAHFPREGVFVSNGTHWFVTQRNFYEPQIITTDNTFVSGNCDVVIGIVNNTVYDPLQPELDSGGSGYIPEAPRDGQAYVRKDGEWVLLSTFL

SEQ ID NO: 10451 - protein, 1177 aa, Artificial Sequence
  SARS-CoV-2/USA/UT-00033/2020__EPI_ISL_417976 spike protein (1-1147)(F970C_G999C) Foldon construct
MFVFLVLLPLVSSQCVNLTTRTQLPPAYTNSFTRGVYYPDKVFRSSVLHSTQDLFLPFFSNVTWFHAIHVSGTNGTKRFDNPVLPFNDGVYFASTEKSNIIRGWIFGTTLDSKTQSLLIVNNATNVVIKVCEFQFCNDPFLGVYYHKNNKSWMESEFRVYSSANNCTFEYVSQPFLMDLEGKQGNFKNLREFVFKNIDGYFKIYSKHTPINLVRDLPQGFSALEPLVDLPIGINITRFQTLLALHRSYLTPGDSSSGLTAGAAAYYVGYLQPRTFLLKYNENGTITDAVDCALDPLSETKCTLKSFTVEKGIYQTSNFRVQPTESIVRFPNITNLCPFGEVFNATRFASVYAWNRKRISNCVADYSVLYNSASFSTFKCYGVSPTKLNDLCFTNVYADSFVIRGDEVRQIAPGQTGKIADYNYKLPDDFTGCVIAWNSNNLDSKVGGNYNYLYRLFRKSNLKPFERDISTEIYQAGSTPCNGVEGFNCYFPLQSYGFQPTNGVGYQPYRVVVLSFELLHAPATVCGPKKSTNLVKNKCVNFNFNGLTGTGVLTESNKKFLPFQQFGRDIADTTDAVRDPQTLEILDITPCSFGGVSVITPGTNTSNQVAVLYQGVNCTEVPVAIHADQLTPTWRVYSTGSNVFQTRAGCLIGAEHVNNSYECDIPIGAGICASYQTQTNSPRRARSVASQSIIAYTMSLGAENSVAYSNNSIAIPTNFTISVTTEILPVSMTKTSVDCTMYICGDSTECSNLLLQYGSFCTQLNRALTGIAVEQDKNTQEVFAQVKQIYKTPPIKDFGGFNFSQILPDPSKPSKRSFIEDLLFNKVTLADAGFIKQYGDCLGDIAARDLICAQKFNGLTVLPPLLTDEMIAQYTSALLAGTITSGWTFGAGAALQIPFAMQMAYRFNGIGVTQNVLYENQKLIANQFNSAIGKIQDSLSSTASALGKLQDVVNQNAQALNTLVKQLSSNCGAISSVLNDILSRLDKVEAEVQIDRLITCRLQSLQTYVTQQLIRAAEIRASANLAATKMSECVLGQSKRVDFCGKGYHLMSFPQSAPHGVVFLHVTYVPAQEKNFTTAPAICHDGKAHFPREGVFVSNGTHWFVTQRNFYEPQIITTDNTFVSGNCDVVIGIVNNTVYDPLQPELDSGGSGYIPEAPRDGQAYVRKDGEWVLLSTFL

SEQ ID NO: 10452 - protein, 1177 aa, Artificial Sequence
  SARS-CoV-2/USA/WI-13/2020__EPI_ISL_417516 spike protein (1-1147)(F970C_G999C) Foldon construct
MFVFLVLLPLVSSQCVNLTTRTQLPPAYTNSFTRGVYYPDKVFRSSVLHSTQDLFLPFFSNVTWFHAIHVSGTNGTKRFDNPVLPFNDGVYFASTEKSNIIRGWIFGTTLDSKTQSLLIVNNATNVVIKVCEFQFCNDPFLGVYYHKNNKSWMESEFRVYSSANNCTFEYVSQPFLMDLEGKQGNFKNLREFVFKNIDGYFKIYSKHTPINLVRDLPQGFSALEPLVDLPIGINITRFQTLLALHRSYLTPGDSSSGWTAGAAAYYVGYLQPRTFLLKYNENGTITDAVDCALDPLSETKCTLKSFTVEKGIYQTSNFRVLPTESIVRFPNITNLCPFGEVFNATRFASVYAWNRKRISNCVADYSVLYNSASFSTFKCYGVSPTKLNDLCFTNVYADSFVIRGDEVRQIAPGQTGKIADYNYKLPDDFTGCVIAWNSNNLDSKVGGNYNYLYRLFRKSNLKPFERDISTEIYQAGSTPCNGVEGFNCYFPLQSYGFQPTNGVGYQPYRVVVLSFELLHAPATVCGPKKSTNLVKNKCVNFNFNGLTGTGVLTESNKKFLPFQQFGRDIADTTDAVRDPQTLEILDITPCSFGGVSVITPGTNTSNQVAVLYQGVNCTEVPVAIHADQLTPTWRVYSTGSNVFQTRAGCLIGAEHVNNSYECDIPIGAGICASYQTQTNSPRRARSVASQSIIAYTMSLGAENSVAYSNNSIAIPTNFTISVTTEILPVSMTKTSVDCTMYICGDSTECSNLLLQYGSFCTQLNRALTGIAVEQDKNTQEVFAQVKQIYKTPPIKDFGGFNFSQILPDPSKPSKRSFIEDLLFNKVTLADAGFIKQYGDCLGDIAARDLICAQKFNGLTVLPPLLTDEMIAQYTSALLAGTITSGWTFGAGAALQIPFAMQMAYRFNGIGVTQNVLYENQKLIANQFNSAIGKIQDSLSSTASALGKLQDVVNQNAQALNTLVKQLSSNCGAISSVLNDILSRLDKVEAEVQIDRLITCRLQSLQTYVTQQLIRAAEIRASANLAATKMSECVLGQSKRVDFCGKGYHLMSFPQSAPHGVVFLHVTYVPAQEKNFTTAPAICHDGKAHFPREGVFVSNGTHWFVTQRNFYEPQIITTDNTFVSGNCDVVIGIVNNTVYDPLQPELDSGGSGYIPEAPRDGQAYVRKDGEWVLLSTFL

SEQ ID NO: 10453 - protein, 1176 aa, Artificial Sequence
  SARS-CoV-2/India/1-27/2020__EPI_ISL_413522 spike protein (1-1146)(F969C_G998C) Foldon construct
MFVFLVLLPLVSSQCVNLTTRTQLPPAYTNSFTRGVYYPDKVFRSSVLHSTQDLFLPFFSNVTWFHAIHVSGTNGTKRFDNPVLPFNDGVYFASTEKSNIIRGWIFGTTLDSKTQSLLIVNNATNVVIKVCEFQFCNDPFLGVYHKNNKSWMESEFRVYSSANNCTFEYVSQPFLMDLEGKQGNFKNLREFVFKNIDGYFKIYSKHTPINLVRDLPQGFSALEPLVDLPIGINITRFQTLLALHRSYLTPGDSSSGWTAGAAAYYVGYLQPRTFLLKYNENGTITDAVDCALDPLSETKCTLKSFTVEKGIYQTSNFRVQPTESIVRFPNITNLCPFGEVFNATRFASVYAWNRKRISNCVADYSVLYNSASFSTFKCYGVSPTKLNDLCFTNVYADSFVIRGDEVIQIAPGQTGKIADYNYKLPDDFTGCVIAWNSNNLDSKVGGNYNYLYRLFRKSNLKPFERDISTEIYQAGSTPCNGVEGFNCYFPLQSYGFQPTNGVGYQPYRVVVLSFELLHAPATVCGPKKSTNLVKNKCVNFNFNGLTGTGVLTESNKKFLPFQQFGRDIADTTDAVRDPQTLEILDITPCSFGGVSVITPGTNTSNQVAVLYQDVNCTEVPVAIHADQLTPTWRVYSTGSNVFQTRAGCLIGAEHVNNSYECDIPIGAGICASYQTQTNSPRRARSVASQSIIAYTMSLGAENSVAYSNNSIAIPTNFTISVTTEILPVSMTKTSVDCTMYICGDSTECSNLLLQYGSFCTQLNRALTGIAVEQDKNTQEVFAQVKQIYKTPPIKDFGGFNFSQILPDPSKPSKRSFIEDLLFNKVTLADAGFIKQYGDCLGDIAARDLICAQKFNGLTVLPPLLTDEMIAQYTSALLAGTITSGWTFGAGAALQIPFAMQMAYRFNGIGVTQNVLYENQKLIANQFNSAIGKIQDSLSSTASALGKLQDVVNQNAQALNTLVKQLSSNCGAISSVLNDILSRLDKVEAEVQIDRLITCRLQSLQTYVTQQLIRAAEIRASANLAATKMSECVLGQSKRVDFCGKGYHLMSFPQSAPHGVVFLHVTYVPAQEKNFTTAPAICHDGKAHFPREGVFVSNGTHWFVTQRNFYEPQIITTDNTFVSGNCDVVIGIVNNTVYDPLQPELDSGGSGYIPEAPRDGQAYVRKDGEWVLLSTFL

SEQ ID NO: 10454 - protein, 1171 aa, Artificial Sequence
  SARS-CoV-2/pangolin/Guangxi/P4L/2017__EPI_ISL_410538 spike protein (1-1141)(F964C_G993C) Foldon construct
MFVFLFVLPLVSSQCVNLTTRTGIPPGYTNSSTRGVYYPDKVFRSSILHLTQDLFLPFFSNVTWFNTINYQGGFKKFDNPVLPFNDGVYFASTEKSNIIRGWIFGTTLDARTQSLLIVNNATNVVIKVCEFQFCTDPFLGVYYHNNNKTWVENEFRVYSSANNCTFEYISQPFLMDLEGKQGNFKNLREFVFKNVDGYFKIYSKHTPIDLVRDLPRGFAALEPLVDLPIGINITRFQTLLALHRSYLTPGNLESGWTTGAAAYYVGYLQQRTFLLSYNQNGTITDAVDCSLDPLSETKCTLKSLTVEKGIYQTSNFRVQPTISIVRFPNITNLCPFGEVFNASKFASVYAWNRKRISNCVADYSVLYNSTSFSTFKCYGVSPTKLNDLCFTNVYADSFVVKGDEVRQIAPGQTGVIADYNYKLPDDFTGCVIAWNSVKQDALTGGNYGYLYRLFRKSKLKPFERDISTEIYQAGSTPCNGQVGLNCYYPLERYGFHPTTGVNYQPFRVVVLSFELLNGPATVCGPKLSTTLVKDKCVNFNFNGLTGTGVLTTSKKQFLPFQQFGRDISDTTDAVRDPQTLEILDITPCSFGGVSVITPGTNTSNQVAVLYQDVNCTEVPMAIHAEQLTPAWRVYSAGANVFQTRAGCLVGAEHVNNSYECDIPVGAGICASYHSMSSLRSVNQRSIIAYTMSLGAENSVAYSNNSIAIPTNFTISVTTEILPVSMTKTSVDCTMYICGDSIECSNLLLQYGSFCTQLNRALTGIAVEQDKNTQEVFAQVKQIYKTPPIKDFGGFNFSQILPDPSKPSKRSFIEDLLFNKVTLADAGFIKQYGDCLGDIAARDLICAQKFNGLTVLPPLLTDEMIAQYTSALLAGTITSGWTFGAGAALQIPFAMQMAYRFNGIGVTQNVLYENQKLIANQFNSAIGKIQDSLSSTASALGKLQDVVNQNAQALNTLVKQLSSNCGAISSVLNDILSRLDKVEAEVQIDRLITCRLQSLQTYVTQQLIRAAEIRASANLAATKMSECVLGQSKRVDFCGKGYHLMSFPQSAPHGVVFLHVTYVPAQEKNFTTAPAICHEGKAHFPREGVFVSNGTHWFITQRNFYEPQIITTDNTFVSGSCDVVIGIVNNTVYDPLQPELDSGGSGYIPEAPRDGQAYVRKDGEWVLLSTFL

SEQ ID NO: 10455 - protein, 1171 aa, Artificial Sequence
  SARS-CoV-2/pangolin/Guangxi/P5L/2017__EPI_ISL_410540 spike protein (1-1141)(F964C_G993C) Foldon construct
MFVFLFVLPLVSSQCVNLTTRTGIPPGYTNSSTRGVYYPDKVFRSSILHLTQDLFLPFFSNVTWFNTINYQGGFKKFDNPVLPFNDGVYFASTEKSNIIRGWIFGTTLDARTQSLLIVNNATNVVIKVCEFQFCTDPFLGVYYHNNNKTWVENEFRVYSSANNCTFEYISQPFLMDLEGKQGNFKNLREFVFKNVDGYFKIYSKHTPIDLVRDLPRGFAALEPLVDLPIGINITRFQTLLALHRSYLTPGKLESGWTTGAAAYYVGYLQQRTFLLSYNQNGTITDAVDCSLDPLSETKCTLKSLTVEKGIYQTSNFRVQPTISIVRFPNITNLCPFGEVFNASKFASVYAWNRKRISNCVADYSVLYNSTSFSTFKCYGVSPTKLNDLCFTNVYADSFVVKGDEVRQIAPGQTGVIADYNYKLPDDFTGCVIAWNSVKQDALTGGNYGYLYRLFRKSKLKPFERDISTEIYQAGSTPCNGQVGLNCYYPLERYGFHPTTGVNYQPFRVVVLSFELLNGPATVCGPKLSTTLVKDKCVNFNFNGLTGTGVLTTSKKQFLPFQQFGRDISDTTDAVRDPQTLEILDITPCSFGGVSVITPGTNTSNQVAVLYQDVNCTEVPMAIHAEQLTPAWRVYSAGANVFQTRAGCLVGAEHVNNSYECDIPVGAGICASYHSMSSFRSVNQRSIIAYTMSLGAENSVAYSNNSIAIPTNFTISVTTEILPVSMTKTSVDCTMYICGDSIECSNLLLQYGSFCTQLNRALTGIAVEQDKNTQEVFAQVKQIYKTPPIKDFGGFNFSQILPDPSKPSKRSFIEDLLFNKVTLADAGFIKQYGDCLGDIAARDLICAQKFNGLTVLPPLLTDEMIAQYTSALLAGTITSGWTFGAGAALQIPFAMQMAYRFNGIGVTQNVLYENQKLIANQFNSAIGKIQDSLSSTASALGKLQDVVNQNAQALNTLVKQLSSNCGAISSVLNDILSRLDKVEAEVQIDRLITCRLQSLQTYVTQQLIRAAEIRASANLAATKMSECVLGQSKRVDFCGKGYHLMSFPQSAPHGVVFLHVTYVPAQEKNFTTAPAICHEGKAHFPREGVFVSNGTHWFITQRNFYEPQIITTDNTFVSGSCDVVIGIVNNTVYDPLQPELDSGGSGYIPEAPRDGQAYVRKDGEWVLLSTFL

SEQ ID NO: 10456 - protein, 1171 aa, Artificial Sequence
  SARS-CoV-2/pangolin/Guangxi/P5E/2017__EPI_ISL_410541 spike protein (1-1141)(F964C_G993C) Foldon construct
MFVFLFVLPLVSSQCVNLTTRTGIPPGYTNSSTRGVYYPDKVFRSSILHLTQDLFLPFFSNVTWFNTITYQGGSKKFDNPVLPFNDGVYFASTEKSNIIRGWIFGTTLDARTQSLLIVNNATNVVIKVCEFQFCTDPFLGVYYHNNNKTWVENEFRVYSSANNCTFEYISQPFLMDLEGKQGNFKNLREFVFKNVDGYFKIYSKHTPIDLVRDLPRGFAALEPLVDLPIGINITRFQTLLALHRSYLTPGKLESGWTTGAAAYYVGYLQQRTFLLSYNQNGTITDAVDCSLDPLSETKCTLKSLTVEKGIYQTSNFRVQPTISIVRFPNITNLCPFGEVFNASKFASVYAWNRKRISNCVADYSVLYNSTSFSTFKCYGVSPTKLNDLCFTNVYADSFVVKGDEVRQIAPGQTGVIADYNYKLPDDFTGCVIAWNSVKQDALTGDNYGYLYRLFRKSKLKPFERDISTEIYQAGSTPCNGQVGLNCYYPLERYGFHPTTGVNYQPFRVVVLSFELLNGPATVCGPKLSTTLVKDKCVNFNFNGLTGTGVLTTSKKQFLPFQQFGRDISDTTDAVRDPQTLEILDITPCSFGGVSVITPGTNTSNQVAVLYQDVNCTEVPMAIHAEQLTPAWRVYSAGANVFQTRAGCLVGAEHVNNSYECDIPVGAGICASYHSMSSFRSVNQRSIIAYTMSLGAENSVAYSNNSIAIPTNFTISVTTEILPVSMTKTSVDCTMYICGDSIECSNLLLQYGSFCTQLNRALTGIAVEQDKNTQEVFAQVKQIYKTPPIKDFGGFNFSQILPDPSKPSKRSFIEDLLFNKVTLADAGFIKQYGDCLGDIAARDLICAQKFNGLTVLPPLLTDEMIAQYTSALLAGTITSGWTFGAGAALQIPFAMQMAYRFNGIGVTQNVLYENQKLIANQFNSAIGKIQDSLSSTASALGKLQDVVNQNAQALNTLVKQLSSNCGAISSVLNDILSRLDKVEAEVQIDRLITCRLQSLQTYVTQQLIRAAEIRASANLAATKMSECVLGQSKRVDFCGKGYHLMSFPQSAPHGVVFLHVTYVPAQEKNFTTAPAICHEGKAHFPREGVFVSNGTHWFITQRNFYEPQIITTDNTFVSGSCDVVIGIVNNTVYDPLQPELDSGGSGYIPEAPRDGQAYVRKDGEWVLLSTFL

SEQ ID NO: 10457 - protein, 1169 aa, Artificial Sequence
  SARS-CoV-2/pangolin/Guangxi/P1E/2017__EPI_ISL_410539 spike protein (1-1139)(F962C_G991C) Foldon construct
MFVFLFVLPLVSSQCVNLTTRTGIQPGYTNSSTRGVYYPDKVFRSSILHLTQDLFLPFFSNVTWFNTINYQGGFKKFDNPVLPFNDGVYFASTEKSNIIRGWIFGTTLDARTQSLLIVNNATNVVIKVCEFQFCTDPFLGVYYHNNNKTWVENEFRVYSSANNCTFEYISQPFLMDLEGKQGNFKNLREFVFKNVDGYFKIYSKHTPIDLVRDLPRGFAALEPLVDLPIGINITRFQTLLALHRSYLTPGKLESGWTTGAAAYYVGYLQQRTFLLSYNQNGTITDAVDCSLDPLSETKCTLKSLTVEKGIYQTSNFRVQPTISIVRFPNITNLCPFGEVFNASKFASVYAWNRKRISNCVADYSVLYNSTSFSTFKCYGVSPTKLNDLCFTNVYADSFVVKGDEVRQIAPGQTGVIADYNYKLPDDFTGCVIAWNSVKQDALTGGNYLYRLFRKSKLKPFERDISTEIYQAGSTPCNGQVGLNCYYPLERYGFHPTTGVNYQPFRVVVLSFELLNGPATVCGPKLSTTLVKDKCVNFNFNGLTGTGVLTTSKKQFLPFQQFGRDISDTTDAVRDPQTLEILDITPCSFGGVSVITPGTNTSNQVAVLYQDVNCTEVPMAIHAEQLTPAWRVYSAGANVFQTRAGCLVGAEHVNNSYECDIPVGAGICASYHSMSSLRSVNQRSIIAYTMSLGAENSVAYSNNSIAIPTNFTISVTTEILPVSMTKTSVDCTMYICGDSIECSNLLLQYGSFCTQLNRALTGIAVEQDKNTQEVFAQVKQIYKTPPIKDFGGFNFSQILPDPSKPSKRSFIEDLLFNKVTLADAGFIKQYGDCLGDIAARDLICAQKFNGLTVLPPLLTDEMIAQYTSALLAGTITSGWTFGAGAALQIPFAMQMAYRFNGIGVTQNVLYENQKLIANQFNSAIGKIQDSLSSTASALGKLQDVVNQNAQALNTLVKQLSSNCGAISSVLNDILSRLDKVEAEVQIDRLITCRLQSLQTYVTQQLIRAAEIRASANLAATKMSECVLGQSKRVDFCGKGYHLMSFPQSAPHGVVFLHVTYVPAQEKNFTTAPAICHEGKAHFPREGVFVSNGTHWFITQRNFYEPQIITTDNTFVSGSCDVVIGIVNNTVYDPLQPELDSGGSGYIPEAPRDGQAYVRKDGEWVLLSTFL

SEQ ID NO: 10458 - protein, 1177 aa, Artificial Sequence
  SARS-CoV-2/Wuhan/WIV05/2019__EPI_ISL_402128 spike protein (1-1147)(A972C_R995C) Foldon construct
MFVFLVLLPLVSSQCVNLTTRTQLPPAYTNSFTRGVYYPDKVFRSSVLHSTQDLFLPFFSNVTWFHAIHVSGTNGTKRFDNPVLPFNDGVYFASTEKSNIIRGWIFGTTLDSKTQSLLIVNNATNVVIKVCEFQFCNDPFLGVYYHKNNKSWMESEFRVYSSANNCTFEYVSQPFLMDLEGKQGNFKNLREFVFKNIDGYFKIYSKHTPINLVRDLPQGFSALEPLVDLPIGINITRFQTLLALHRSYLTPGDSSSGWTAGAAAYYVGYLQPRTFLLKYNENGTITDAVDCALDPLSETKCTLKSFTVEKGIYQTSNFRVQPTESIVRFPNITNLCPFGEVFNATRFASVYAWNRKRISNCVADYSVLYNSASFSTFKCYGVSPTKLNDLCFTNVYADSFVIRGDEVRQIAPGQTGKIADYNYKLPDDFTGCVIAWNSNNLDSKVGGNYNYLYRLFRKSNLKPFERDISTEIYQAGSTPCNGVEGFNCYFPLQSYGFQPTNGVGYQPYRVVVLSFELLHAPATVCGPKKSTNLVKNKCVNFNFNGLTGTGVLTESNKKFLPFQQFGRDIADTTDAVRDPQTLEILDITPCSFGGVSVITPGTNTSNQVAVLYQDVNCTEVPVAIHADQLTPTWRVYSTGSNVFQTRAGCLIGAEHVNNSYECDIPIGAGICASYQTQTNSPRRARSVASQSIIAYTMSLGAENSVAYSNNSIAIPTNFTISVTTEILPVSMTKTSVDCTMYICGDSTECSNLLLQYGSFCTQLNRALTGIAVEQDKNTQEVFAQVKQIYKTPPIKDFGGFNFSQILPDPSKPSKRSFIEDLLFNKVTLADAGFIKQYGDCLGDIAARDLICAQKFNGLTVLPPLLTDEMIAQYTSALLAGTITSGWTFGAGAALQIPFAMQMAYRFNGIGVTQNVLYENQKLIANQFNSAIGKIQDSLSSTASALGKLQDVVNQNAQALNTLVKQLSSNFGCISSVLNDILSRLDKVEAEVQIDCLITGRLQSLQTYVTQQLIRAAEIRASANLAATKMSECVLGQSKRVDFCGKGYHLMSFPQSAPHGVVFLHVTYVPAQEKNFTTAPAICHDGKAHFPREGVFVSNGTHWFVTQRNFYEPQIITTDNTFVSGNCDVVIGIVNNTVYDPLQPELDSGGSGYIPEAPRDGQAYVRKDGEWVLLSTFL

SEQ ID NO: 10459 - protein, 1173 aa, Artificial Sequence
  SARS-CoV-2/bat/Yunnan/RaTG13/2013__EPI_ISL_402131 spike protein (1-1143)(A968C_R991C) Foldon construct
MFVFLVLLPLVSSQCVNLTTRTQLPPAYTNSSTRGVYYPDKVFRSSVLHLTQDLFLPFFSNVTWFHAIHVSGTNGIKRFDNPVLPFNDGVYFASTEKSNIIRGWIFGTTLDSKTQSLLIVNNATNVVIKVCEFQFCNDPFLGVYYHKNNKSWMESEFRVYSSANNCTFEYVSQPFLMDLEGKQGNFKNLREFVFKNIDGYFKIYSKHTPINLVRDLPPGFSALEPLVDLPIGINITRFQTLLALHRSYLTPGDSSSGWTAGAAAYYVGYLQPRTFLLKYNENGTITDAVDCALDPLSETKCTLKSFTVEKGIYQTSNFRVQPTDSIVRFPNITNLCPFGEVFNATTFASVYAWNRKRISNCVADYSVLYNSTSFSTFKCYGVSPTKLNDLCFTNVYADSFVITGDEVRQIAPGQTGKIADYNYKLPDDFTGCVIAWNSKHIDAKEGGNFNYLYRLFRKANLKPFERDISTEIYQAGSKPCNGQTGLNCYYPLYRYGFYPTDGVGHQPYRVVVLSFELLNAPATVCGPKKSTNLVKNKCVNFNFNGLTGTGVLTESNKKFLPFQQFGRDIADTTDAVRDPQTLEILDITPCSFGGVSVITPGTNASNQVAVLYQDVNCTEVPVAIHADQLTPTWRVYSTGSNVFQTRAGCLIGAEHVNNSYECDIPIGAGICASYQTQTNSRSVASQSIIAYTMSLGAENSVAYSNNSIAIPTNFTISVTTEILPVSMTKTSVDCTMYICGDSTECSNLLLQYGSFCTQLNRALTGIAVEQDKNTQEVFAQVKQIYKTPPIKDFGGFNFSQILPDPSKPSKRSFIEDLLFNKVTLADAGFIKQYGDCLGDIAARDLICAQKFNGLTVLPPLLTDEMIAQYTSALLAGTITSGWTFGAGAALQIPFAMQMAYRFNGIGVTQNVLYENQKLIANQFNSAIGKIQDSLSSTASALGKLQDVVNQNAQALNTLVKQLSSNFGCISSVLNDILSRLDKVEAEVQIDCLITGRLQSLQTYVTQQLIRAAEIRASANLAATKMSECVLGQSKRVDFCGKGYHLMSFPQSAPHGVVFLHVTYVPAQEKNFTTAPAICHDGKAHFPREGVFVSNGTHWFVTQRNFYEPQIITTDNTFVSGSCDVVIGIVNNTVYDPLQPELDSGGSGYIPEAPRDGQAYVRKDGEWVLLSTFL

SEQ ID NO: 10460 - protein, 1177 aa, Artificial Sequence
  SARS-CoV-2/Wuhan/HBCDC-HB-01/2019__EPI_ISL_402132 spike protein (1-1147)(A972C_R995C) Foldon construct
MFVFLVLLPLVSSQCVNLTTRTQLPPAYTNSITRGVYYPDKVFRSSVLHSTQDLFLPFFSNVTWFHAIHVSGTNGTKRFDNPVLPFNDGVYFASTEKSNIIRGWIFGTTLDSKTQSLLIVNNATNVVIKVCEFQFCNDPFLGVYYHKNNKSWMESEFRVYSSANNCTFEYVSQPFLMDLEGKQGNFKNLREFVFKNIDGYFKIYSKHTPINLVRDLPQGFSALEPLVDLPIGINITRFQTLLALHRSYLTPGDSSSGWTAGAAAYYVGYLQPRTFLLKYNENGTITDAVDCALDPLSETKCTLKSFTVEKGIYQTSNFRVQPTESIVRFPNITNLCPFGEVFNATRFASVYAWNRKRISNCVADYSVLYNSASFSTFKCYGVSPTKLNDLCFTNVYADSFVIRGDEVRQIAPGQTGKIADYNYKLPDDFTGCVIAWNSNNLDSKVGGNYNYLYRLFRKSNLKPFERDISTEIYQAGSTPCNGVEGFNCYFPLQSYGFQPTNGVGYQPYRVVVLSFELLHAPATVCGPKKSTNLVKNKCVNFNFNGLTGTGVLTESNKKFLPFQQFGRDIADTTDAVRDPQTLEILDITPCSFGGVSVITPGTNTSNQVAVLYQDVNCTEVPVAIHADQLTPTWRVYSTGSNVFQTRAGCLIGAEHVNNSYECDIPIGAGICASYQTQTNSPRRARSVASQSIIAYTMSLGAENSVAYSNNSIAIPTNFTISVTTEILPVSMTKTSVDCTMYICGDSTECSNLLLQYGSFCTQLNRALTGIAVEQDKNTQEVFAQVKQIYKTPPIKDFGGFNFSQILPDPSKPSKRSFIEDLLFNKVTLADAGFIKQYGDCLGDIAARDLICAQKFNGLTVLPPLLTDEMIAQYTSALLAGTITSGWTFGAGAALQIPFAMQMAYRFNGIGVTQNVLYENQKLIANQFNSAIGKIQDSLSSTASALGKLQDVVNQNAQALNTLVKQLSSNFGCISSVLNDILSRLDKVEAEVQIDCLITGRLQSLQTYVTQQLIRAAEIRASANLAATKMSECVLGQSKRVDFCGKGYHLMSFPQSAPHGVVFLHVTYVPAQEKNFTTAPAICHDGKAHFPREGVFVSNGTHWFVTQRNFYEPQIITTDNTFVSGNCDVVIGIVNNTVYDPLQPELDSGGSGYIPEAPRDGQAYVRKDGEWVLLSTFL

SEQ ID NO: 10461 - protein, 1177 aa, Artificial Sequence
  SARS-CoV-2/Guangdong/20SF028/2020__EPI_ISL_403936 spike protein (1-1147)(A972C_R995C) Foldon construct
MFVFLVLLPLVSSQCVNLTTRTQLPPAYTNSFTRGVYYPDKVFRSSVLYSTQDLFLPFFSNVTWFHAIHVSGTNGTKRFDNPVLPFNDGVYFASTEKSNIIRGWIFGTTLDSKTQSLLIVNNATNVVIKVCEFQFCNDPFLGVYYHKNNKSWMESEFRVYSSANNCTFEYVSQPFLMDLEGKQGNFKNLREFVFKNIDGYFKIYSKHTPINLVRDLPQGFSALEPLVDLPIGINITRFQTLLALHRSYLTPGDSSSGWTAGAAAYYVGYLQPRTFLLKYNENGTITDAVDCALDPLSETKCTLKSFTVEKGIYQTSNFRVQPTESIVRFPNITNLCPFGEVFNATRFASVYAWNRKRISNCVADYSVLYNSASFSTFKCYGVSPTKLNDLCFTNVYADSFVIRGDEVRQIAPGQTGKIADYNYKLPDDFTGCVIAWNSNNLDSKVGGNYNYLYRLFRKSNLKPFERDISTEIYQAGSTPCNGVEGFNCYFPLQSYGFQPTNGVGYQPYRVVVLSFELLHAPATVCGPKKSTNLVKNKCVNFNFNGLTGTGVLTESNKKFLPFQQFGRDIADTTDAVRDPQTLEILDITPCSFGGVSVITPGTNTSNQVAVLYQDVNCTEVPVAIHADQLTPTWRVYSTGSNVFQTRAGCLIGAEHVNNSYECDIPIGAGICASYQTQTNSPRRARSVASQSIIAYTMSLGAENSVAYSNNSIAIPTNFTISVTTEILPVSMTKTSVDCTMYICGDSTECSNLLLQYGSFCTQLNRALTGIAVEQDKNTQEVFAQVKQIYKTPPIKDFGGFNFSQILPDPSKPSKRSFIEDLLFNKVTLADAGFIKQYGDCLGDIAARDLICAQKFNGLTVLPPLLTDEMIAQYTSALLAGTITSGWTFGAGAALQIPFAMQMAYRFNGIGVTQNVLYENQKLIANQFNSAIGKIQDSLSSTASALGKLQDVVNQNAQALNTLVKQLSSNFGCISSVLNDILSRLDKVEAEVQIDCLITGRLQSLQTYVTQQLIRAAEIRASANLAATKMSECVLGQSKRVDFCGKGYHLMSFPQSAPHGVVFLHVTYVPAQEKNFTTAPAICHDGKAHFPREGVFVSNGTHWFVTQRNFYEPQIITTDNTFVSGNCDVVIGIVNNTVYDPLQPELDSGGSGYIPEAPRDGQAYVRKDGEWVLLSTFL

SEQ ID NO: 10462 - protein, 1177 aa, Artificial Sequence
  SARS-CoV-2/Shenzhen/SZTH-001/2020__EPI_ISL_406592 spike protein (1-1147)(A972C_R995C) Foldon construct
MFVFLVLLPLVSSQCVNLTTRTQLPPAYTNSFTRGVYYPDKVFRSSVLHSTQDLFLPFFSNVTWFHAIHVSGTNGTKRFDNPVLPFNDGVYFASTEKSNIIRGWIFGTTLDSKTQSLLIVNNATNVVIKVCEFQFCNDPFLGVYYHKNNKSWMESEFRVYSSANNCTFEYVSQPFLMDLEGKQGNFKNLREFVFKNIDGYFKIYSKHTPINLVRDLPQGFSALEPLVDLPIGINITRFQTLLALHRSYLTPGDSSSGWTAGAAAYYVGYLQPRTFLLKYNENGTITDAVDCALDPLSETKCTLKSFTVEKGIYQTSNFRVQPTESIVRFPNITNLCPFGEVFNATRFASVYAWNRKRISNCVADYSVLYNSASFSTFKCYGVSPTKLNDLCFTNVYADSFVIRGDEVRQIAPGQTGKIADYNYKLPDDFTGCVIAWNSNNLDSKVGGNYNYLYRLFRKSNLKPFERDISTEIYQAGSTPCNGVEGFNCYFPLQSYGFQPTNGVGYQPYRVVVLSFELLHAPATVCGPKKSTNLVKNKCVNFNFNGLTGTGVLTESNKKFLPFQQFGRDIADTTDAVRDPQTLEILDITPCSFGGVSVITPGTNTSNQVAVLYQDVNCTEVPVAIHADQLTPTWRVYSTGSNVFQTRAGCLIGAEHVNNSYECDIPIGAGICASYQTQTNSPRRARSVASQSIIAYTMSLGAENSVAYSNNSIAIPTNFTISVTTEILPVSMTKTSVDCTMYICGDSTECSNLLLQYGSFCTQLNRALTGIAVEQDKNTQEVFAQVKQIYKTPPIKDFGGFNFSQILPDPSKPSKRSFIEDLLFNKVTLADAGFIKQYGDCLGDIAARDLICAQKFNGLTVLPPLLTDEMIAQYTSALLAGTITSGWTFGAGAALQIPFAMQMAYRFNGIGVTQNVLYENQKLIANQFNSAIGKIQDSLSSTASALGKLQDVVNQNAQALNTLVKQLSSNFGCISSVLNDILSRLDKVEAEVQIDCLITGRLQSLQTYVTQQLIRAAEIRASANLAATKMSECVLGQSKRVDFCGKGYHLMSFPQSAPHGVVFLHVTYVPAQEKNFTTAPAICHDGKAHFPREGVFVSNGTHWFVTQRNFYEPQIITTDNTFVSGNCDVLIGIVNNTVYDPLQPELDSGGSGYIPEAPRDGQAYVRKDGEWVLLSTFL

SEQ ID NO: 10463 - protein, 1177 aa, Artificial Sequence
  SARS-CoV-2/Shenzhen/SZTH-004/2020__EPI_ISL_406595 spike protein (1-1147)(A972C_R995C) Foldon construct
MFVFLVLLPLVSSQCVNLTTRTQLPPAYTNSFTRGVYYPDKVFRSSVLHSTQDLFLPFFSNVTWFHAIHVSGTNGTKRFDNPVLPFNDGVYFASTEKSNIIRGWIFGTTLDSKTQSLLIVNNATNVVIKVCEFQFCNDPFLGVYYHKNNKSWMESEFRVYSSANNCTFEYVSQPFLMDLEGKQGNFKNLREFVFKNIDGYFKIYSKHTPINLVRDLPQGFSALEPLVDLPIGINITRFQTLLALHRSYLTPGDSSSGWTAGAAAYYVGYLQPRTFLLKYNENGTITDAVDCALDPLSETKCTLKSFTVEKGIYQTSNFRVQPTESIVRFPNITNLCPFGEVFNATRFASVYAWDRKRISNCVAYYSVLYNSASFSTFKCYGVSPTKLNDLCFTNVYADSFVIRGDEVRQIAPGQTGKIADYNYKLPDDFTGCVIAWNSNNLDSKVGGNYNYLYRLFRKSNLKPFERDISTEIYQAGSTPCNGVEGFNCYFPLQSYGFQPTNGVGYQPYRVVVLSFELLHAPATVCGPKKSTNLVKNKCVNFNFNGLTGTGVLTESNKKFLPFQQFGRDIADTTDAVRDPQTLEILDITPCSFGGVSVITPGTNTSNQVAVLYQDVNCTEVPVAIHADQLTPTWRVYSTGSNVFQTRAGCLIGAEHVNNSYECDIPIGAGICASYQTQTNSPRRARSVASQSIIAYTMSLGAENSVAYSNNSIAIPTNFTISVTTEILPVSMTKTSVDCTMYICGDSTECSNLLLQYGSFCTQLNRALTGIAVEQDKNTQEVFAQVKQIYKTPPIKDFGGFNFSQILPDPSKPSKRSFIEDLLFNKVTLADAGFIKQYGDCLGDIAARDLICAQKFNGLTVLPPLLTDEMIAQYTSALLAGTITSGWTFGAGAALQIPFAMQMAYRFNGIGVTQNVLYENQKLIANQFNSAIGKIQDSLSSTASALGKLQDVVNQNAQALNTLVKQLSSNFGCISSVLNDILSRLDKVEAEVQIDCLITGRLQSLQTYVTQQLIRAAEIRASANLAATKMSECVLGQSKRVDFCGKGYHLMSFPQSAPHGVVFLHVTYVPAQEKNFTTAPAICHDGKAHFPREGVFVSNGTHWFVTQRNFYEPQIITTDNTFVSGNCDVVIGIVNNTVYDPLQPELDSGGSGYIPEAPRDGQAYVRKDGEWVLLSTFL

SEQ ID NO: 10464 - protein, 1177 aa, Artificial Sequence
  SARS-CoV-2/France/IDF0372/2020__EPI_ISL_406596 spike protein (1-1147)(A972C_R995C) Foldon construct
MFVFLVLLPLVSSQCVNLTTRTQLPPAYTNSFTRGVYYPDKVFRSSVLHSTQDLFLPFFSNVTWFHAIHVSGTNGTKRFDNPVLPFNDGVYFASTEKSNIIRGWIFGTTLDSKTQSLLIVNNATNVVIKVCEFQFCNDPFLGVYYHKNNKSWMESEFRVYSSANNCTFEYVSQPFLMDLEGKQGNFKNLREFVFKNIDGYFKIYSKHTPINLVRDLPQGFSALEPLVDLPIGINITRFQTLLALHRSYLTPGDSSSGWTAGAAAYYVGYLQPRTFLLKYNENGTITDAVDCALDPLSETKCTLKSFTVEKGIYQTSNFRVQPTESIVRFPNITNLCPFGEVFNATRFASVYAWNRKRISNCVADYSFLYNSASFSTFKCYGVSPTKLNDLCFTNVYADSFVIRGDEVRQIAPGQTGKIADYNYKLPDDFTGCVIAWNSNNLDSKVGGNYNYLYRLFRKSNLKPFERDISTEIYQAGSTPCNGVEGFNCYFPLQSYGFQPTNGVGYQPYRVVVLSFELLHAPATVCGPKKSTNLVKNKCVNFNFNGLTGTGVLTESNKKFLPFQQFGRDIADTTDAVRDPQTLEILDITPCSFGGVSVITPGTNTSNQVAVLYQDVNCTEVPVAIHADQLTPTWRVYSTGSNVFQTRAGCLIGAEHVNNSYECDIPIGAGICASYQTQTNSPRRARSVASQSIIAYTMSLGAENSVAYSNNSIAIPTNFTISVTTEILPVSMTKTSVDCTMYICGDSTECSNLLLQYGSFCTQLNRALTGIAVEQDKNTQEVFAQVKQIYKTPPIKDFGGFNFSQILPDPSKPSKRSFIEDLLFNKVTLADAGFIKQYGDCLGDIAARDLICAQKFNGLTVLPPLLTDEMIAQYTSALLAGTITSGWTFGAGAALQIPFAMQMAYRFNGIGVTQNVLYENQKLIANQFNSAIGKIQDSLSSTASALGKLQDVVNQNAQALNTLVKQLSSNFGCISSVLNDILSRLDKVEAEVQIDCLITGRLQSLQTYVTQQLIRAAEIRASANLAATKMSECVLGQSKRVDFCGKGYHLMSFPQSAPHGVVFLHVTYVPAQEKNFTTAPAICHDGKAHFPREGVFVSNGTHWFVTQRNFYEPQIITTDNTFVSGNCDVVIGIVNNTVYDPLQPELDSGGSGYIPEAPRDGQAYVRKDGEWVLLSTFL

SEQ ID NO: 10465 - protein, 1177 aa, Artificial Sequence
  SARS-CoV-2/Australia/VIC01/2020__EPI_ISL_406844 spike protein (1-1147)(A972C_R995C) Foldon construct
MFVFLVLLPLVSSQCVNLTTRTQLPPAYTNSFTRGVYYPDKVFRSSVLHSTQDLFLPFFSNVTWFHAIHVSGTNGTKRFDNPVLPFNDGVYFASTEKSNIIRGWIFGTTLDSKTQSLLIVNNATNVVIKVCEFQFCNDPFLGVYYHKNNKSWMESEFRVYSSANNCTFEYVSQPFLMDLEGKQGNFKNLREFVFKNIDGYFKIYSKHTPINLVRDLPQGFSALEPLVDLPIGINITRFQTLLALHRRYLTPGDSSSGWTAGAAAYYVGYLQPRTFLLKYNENGTITDAVDCALDPLSETKCTLKSFTVEKGIYQTSNFRVQPTESIVRFPNITNLCPFGEVFNATRFASVYAWNRKRISNCVADYSVLYNSASFSTFKCYGVSPTKLNDLCFTNVYADSFVIRGDEVRQIAPGQTGKIADYNYKLPDDFTGCVIAWNSNNLDSKVGGNYNYLYRLFRKSNLKPFERDISTEIYQAGSTPCNGVEGFNCYFPLQSYGFQPTNGVGYQPYRVVVLSFELLHAPATVCGPKKSTNLVKNKCVNFNFNGLTGTGVLTESNKKFLPFQQFGRDIADTTDAVRDPQTLEILDITPCSFGGVSVITPGTNTSNQVAVLYQDVNCTEVPVAIHADQLTPTWRVYSTGSNVFQTRAGCLIGAEHVNNSYECDIPIGAGICASYQTQTNSPRRARSVASQSIIAYTMSLGAENSVAYSNNSIAIPTNFTISVTTEILPVSMTKTSVDCTMYICGDSTECSNLLLQYGSFCTQLNRALTGIAVEQDKNTQEVFAQVKQIYKTPPIKDFGGFNFSQILPDPSKPSKRSFIEDLLFNKVTLADAGFIKQYGDCLGDIAARDLICAQKFNGLTVLPPLLTDEMIAQYTSALLAGTITSGWTFGAGAALQIPFAMQMAYRFNGIGVTQNVLYENQKLIANQFNSAIGKIQDSLSSTASALGKLQDVVNQNAQALNTLVKQLSSNFGCISSVLNDILSRLDKVEAEVQIDCLITGRLQSLQTYVTQQLIRAAEIRASANLAATKMSECVLGQSKRVDFCGKGYHLMSFPQSAPHGVVFLHVTYVPAQEKNFTTAPAICHDGKAHFPREGVFVSNGTHWFVTQRNFYEPQIITTDNTFVSGNCDVVIGIVNNTVYDPLQPELDSGGSGYIPEAPRDGQAYVRKDGEWVLLSTFL

SEQ ID NO: 10466 - protein, 1177 aa, Artificial Sequence
  SARS-CoV-2/Germany/BavPat1/2020__EPI_ISL_406862 spike protein (1-1147)(A972C_R995C) Foldon construct
MFVFLVLLPLVSSQCVNLTTRTQLPPAYTNSFTRGVYYPDKVFRSSVLHSTQDLFLPFFSNVTWFHAIHVSGTNGTKRFDNPVLPFNDGVYFASTEKSNIIRGWIFGTTLDSKTQSLLIVNNATNVVIKVCEFQFCNDPFLGVYYHKNNKSWMESEFRVYSSANNCTFEYVSQPFLMDLEGKQGNFKNLREFVFKNIDGYFKIYSKHTPINLVRDLPQGFSALEPLVDLPIGINITRFQTLLALHRSYLTPGDSSSGWTAGAAAYYVGYLQPRTFLLKYNENGTITDAVDCALDPLSETKCTLKSFTVEKGIYQTSNFRVQPTESIVRFPNITNLCPFGEVFNATRFASVYAWNRKRISNCVADYSVLYNSASFSTFKCYGVSPTKLNDLCFTNVYADSFVIRGDEVRQIAPGQTGKIADYNYKLPDDFTGCVIAWNSNNLDSKVGGNYNYLYRLFRKSNLKPFERDISTEIYQAGSTPCNGVEGFNCYFPLQSYGFQPTNGVGYQPYRVVVLSFELLHAPATVCGPKKSTNLVKNKCVNFNFNGLTGTGVLTESNKKFLPFQQFGRDIADTTDAVRDPQTLEILDITPCSFGGVSVITPGTNTSNQVAVLYQGVNCTEVPVAIHADQLTPTWRVYSTGSNVFQTRAGCLIGAEHVNNSYECDIPIGAGICASYQTQTNSPRRARSVASQSIIAYTMSLGAENSVAYSNNSIAIPTNFTISVTTEILPVSMTKTSVDCTMYICGDSTECSNLLLQYGSFCTQLNRALTGIAVEQDKNTQEVFAQVKQIYKTPPIKDFGGFNFSQILPDPSKPSKRSFIEDLLFNKVTLADAGFIKQYGDCLGDIAARDLICAQKFNGLTVLPPLLTDEMIAQYTSALLAGTITSGWTFGAGAALQIPFAMQMAYRFNGIGVTQNVLYENQKLIANQFNSAIGKIQDSLSSTASALGKLQDVVNQNAQALNTLVKQLSSNFGCISSVLNDILSRLDKVEAEVQIDCLITGRLQSLQTYVTQQLIRAAEIRASANLAATKMSECVLGQSKRVDFCGKGYHLMSFPQSAPHGVVFLHVTYVPAQEKNFTTAPAICHDGKAHFPREGVFVSNGTHWFVTQRNFYEPQIITTDNTFVSGNCDVVIGIVNNTVYDPLQPELDSGGSGYIPEAPRDGQAYVRKDGEWVLLSTFL

SEQ ID NO: 10467 - protein, 1177 aa, Artificial Sequence
  SARS-CoV-2/Wuhan/HBCDC-HB-02/2020__EPI_ISL_412978 spike protein (1-1147)(A972C_R995C) Foldon construct
MFVFLVLLPLVSSQCVNLTTRTQLPPAYTNSFTRGVYYPDKVFRSSVLHSTQDLFLPFFSNVTWFHAIHVSGTNGTKRFDNPVLPFNDGVYFASTEKSNIIRGWIFGTTLDSKTQSLLIVNNATNVVIKVCEFQFCNDPFLGVYYHKNNKSWMESEFRVYSSANNCTFEYVSQPFLMDLEGKQGNFKNLREFVFKNIDGYFKIYSKHTPINLVRDLPQGFSALEPLVDLPIGINITRFQTLLALHRSYLTPGDSSSGWTAGAAAYYVGYLQPRTFLLKYNENGTITDAVDCALDPLSETKCTLKSFTVEKGIYQTSNFRVQPTESIVRFPNITNLCPFGEVFNATRFASVYAWNRKRISNCVADYSVLYNSASFSTFKCYGVSPTKLNDLCFTNVYADSFVIRGDEVRQIAPGQTGKIADYNYKLPDDFTGCVIAWNSNNLDSKVGGNYNYLYRLFRKSNLKPFERDISTEIYQAGSTPCNGVEGFNCYFPLQSYGFQPTNGVGYQPYRVVVLSFELLHAPATVCGPKKSTNLVKNKCVNFNFNGLTGTGVLTESNKKFLPFQQFGRDIADTTDAVRDPQTLEILDITPCSFGGVSVITPGTNTSNQVAVLYQDVNCTEVPVAIHADQLTPTWRVYSTGSNVFQTRAGCLIGAEHVNNSYECDIPIGAGICASYQTQTNSPRRARSVASQSIIAYTMSLGAENSVAYSNNSIAIPTNFTISVTTEILPVSMTKTSVDCTMYICGDSTECSNFLLQYGSFCTQLNRALTGIAVEQDKNTQEVFAQVKQIYKTPPIKDFGGFNFSQILPDPSKPSKRSFIEDLLFNKVTLADAGFIKQYGDCLGDIAARDLICAQKFNGLTVLPPLLTDEMIAQYTSALLAGTITSGWTFGAGAALQIPFAMQMAYRFNGIGVTQNVLYENQKLIANQFNSAIGKIQDSLSSTASALGKLQDVVNQNAQALNTLVKQLSSNFGCISSVLNDILSRLDKVEAEVQIDCLITGRLQSLQTYVTQQLIRAAEIRASANLAATKMSECVLGQSKRVDFCGKGYHLMSFPQSAPHGVVFLHVTYVPAQEKNFTTAPAICHDGKAHFPREGVFVSNGTHWFVTQRNFYEPQIITTDNTFVSGNCDVVIGIVNNTVYDPLQPELDSGGSGYIPEAPRDGQAYVRKDGEWVLLSTFL

SEQ ID NO: 10468 - protein, 1177 aa, Artificial Sequence
  SARS-CoV-2/Australia/QLD02/2020__EPI_ISL_407896 spike protein (1-1147)(A972C_R995C) Foldon construct
MFVFLVLLPLVSSQCVNLTTRTQLPPAYTNSFTRGVYYPDKVFRSSVLHSTQDLFLPFFSNVTWFHAIHVSGTNGTKRFDNPVLPFNDGVYFASTEKSNIIRGWIFGTTLDSKTQSLLIVNNATNVVIKVCEFQFCNDPFLGVYYHKNNKSWMESEFRVYSSANNCTFEYVSQPFLMDLEGKQGNFKNLREFVFKNIDGYFKIYSKHTPINLVRDLPQGFSALEPLVDLPIGINITRFQTLLALHRSYLTPGDSSSGWTAGAAAYYVGYLQPRTFLLKYNENGTITDAVDCALDPLSETKCTLKSFTVEKGIYQTSNFRVQPTESIVRFPNITNLCPFGEVFNATRFASVYAWNRKRISNCVADYSVLYNSASFSTFKCYGVSPTKLNDLCFTNVYADSFVIRGDEVRQIAPGQTGKIADYNYKLPDDFTGCVIAWNSNNLDSKVGGNYNYLYRLFRKSNLKPFERDISTEIYQAGSTPCNGVEGFNCYFPLQSYGFQPTNGVGYQPYRVVVLSFELLHAPATVCGPKKSTNLVKNKCVNFNFNGLTGTGVLTESNKKFLPFQQFGRDIADTTDAVRDPQTLEILDITPCSFGGVSVITPGTNTSNQVAVLYQDVNCTEVPVAIHADQLTPTWRVYSTGSNVFQTRAGCLIGAEHVNNSYECDIPIGAGICASYQTQTNSPRRARSVASQSIIAYTMSLGAENSVAYSNNSIAIPTNFTISVTTEILPVSMTKTSVDCTMYICGDSTECSNLLLQYGSFCTQLNRALTGIAVEQDKNTQEVFAQVKQIYKTPPIKDFGGFNFSQILPDPSKPSKRSFIEDLLFNKVTLADAGFIKQYGDCLGDIAARDLICAQKFNGLTVLPPLLTDEMIAQYTSALLAGTITSGWTFGAGAALQIPFAMQMAYRFNGIGVTQNVLYENQKLIANQFNSAIGKIQDSLSSTASALGKLQDVVNQNAQALNTLVKQLSSNFGCISSVLNDILSRLDKVEAEVQIDCLITGRLQSLQTYVTQQLIRAAEIRASANLAATKMSECVLGQSKRVDFCGKGYHLMSFPQSAPHGVVFLHVTYVPAQEKNFTTAPAICHDGKAHFPREGVFVSNGTHWFVTQRNFYEPQIITTDNTFVSGNCDVVIGIVNNTVYDPLQLELDSGGSGYIPEAPRDGQAYVRKDGEWVLLSTFL

SEQ ID NO: 10469 - protein, 1177 aa, Artificial Sequence
  SARS-CoV-2/India/1-31/2020__EPI_ISL_413523 spike protein (1-1147)(A972C_R995C) Foldon construct
MFVFLVLLPLVSSQCVNLTTRTQLPPAYTNSFTRGVYYPDKVFRSSVLHSTQDLFLPFFSNVTWFHAIHVSGTNGTKRFDNPVLPFNDGVYFASTEKSNIIRGWIFGTTLDSKTQSLLIVNNATNVVIKVCEFQFCNDPFLGVYYHKNNKSWMESEFRVYSSANNCTFEYVSQPFLMDLEGKQGNFKNLREFVFKNIDGYFKIYSKHTPINLVRDLPQGFSALEPLVDLPIGINITRFQTLLALHRSYLTPGDSSSGWTAGAAAYYVGYLQPRTFLLKYNENGTITDAVDCALDPLSETKCTLKSFTVEKGIYQTSNFRVQPTESIVRFPNITNLCPFGEVFNATRFASVYAWNRKRISNCVADYSVLYNSASFSTFKCYGVSPTKLNDLCFTNVYADSFVIRGDEVRQIAPGQTGKIADYNYKLPDDFTGCVIAWNSNNLDSKVGGNYNYLYRLFRKSNLKPFERDISTEIYQAGSTPCNGVEGFNCYFPLQSYGFQPTNGVGYQPYRVVVLSFELLHAPATVCGPKKSTNLVKNKCVNFNFNGLTGTGVLTESNKKFLPFQQFGRDIADTTDAVRDPQTLEILDITPCSFGGVSVITPGTNTSNQVAVLYQDVNCTEVPVAIHADQLTPTWRVYSTGSNVFQTRAGCLIGAEHVNNSYECDIPIGAGICASYQTQTNSPRRARSVASQSIIAYTMSLGAENSVAYSNNSIAIPTNFTISVTTEILPVSMTKTSVDCTMYICGDSTECSNLLLQYGSFCTQLNRALTGIAVEQDKNTQEVFAQVKQIYKTPPIKDFGGFNFSQILPDPSKPSKRSFIEDLLFNKVTLADAGFIKQYGDCLGDIAARDLICAQKFNGLTVLPPLLTDEMIAQYTSALLAGTITSGWTFGAGAALQIPFAMQMAYRFNGIGVTQNVLYENQKLIANQFNSVIGKIQDSLSSTASALGKLQDVVNQNAQALNTLVKQLSSNFGCISSVLNDILSRLDKVEAEVQIDCLITGRLQSLQTYVTQQLIRAAEIRASANLAATKMSECVLGQSKRVDFCGKGYHLMSFPQSAPHGVVFLHVTYVPAQEKNFTTAPAICHDGKAHFPREGVFVSNGTHWFVTQRNFYEPQIITTDNTFVSGNCDVVIGIVNNTVYDPLQPELDSGGSGYIPEAPRDGQAYVRKDGEWVLLSTFL

SEQ ID NO: 10470 - protein, 1177 aa, Artificial Sequence
  SARS-CoV-2/Guangdong/GD2020087-P0008/2020__EPI_ISL_413863 spike protein (1-1147)(A972C_R995C) Foldon construct
MFVFLVLLPLVSSQCVNLTTRTQLPPAYTNSFTRGVYYPDKVFRSSVLHSTQDLFLPFFSNVTWFHAIHVSGTNGTKRFDNPVLPFNDGVYFASTEKSNIIRGWIFGTTLDSKTQSLLIVNNATNVVIKVCEFQFCNDPFLGVYYHKNNKSWMESEFRVYSSANNCTFEYVSQPFLMDLEGKQGNFKNLREFVFKNIDGYFKIYSKHTPINLVRDLPQGFSALEPLVDLPIGINITRFQTLLALHRSYLTPGDSSSGWTAGAAAYYVGYLQPRTFLLKYNENGTITDAVDCALDPLSETKCTLKSFTVEKGIYQTSNFRVQPTESIVRFPNITNLCPFGEVFNATRFASVYAWNRKRISNCVADYSVLYNSASFSTFKCYGVSPTKLNDLCFTNVYADSFVIRGDEVREIAPGQTGKIADYNYKLPDDFTGCVIAWNSNNLDSKVGGNYNYLYRLFRKSNLKPFERDISTEIYQAGSTPCNGVEGFNCYFPLQSYGFQPTNGVGYQPYRVVVLSFELLHAPATVCGPKKSTNLVKNKCVNFNFNGLTGTGVLTESNKKFLPFQQFGRDIADTTDAVRDPQTLEILDITPCSFGGVSVITPGTNTSNQVAVLYQDVNCTEVPVAIHADQLTPTWRVYSTGSNVFQTRAGCLIGAEHVNNSYECDIPIGAGICASYQTQTNSPRRARSVASQSIIAYTMSLGAENSVAYSNNSIAIPTNFTISVTTEILPVSMTKTSVDCTMYICGDSTECSNLLLQYGSFCTQLNRALTGIAVEQDKNTQEVFAQVKQIYKTPPIKDFGGFNFSQILPDPSKPSKRSFIEDLLFNKVTLADAGFIKQYGDCLGDIAARDLICAQKFNGLTVLPPLLTDEMIAQYTSALLAGTITSGWTFGAGAALQIPFAMQMAYRFNGIGVTQNVLYENQKLIANQFNSAIGKIQDSLSSTASALGKLQDVVNQNAQALNTLVKQLSSNFGCISSVLNDILSRLDKVEAEVQIDCLITGRLQSLQTYVTQQLIRAAEIRASANLAATKMSECVLGQSKRVDFCGKGYHLMSFPQSAPHGVVFLHVTYVPAQEKNFTTAPAICHDGKAHFPREGVFVSNGTHWFVTQRNFYEPQIITTDNTFVSGNCDVVIGIVNNTVYDPLQPELDSGGSGYIPEAPRDGQAYVRKDGEWVLLSTFL

SEQ ID NO: 10471 - protein, 1177 aa, Artificial Sequence
  SARS-CoV-2/Sweden/01/2020__EPI_ISL_411951 spike protein (1-1147)(A972C_R995C) Foldon construct
MFVFLVLLPLVSSQCVNLTTRTQLPPAYTNSFTRGVYYPDKVFRSSVLHSTQDLFLPFFSNVTWFHAIHVSGTNGTKRFDNPVLPFNDGVYFASTEKSNIIRGWIFGTTLDSKTQSLLIVNNATNVVIKVCEFQFCNDPFLGVYYHKNNKSWMESEFRVYSSANNCTFEYVSQPFLMDLEGKQGNFKNLREFVFKNIDGYFKIYSKHTPINLVRDLPQGFSALEPLVDLPIGINITRFQTLLALHRSYLTPGDSSSGWTAGAAAYYVGYLQPRTFLLKYNENGTITDAVDCALDPLSETKCTLKSFTVEKGIYQTSNFRVQPTESIVRFPNITNLCPFGEVFNATRFASVYAWNRKRISNCVADYSVLYNSASFSTFKCYGVSPTKLNDLCFTNVYADSFVIRGDEVRQIAPGQTGKIADYNYKLPDDFTGCVIAWNSNNLDSKVGGNYNYLYRLFRKSNLKPFERDISTEIYQAGSTPCNGVEGFNCYFPLQSYGFQPTNGVGYQPYRVVVLSFELLHAPATVCGPKKSTNLVKNKCVNFNFNGLTGTGVLTESNKKFLPFQQFGRDIADTTDAVRDPQTLEILDITPCSFGGVSVITPGTNTSNQVAVLYQDVNCTEVPVAIHADQLTPTWRVYSTGSNVFQTRAGCLIGAEHVNNSYECDIPIGAGICASYQTQTNSPRRARSVASQSIIAYTMSLGAENSVAYSNNSIAIPTNFTISVTTEILPVSMTKTSVDCTMYICGDSTECSNLLLQYGSFCTQLNRALTGIAVEQDKNTQEVFAQVKQIYKTPPIKDCGGFNFSQILPDPSKPSKRSFIEDLLFNKVTLADAGFIKQYGDCLGDIAARDLICAQKFNGLTVLPPLLTDEMIAQYTSALLAGTITSGWTFGAGAALQIPFAMQMAYRFNGIGVTQNVLYENQKLIANQFNSAIGKIQDSLSSTASALGKLQDVVNQNAQALNTLVKQLSSNFGCISSVLNDILSRLDKVEAEVQIDCLITGRLQSLQTYVTQQLIRAAEIRASANLAATKMSECVLGQSKRVDFCGKGYHLMSFPQSAPHGVVFLHVTYVPAQEKNFTTAPAICHDGKAHFPREGVFVSNGTHWFVTQRNFYEPQIITTDNTFVSGNCDVVIGIVNNTVYDPLQPELDSGGSGYIPEAPRDGQAYVRKDGEWVLLSTFL

SEQ ID NO: 10472 - protein, 1177 aa, Artificial Sequence
  SARS-CoV-2/Tianmen/HBCDC-HB-07/2020__EPI_ISL_412983 spike protein (1-1147)(A972C_R995C) Foldon construct
MFVFLVLLPLVSSQCVNLTTRTQLPPAYTNSFTRGVYYPDKVFRSSVLHSTQDLFLPFFSNVTWFHAIHVSGTNGTKRFDNPVLPFNDGVYFASTEKSNIIRGWIFGTTLDSKTQSLLIVNNATNVVIKVCEFQFCNDPFLGVYYHKNNKSWMESEFRVYSSANNCTFEYVSQPFLMDLEGKQGNFKNLREFVFKNIDGYFKIYSKHTPINLVRDLPQGFSALEPLVDLPIGINITRFQTLLALHRSYLTPGDSSSGWTAGAAAYYVGYLQPRTFLLKYNENGTITDAVDCALDPLSETKCTLKSFTVEKGIYQTSNFRVQPTESIVRFPNITNLCPFGEVFNATRFASVYAWNRKRISNCVADYSVLYNSASFSTFKCYGVSPTKLNDLCFTNVYADSFVIRGDEVRQIAPGQTGKIADYNYKLPDDFTGCVIAWNSNNLDSKVGGNYNYLYRLFRKSNLKPFERDISTEIYQAGSTPCNGVEGFNCYFPLQSYGFQPTNGVGYQPYRVVVLSFELLHAPATVCGPKKSTNLVKNKCVNFNFNGLTGTGVLTESNKKFLPFQQFGRDIADTTDAVRDPQTLEILDITPCSFGGVSVITPGTNTSNQVAVLYQDLNCTEVPVAIHADQLTPTWRVYSTGSNVFQTRAGCLIGAEHVNNSYECDIPIGAGICASYQTQTNSPRRARSVASQSIIAYTMSLGAENSVAYSNNSIAIPTNFTISVTTEILPVSMTKTSVDCTMYICGDSTECSNLLLQYGSFCTQLNRALTGIAVEQDKNTQEVFAQVKQIYKTPPIKDFGGFNFSQILPDPSKPSKRSFIEDLLFNKVTLADAGFIKQYGDCLGDIAARDLICAQKFNGLTVLPPLLTDEMIAQYTSALLAGTITSGWTFGAGAALQIPFAMQMAYRFNGIGVTQNVLYENQKLIANQFNSAIGKIQDSLSSTASALGKLQDVVNQNAQALNTLVKQLSSNFGCISSVLNDILSRLDKVEAEVQIDCLITGRLQSLQTYVTQQLIRAAEIRASANLAATKMSECVLGQSKRVDFCGKGYHLMSFPQSAPHGVVFLHVTYVPAQEKNFTTAPAICHDGKAHFPREGVFVSNGTHWFVTQRNFYEPQIITTDNTFVSGNCDVVIGIVNNTVYDPLQPELDSGGSGYIPEAPRDGQAYVRKDGEWVLLSTFL

SEQ ID NO: 10473 - protein, 1177 aa, Artificial Sequence
  SARS-CoV-2/Hong Kong/case42_VM20002493/2020__EPI_ISL_414527 spike protein (1-1147)(A972C_R995C) Foldon construct
MFVFLVLLPLVSSQCVNLTTRTQLPPAYTNSFTRGVYYPDKVFRSSVLHSTQDLFLPFFSNVTWFHAIHVSGTNGTKRFDNPVLPFNDGVYFASTEKSNIIRGWIFGTTLDSKTQSLLIVNNATNVVIKVCEFQFCNDPFLGVYYHKNNKSWMESEFRVYSSANNCTFEYVSQPFLMDLEGKQGNFKNLREFVFKNIDGYFKIYSKHTPINLVRDLPQGFSALEPLVDLPIGINITRFQTLLALHRSYLTPGDSSSGWTAGAAAYYVGYLQPRTFLLKYNENGTITDAVDCALDPLSETKCTLKSFTVEKGIYQTSNFRVQPTESIVRFPNITNLCPFGEVFNATRFASVYAWNRKRISNCVADYSVLYNSASFSTFKCYGVSPTKLNDLCFTNVYADSFVIRGDEVRQIAPGQTGKIADYNYKLPDDFTGCVIAWNSNNLDSKVGGNYNYLYRLFRKSNLKPFERDISTEIYQAGSTPCNGVEGFNCYFPLQSYGFQPTNGVGYQPYRVVVLSFELLHAPATVCGPKKSTNLVKNKCVNFNFNGLTGTGVLTESNKKFLPFQQFGRDIADTTDAVRDPQTLEILDITPCSFGGVSVITPGTNTSNQVAVLYQDVNCTEVPVAIHADQLTPTWRVYSTGSNVFQTRAGCLIGAEHVNNSYECDIPIGAGICASYQTQTNSPRRARSVASQSIIAYTMSLGAENSVAYSNNSIAIPTNFAISVTTEILPVSMTKTSVDCTMYICGDSTECSNLLLQYGSFCTQLNRALTGIAVEQDKNTQEVFAQVKQIYKTPPIKDFGGFNFSQILPDPSKPSKRSFIEDLLFNKVTLADAGFIKQYGDCLGDIAARDLICAQKFNGLTVLPPLLTDEMIAQYTSALLAGTITSGWTFGAGAALQIPFAMQMAYRFNGIGVTQNVLYENQKLIANQFNSAIGKIQDSLSSTASALGKLQDVVNQNAQALNTLVKQLSSNFGCISSVLNDILSRLDKVEAEVQIDCLITGRLQSLQTYVTQQLIRAAEIRASANLAATKMSECVLGQSKRVDFCGKGYHLMSFPQSAPHGVVFLHVTYVPAQEKNFTTAPAICHDGKAHFPREGVFVSNGTHWFVTQRNFYEPQIITTDNTFVSGNCDVVIGIVNNTVYDPLQPELDSGGSGYIPEAPRDGQAYVRKDGEWVLLSTFL

SEQ ID NO: 10474 - protein, 1177 aa, Artificial Sequence
  SARS-CoV-2/USA/CruiseA-23/2020__EPI_ISL_414482 spike protein (1-1147)(A972C_R995C) Foldon construct
MFVFLVLLPLVSSQCVNLTTRTQLPPAYTNSFTRGVYYPDKVFRSSVLHSTQDLFLPFFSNVTWFHAIHVSGTNGTKRFDNPVLPFNDGVYFASTEKSNIIRGWIFGTTLDSKTQSLLIVNNATNVVIKVCEFQFCNDPFLGVYYHKNNKSWMESEFRVYSSANNCTFEYVSQPFLMDLEVKQGNFKNLREFVFKNIDGYFKIYSKHTPINLVRDLPQGFSALEPLVDLPIGINITRFQTLLALHRSYLTPGDSSSGWTAGAAAYYVGYLQPRTFLLKYNENGTITDAVDCALDPLSETKCTLKSFTVEKGIYQTSNFRVQPTESIVRFPNITNLCPFGEVFNATRFASVYAWNRKRISNCVADYSVLYNSASFSTFKCYGVSPTKLNDLCFTNVYADSFVIRGDEVRQIAPGQTGKIADYNYKLPDDFTGCVIAWNSNNLDSKVGGNYNYLYRLFRKSNLKPFERDISTEIYQAGSTPCNGVEGFNCYFPLQSYGFQPTNGVGYQPYRVVVLSFELLHAPATVCGPKKSTNLVKNKCVNFNFNGLTGTGVLTESNKKFLPFQQFGRDIADTTDAVRDPQTLEILDITPCSFGGVSVITPGTNTSNQVAVLYQDVNCTEVPVAIHADQLTPTWRVYSTGSNVFQTRAGCLIGAEHVNNSYECDIPIGAGICASYQTQTNSPRRARSVASQSIIAYTMSLGAENSVAYSNNSIAIPTNFTISVTTEILPVSMTKTSVDCTMYICGDSTECSNLLLQYGSFCTQLNRALTGIAVEQDKNTQEVFAQVKQIYKTPPIKDFGGFNFSQILPDPSKPSKRSFIEDLLFNKVTLADAGFIKQYGDCLGDIAARDLICAQKFNGLTVLPPLLTDEMIAQYTSALLAGTITSGWTFGAGAALQIPFAMQMAYRFNGIGVTQNVLYENQKLIANQFNSAIGKIQDSLSSTASALGKLQDVVNQNAQALNTLVKQLSSNFGCISSVLNDILSRLDKVEAEVQIDCLITGRLQSLQTYVTQQLIRAAEIRASANLAATKMSECVLGQSKRVDFCGKGYHLMSFPQSAPHGVVFLHVTYVPAQEKNFTTAPAICHDGKAHFPREGVFVSNGTHWFVTQRNFYEPQIITTDNTFVSGNCDVVIGIVNNTVYDPLQPELDSGGSGYIPEAPRDGQAYVRKDGEWVLLSTFL

SEQ ID NO: 10475 - protein, 1177 aa, Artificial Sequence
  SARS-CoV-2/Hong Kong/case85_VM20002868/2020__EPI_ISL_414519 spike protein (1-1147)(A972C_R995C) Foldon construct
MFVFLVLVPLVSSQCVNLTTRTQLPPAYTNSFTRGVYYPDKVFRSSVLHSTQDLFLPFFSNVTWFHAIHVSGTNGTKRFDNPVLPFNDGVYFASTEKSNIIRGWIFGTTLDSKTQSLLIVNNATNVVIKVCEFQFCNDPFLGVYYHKNNKSWMESEFRVYSSANNCTFEYVSQPFLMDLEGKQGNFKNLREFVFKNIDGYFKIYSKHTPINLVRDLPQGFSALEPLVDLPIGINITRFQTLLALHRSYLTPGDSSSGWTAGAAAYYVGYLQPRTFLLKYNENGTITDAVDCALDPLSETKCTLKSFTVEKGIYQTSNFRVQPTESIVRFPNITNLCPFGEVFNATRFASVYAWNRKRISNCVADYSVLYNSASFSTFKCYGVSPTKLNDLCFTNVYADSFVIRGDEVRQIAPGQTGKIADYNYKLPDDFTGCVIAWNSNNLDSKVGGNYNYLYRLFRKSNLKPFERDISTEIYQAGSTPCNGVEGFNCYFPLQSYGFQPTNGVGYQPYRVVVLSFELLHAPATVCGPKKSTNLVKNKCVNFNFNGLTGTGVLTESNKKFLPFQQFGRDIADTTDAVRDPQTLEILDITPCSFGGVSVITPGTNTSNQVAVLYQDVNCTEVPVAIHADQLTPTWRVYSTGSNVFQTRAGCLIGAEHVNNSYECDIPIGAGICASYQTQTNSPRRARSVASQSIIAYTMSLGAENSVAYSNNSIAIPTNFTISVTTEILPVSMTKTSVDCTMYICGDSTECSNLLLQYGSFCTQLNRALTGIAVEQDKNTQEVFAQVKQIYKTPPIKDFGGFNFSQILPDPSKPSKRSFIEDLLFNKVTLADAGFIKQYGDCLGDIAARDLICAQKFNGLTVLPPLLTDEMIAQYTSALLAGTITSGWTFGAGAALQIPFAMQMAYRFNGIGVTQNVLYENQKLIANQFNSAIGKIQDSLSSTASALGKLQDVVNQNAQALNTLVKQLSSNFGCISSVLNDILSRLDKVEAEVQIDCLITGRLQSLQTYVTQQLIRAAEIRASANLAATKMSECVLGQSKRVDFCGKGYHLMSFPQSAPHGVVFLHVTYVPAQEKNFTTAPAICHDGKAHFPREGVFVSNGTHWFVTQRNFYEPQIITTDNTFVSGNCDVVIGIVNNTVYDPLQPELDSGGSGYIPEAPRDGQAYVRKDGEWVLLSTFL

SEQ ID NO: 10476 - protein, 1177 aa, Artificial Sequence; identical to SEQ ID NO: 10466
  SARS-CoV-2/England/200990660/2020__EPI_ISL_414523 spike protein (1-1147)(A972C_R995C) Foldon construct

SEQ ID NO: 10477 - protein, 1177 aa, Artificial Sequence
  SARS-CoV-2/Australia/NSW09/2020__EPI_ISL_413595 spike protein (1-1147)(A972C_R995C) Foldon construct
MFVFLVLLPLVSSQCVNLTTRTQLPPAYTNSFTRGVYYPDKVFRSSVLHSTQDLFLPFFSNVTWFHAIHVSGTNGTKRFDNPVLPFNDGVYFASTEKSNIIRGWIFGTTLDSKTQSLLIVNNATNVVIKVCEFQFCNDPFLGVYYHKNNKSWMESEFRVYSSANNCTFEYVSQPFLMDLEGKQGNFKNLREFVFKNIDGYFKIYSKHTPINLVRDLPQGFSALEPLVDLPIGINITRFQTLLALHRSYLTPGDSSSGWTAGAAAYYVGYLQPRTFLLKYNENGTITDAVDCALDPLSETKCTLKSFTVEKGIYQTSNFRVQPTESIVRFPNITNLCPFGEVFNATRFASVYAWNRKRISNCVADYSVLYNSASFSTFKCYGVSPTKLNDLCFTNVYADSFVIRGDEVRQIAPGQTGKIADYNYKLPDDFTGCVIAWNSNNLDSKVGGNYNYLYRLFRKSNLKPFERDISTEIYQAGSTPCNGVEGFNCYFPLQSYGFQPTNGVGYQPYRVVVLSFELLHAPATVCGPKKSTNLVKNKCVNFNFNGLTGTGVLTESNKKFLPFQQFGRDIADTTDAVRDPQTLEILDITPCSFGGVSVITPGTNTSNQVAVLYQDVNCTEVPVAIHADQLTPTWRVYSTGSNVFQTRAGCLIGAEHVNNSYECDIPIGAGICASYQTQTNSPRRARSVASQSIIAYTMSLGAENSVAYSNNSIAIPTNFTISVTTEILPVSMTKTSVDCTMYICGDSTECSNLLLQYGSFCTQLNRALTGIAVEQDKNTQEVFAQVKQIYKTPPIKDFGGFNFSQILPDPSKPSKRSFIEDLLFNKVTLADAGFIKQYGDCLGDIAARDLICAQKFNGLTVLPPLLTDEMIAQYTSALLAGTITSGWTFGAGAALQIPFAMQMAYRFNGIGVTQNVLYENQKLIANQFNSAIGKIQDSLSFTASALGKLQDVVNQNAQALNTLVKQLSSNFGCISSVLNDILSRLDKVEAEVQIDCLITGRLQSLQTYVTQQLIRAAEIRASANLAATKMSECVLGQSKRVDFCGKGYHLMSFPQSAPHGVVFLHVTYVPAQEKNFTTAPAICHDGKAHFPREGVFVSNGTHWFVTQRNFYEPQIITTDNTFVSGNCDVVIGIVNNTVYDPLQPELDSGGSGYIPEAPRDGQAYVRKDGEWVLLSTFL

SEQ ID NO: 10478 - protein, 1177 aa, Artificial Sequence; identical to SEQ ID NO: 10458
  SARS-CoV-2/Australia/NSW10/2020__EPI_ISL_413596 spike protein (1-1147)(A972C_R995C) Foldon construct

SEQ ID NO: 10479 - protein, 1177 aa, Artificial Sequence
  SARS-CoV-2/Switzerland/1000477797/2020__EPI_ISL_413023 spike protein (1-1147)(A972C_R995C) Foldon construct
MFVFLVLLPLVSSQCVNLTTRTQLPPAYTNSFTRGVYYPDKVFRSSVLHSTQDLFLPFFSNVTWFHAIHVSGTNGTKRFDNPVLPFNDGVYFASTEKSNIIRGWIFGTTLDSKTQSLLIVNNATNVVIKVCEFQFCNDPFLGVYYHKNNKSWMESEFRVYSSANNCTFEYVSQPFLMDLEGKQGNFKNLREFVFKNIDGYFNIYSKHTPINLVRDLPQGFSALEPLVDLPIGINITRFQTLLALHRSYLTPGDSSSGWTAGAAAYYVGYLQPRTFLLKYNENGTITDAVDCALDPLSETKCTLKSFTVEKGIYQTSNFRVQPTESIVRFPNITNLCPFGEVFNATRFASVYAWNRKRISNCVADYSVLYNSASFSTFKCYGVSPTKLNDLCFTNVYADSFVIRGDEVRQIAPGQTGKIADYNYKLPDDFTGCVIAWNSNNLDSKVGGNYNYLYRLFRKSNLKPFERDISTEIYQAGSTPCNGVEGFNCYFPLQSYGFQPTNGVGYQPYRVVVLSFELLHAPATVCGPKKSTNLVKNKCVNFNFNGLTGTGVLTESNKKFLPFQQFGRDIADTTDAVRDPQTLEILDITPCSFGGVSVITPGTNTSNQVAVLYQGVNCTEVPVAIHADQLTPTWRVYSTGSNVFQTRAGCLIGAEHVNNSYECDIPIGAGICASYQTQTNSPRRARSVASQSIIAYTMSLGAENSVAYSNNSIAIPTNFTISVTTEILPVSMTKTSVDCTMYICGDSTECSNLLLQYGSFCTQLNRALTGIAVEQDKNTQEVFAQVKQIYKTPPIKDFGGFNFSQILPDPSKPSKRSFIEDLLFNKVTLADAGFIKQYGDCLGDIAARDLICAQKFNGLTVLPPLLTDEMIAQYTSALLAGTITSGWTFGAGAALQIPFAMQMAYRFNGIGVTQNVLYENQKLIANQFNSAIGKIQDSLSSTASALGKLQDVVNQNAQALNTLVKQLSSNFGCISSVLNDILSRLDKVEAEVQIDCLITGRLQSLQTYVTQQLIRAAEIRASANLAATKMSECVLGQSKRVDFCGKGYHLMSFPQSAPHGVVFLHVTYVPAQEKNFTTAPAICHDGKAHFPREGVFVSNGTHWFVTQRNFYEPQIITTDNTFVSGNCDVVIGIVNNTVYDPLQPELDSGGSGYIPEAPRDGQAYVRKDGEWVLLSTFL

SEQ ID NO: 10480 - protein, 1177 aa, Artificial Sequence
  SARS-CoV-2/Belgium/BA-02291/2020__EPI_ISL_415159 spike protein (1-1147)(A972C_R995C) Foldon construct
MFVFLVLLPLVSSQCVNLTTRTQLPPAYTNSFTRGVYYPDKVFRSSVLHSTQDLFLPFFSNVTWFHAIHVSGTNGTKRFDNPVLPFNDGVYFASTEKSNIIRGWIFGTTLDSKTQSLLIVNNATNVVIKVCEFQFCNDPFLGVYYHKNNKSWMESEFRVYSSANNCTFEYVSQPFLMDLEGKQGNFKNLREFVFKNIDGYFKIYSKHTPINLVRDLPQGFSALEPLVDLPIGINITRFQTLLALHRSYLTPGDSSSGWTAGAAAYYVGYLQPRTFLLKYNENGTITDAVDCALDPLSETKCTLKSFTVEKGIYQTSNFRVQPTESIVRFPNITNLCPFGEVFNATRFASVYAWNRKRISNCVADYSVLYNSASFSTFKCYGVSPTKLNDLCFTNVYADSFVIRGDEVRQIAPGQTGKIADYNYKLPDDFTGCVIAWNSNNLDSKVGGNYNYLYRLFRRSNLKPFERDISTEIYQAGSTPCNGVEGFNCYFPLQSYGFQPTNGVGYQPYRVVVLSFELLPAPATVCGPKKSTNLVKNKCVNFNFNGLTGTGVLTESNKKFLPFQQFGRDIADTTDAVRDPQTLEILDITPCSFGGVSVITPGTNTSNQVAVLYQGVNCTEVPVAIHADQLTPTWRVYSTGSNVFQTRAGCLIGAEHVNNSYECDIPIGAGICASYQTQTNSPRRARSVASQSIIAYTMSLGAENSVAYSNNSIAIPTNFTISVTTEILPVSMTKTSVDCTMYICGDSTECSNLLLQYGSFCTQLNRALTGIAVEQDKNTQEVFAQVKQIYKTPPIKDFGGFNFSQILPDPSKPSKRSFIEDLLFNKVTLADAGFIKQYGDCLGDIAARDLICAQKFNGLTVLPPLLTDEMIAQYTSALLAGTITSGWTFGAGAALQIPFAMQMAYRFNGIGVTQNVLYENQKLIANQFNSAIGKIQDSLSSAAPALGKLQDVVNQNAQALNTLVKQLSSNFGCISSVLNDILSRLDKVEAEVQIDCLITGRLQSLQTYVTQQLIRAAEIRASANLAATKMSECVLGQSKRVDFCGKGYHLMSFPQSAPHGVVFLHVTYVPAQEKNFTTAPAICHDGKAHFPREGVFVSNGTHWFVTQRNFYEPQIITTDNTFVSGNCDVVIGIVNNTVYDPLQPELDSGGSGYIPEAPRDGQAYVRKDGEWVLLSTFL

SEQ ID NO: 10481 - protein, 1177 aa, Artificial Sequence
  SARS-CoV-2/USA/WA8-UW5/2020__EPI_ISL_413486 spike protein (1-1147)(A972C_R995C) Foldon construct
MFVFLVLLPLVSSQCVNLTTRTQLPPAYTNSFTRGVYYPDKVFRSSVLHSTQDLFLPFFSNVTWFHAIHVSGTNGTKRFDNPVLPFNDGVYFASTEKSNIIRGWIFGTTLDSKTQSLLIVNNATNVVIKVCEFQFCNDPFLGVYYHKNNKSWMESEFRVYSSANNCTFEYVSQPFLMDLEGKQGNFKNLREFVFKNIDGYFKIYSKHTPINLVRDLPQGFSALEPLVDLPIGINITRFQTLLALHRSYLTPGDSSSGWTAGAAAYYVGYLQPRTFLLKYNENGTITDAVDCALDPLSETKCTLKSFTVEKGIYQTSNFRVQPTESIVRFPNITNLCPFGEVFNATRFASVYAWNRKRISNCVADYSVLYNSASFSTFKCYGVSPTKLNDLCFTNVYADSFVIRGDEVRQIAPGQTGKIADYNYKLPDDFTGCVIAWNSNNLDSKVGGNYNYLYRLFRKSNLKPFERDISTEIYQAGSTPCNGVEGFNCYFPLQSYGFQPTNGVGYQPYRVVVLSFELLHAPATVCGPKKSTNLVKNKCVNFNFNGLTGTGVLTESNKKFLPFQQFGRDIADTTDAVRDPQTLEILDITPCSFGGVSVITPGTNTSNQVAVLYQDVNCTEVPVAIHADQLTPTWRVYSTGSNVFQTRAGCLIGAEYVNNSYECDIPIGAGICASYQTQTNSPRRARSVASQSIIAYTMSLGAENSVAYSNNSIAIPTNFTISVTTEILPVSMTKTSVDCTMYICGDSTECSNLLLQYGSFCTQLNRALTGIAVEQDKNTQEVFAQVKQIYKTPPIKDFGGFNFSQILPDPSKPSKRSFIEDLLFNKVTLADAGFIKQYGDCLGDIAARDLICAQKFNGLTVLPPLLTDEMIAQYTSALLAGTITSGWTFGAGAALQIPFAMQMAYRFNGIGVTQNVLYENQKLIANQFNSAIGKIQDSLSSTASALGKLQDVVNQNAQALNTLVKQLSSNFGCISSVLNDILSRLDKVEAEVQIDCLITGRLQSLQTYVTQQLIRAAEIRASANLAATKMSECVLGQSKRVDFCGKGYHLMSFPQSAPHGVVFLHVTYVPAQEKNFTTAPAICHDGKAHFPREGVFVSNGTHWFVTQRNFYEPQIITTDNTFVSGNCDVVIGIVNNTVYDPLQPELDSGGSGYIPEAPRDGQAYVRKDGEWVLLSTFL

SEQ ID NO: 10482 - protein, 1177 aa, Artificial Sequence
  SARS-CoV-2/England/20102000506/2020__EPI_ISL_415147 spike protein (1-1147)(A972C_R995C) Foldon construct
MFVFLVLLPLVSSQCVNLTTRTQLPPAYTNSFTRGVYYPDKVFRSSVLHSTQDLFLPFFSNVTWFHAIHVSGTNGTKRFDNPVLPFNDGVYFASTEKSNIIRGWIFGTTLDSKTQSLLIVNNATNVVIKVCEFQFCNDPFLGVYYHKNNKSWMESEFRVYSSANNCTFEYVSQPFLMDLEGKQGNFKNLREFVFKNIDGYFKIYSKHTPINLVRDLPQGFSALEPLVDLPIGINITRFQTLLALHRSYLTPGDSSSGWTAGAAAYYVGYLQPRTFLLKYNENGTITDAVDCALDPLSETKCTLKSFTVEKGIYQTSNFRVQPTESIVRFPNITNLCPFGEVFNATRFASVYAWNRKRISNCVADYSVLYNSASFSTFKCYGVSPTKLNDLCFTNVYADSFVIRGDEVRQIAPGQTGKIADYNYKLPDDFTGCVIAWNSNNLDSKVGGNYNYLYRLFRKSNLKPFERDISTEIYQAGSTPCNGVEGFNCYFPLQSYGFQPTNGVGYQPYRVVVLSFELLHAPATVCGPKKSTNLVKNKCVNFNFNGLTGTGVLTESNKKFLPFQQFGRDIADTTDAVRDPQTLEILDITPCSFGGVSVITPGTNTSNQVAVLYQGVNCTEVPVAIHADQLTPTWRVYSTGSNVFQTRAGCLIGAEHVNNSYECDIPIGAGICASYQTQTNSPRRARSVASQSIIAYTMSLGAENSVAYSNNSIAIPTNFTISVTTEILPVSMTKTSVDCTMYICGDSTECSNLLLQYGSFCTQLNRALTGIAVEQDKNTQEVFAQVKQIYKTPPIKDFGGFNFSQILPDPSKPSKRSFIEDLLFNKVTLADAGFIKQYGYCLGDIAARDLICAQKFNGLTVLPPLLTDEMIAQYTSALLAGTITSGWTFGAGAALQIPFAMQMAYRFNGIGVTQNVLYENQKLIANQFNSAIGKIQDSLSSTASALGKLQDVVNQNAQALNTLVKQLSSNFGCISSVLNDILSRLDKVEAEVQIDCLITGRLQSLQTYVTQQLIRAAEIRASANLAATKMSECVLGQSKRVDFCGKGYHLMSFPQSAPHGVVFLHVTYVPAQEKNFTTAPAICHDGKAHFPREGVFVSNGTHWFVTQRNFYEPQIITTDNTFVSGNCDVVIGIVNNTVYDPLQPELDSGGSGYIPEAPRDGQAYVRKDGEWVLLSTFL

SEQ ID NO: 10483 - protein, 1177 aa, Artificial Sequence
  SARS-CoV-2/Belgium/VAG-03013/2020__EPI_ISL_415155 spike protein (1-1147)(A972C_R995C) Foldon construct
MFVFLVLLPLVSSQCVNLTTRTQLPPAYTNSFTRGVYYPDKVFRSSVLHSTQDLFLPFFSNVTWFHAIHVSGTNGTKRFDNPVLPFNDGVYFASTEKSNIIRGWIFGTTLDSKTQSLLIVNNATNVVIKVCEFQFCNDPFLGVYYHKNNKSWMESEFRVYSSANNCTFEYVSQPFLMDLEGKQGNFKNLREFVFKNIDGYFKIYSKHTPINLVRDLPQGFSALEPLVDLPIGINITRFQTLLALHRSYLTPGDSSSGWTAGAAAYYVGYLQPRTFLLKYNENGTITDAVDCALDPLSETKCTLKSFTVEKGIYQTSNFRVQPTESIVRFPNITNLCPFGEVFNATRFASVYAWNRKRISNCVADYSVLYNSASFSTFKCYGVSPTKLNDLCFTNVYADSFVIRGDEVRQIAPGQTGKIADYNYKLPDDFTGCVIAWNSNNLDSKVGGNYNYLYRLFRKSNLKPFERDISTEIYQAGSTPCNGVEGFNCYFPLQSYGFQPTNGVGYQPYRVVVLSFELLHAPATVCGPKKSTNLVKNKCVNFNFNGLTGTGVLTESNKKFLPFQQFGRDIADTTDAVRDPQTLEILDITPCSFGGVSVITPGTNTSNQVAVLYQGVNCTEVPVAIHADQLTPTWRVYSTGSNVFQTRAGCLIGAEHVNNSYECDIPIGAGICASYQTQTNSPRRARSVASQSIIAYTMSLGAENSVAYSNNSIAIPTNFTISVTTEILPVSMTKTSVDCTMYICGDSTECSNLLLQYGSFCTQLNRALTGIAVEQDKNTQEVFAQVKQIYKTPPIKDFGGFNFSQILPDPSKPSKRSFIEDLLFNKVTLADAGFIKQYGDCLGDIAARDLICAQKFNGLTVLPPLLTDEMIAQYTSALLAGTITSGWTFGAGAALQIPFAMQMAYRFNGIGVTQNVLYENQKLIANQFNSAIGKIQDSLSSTATALGKLQDVVNQNAQALNTLVKQLSSNFGCISSVLNDILSRLDKVEAEVQIDCLITGRLQSLQTYVTQQLIRAAEIRASANLAATKMSECVLGQSKRVDFCGKGYHLMSFPQSAPHGVVFLHVTYVPAQEKNFTTAPAICHDGKAHFPREGVFVSNGTHWFVTQRNFYEPQIITTDNTFVSGNCDVVIGIVNNTVYDPLQPELDSGGSGYIPEAPRDGQAYVRKDGEWVLLSTFL

SEQ ID NO: 10484 - protein, 1177 aa, Artificial Sequence
  SARS-CoV-2/Belgium/BC-03016/2020__EPI_ISL_415157 spike protein (1-1147)(A972C_R995C) Foldon construct
MFVFLVLLPLVSSQCVNLTTRTQLPPAYTNSFTRGVYYPDKVFRSSVLHSTQDLFLPFFSNVTWFHAIHVSGTNGTKRFDNPVLPFNDGVYFASTEKSNIIRGWIFGTTLDSKTQSLLIVNNATNVVIKVCEFQFCNDPFLGVYYHKNNKSWMESEFRVYSSANNCTFEYVSQPFLMDLEGKQGNFKNLREFVFKNIDGYFKIYSKHTPINLVRDLPQGFSALEPLVDLPIGINITRFQTLLALHRSYLTPGDSSSGWTAGAAAYYVGYLQPRTFLLKYNENGTITDAVDCALDPLSETKCTLKSFTVEKGIYQTSNFRVQPTESIVRFPNITNLCPFGEVFNATRFASVYAWNRKRISNCVADYSVLYNSASFSTFKCYGVSPTKLNDLCFTNVYADSFVIRGDEVRQIAPGQTGKIADYNYKLPDDFTGCVIAWNSNNLDSKVGGNYNYLYRLFRKSNLKPFERDISTEIYQAGSTPCNGVEGFNCYFPLQSYGFQPTNGVGYQPYRVVVLSFELLHAPATVCGPKKSTNLVKNKCVNFNFNGLTGTGVLTESNKKFLPFQQFGRDIADTTDAVRDPQTLEILDITPCSFGGVSVITPGTNTSNQVAVLYQGVNCTEVPVAIHADQLTPTWRVYSTGSNVFQTRAGCLIGAEHVNNSYECDIPIGAGICASYQTQTNSPRRARSVASQSIIAYTMSLGAENSVAYSNNSIAIPTNFTISVTTEILPVSMTKTSVDCTMYICGDSTECSNLLLQYGSFCTQLNRALTGIAVEQDKNTQEVFAQVKQIYKTPPIKDFGGFNFSQILPDPSKPSKRSFIEDLLFNKVTLADAGFIKQYGDCLGDIAARDLICAQKFNGLTVLPPLLTDEMIAQYTSALLAGTITSGWTFGAGAALQIPFAMQMAYRFNGIGVTQNVLYENQKLIANQFNSAIGKIQDSLSSTAPALGKLQDVVNQNAQALNTLVKQLSSNFGCISSVLNDILSRLDKVEAEVQIDCLITGRLQSLQTYVTQQLIRAAEIRASANLAATKMSECVLGQSKRVDFCGKGYHLMSFPQSAPHGVVFLHVTYVPAQEKNFTTAPAICHDGKAHFPREGVFVSNGTHWFVTQRNFYEPQIITTDNTFVSGNCDVVIGIVNNTVYDPLQPELDSGGSGYIPEAPRDGQAYVRKDGEWVLLSTFL

SEQ ID NO: 10485 - protein, 1177 aa, Artificial Sequence
  SARS-CoV-2/Germany/BavPat3/2020__EPI_ISL_414521 spike protein (1-1147)(A972C_R995C) Foldon construct
MFVFLVLLPLVSSQCVNLTTRTQLPPAYTNSFTRGVYYPDKVFRSSVLHSTQDLFLPFFSNVTWFHAIHVSGTNGTKRFDNPVLPFNDGVYFASTEKSNIIRGWIFGTTLDSKTQSLLIVNNATNVVIKVCEFQFCNDPFLGVYYHKNNKSWMESEFRVYSSANNCTFEYVSQPFLMDLEGKQGNFKNLREFVFKNIDGYFKIYSKHTPINLVRDLPQGFSALEPLVDLPIGINITRFQTLLALHRSYLTPGDSSSGWTAGAAAYYVGYLQPRTFLLKYNENGTITDAVDCALDPLSETKCTLKSFTVEKGIYQTSNFRVQPTESIVRFPNITNLCPFGEVFNATRFASVYAWNRKRISNCVADYSVLYNSASFSTFKCYGVSPTKLNDLCFTNVYADSFVIRGDEVRQIAPGQTGKIADYNYKLPDDFTGCVIAWNSNNLDSKVGGNYNYLYRLFRKSNLKPFERDISTEIYQAGSTPCNGVEGFNCYFPLQSYGFQPTNGVGYQPYRVVVLSFELLHAPATVCGPKKSTNLVKNKCVNFNFNGLTGTGVLTESNKKFLPFQQFGRDIADTTDAVRDPQTLEILDITPCSFGGVSVITPGTNTSNQVAVLYQDVNCTEVPVAIHADQLTPTWRVYSTGSNVFQTRAGCLIGAEHVNNSYECDIPIGAGICASYQTQTNSPRRARSVASQSIIAYTMSLGAENSVAYSNNSIAIPTNFTISVTTEILPVSMTKTSVDCTMYICGDSTECSNLLLQYGSFCTQLNRALTGIAVEQDKNTQQVFAQVKQIYKTPPIKDFGGFNFSQILPDPSKPSKRSFIEDLLFNKVTLADAGFIKQYGDCLGDIAARDLICAQKFNGLTVLPPLLTDEMIAQYTSALLAGTITSGWTFGAGAALQIPFAMQMAYRFNGIGVTQNVLYENQKLIANQFNSAIGKIQDSLSSTASALGKLQDVVNQNAQALNTLVKQLSSNFGCISSVLNDILSRLDKVEAEVQIDCLITGRLQSLQTYVTQQLIRAAEIRASANLAATKMSECVLGQSKRVDFCGKGYHLMSFPQSAPHGVVFLHVTYVPAQEKNFTTAPAICHDGKAHFPREGVFVSNGTHWFVTQRNFYEPQIITTDNTFVSGNCDVVIGIVNNTVYDPLQPELDSGGSGYIPEAPRDGQAYVRKDGEWVLLSTFL

SEQ ID NO: 10486 - protein, 1177 aa, Artificial Sequence
  SARS-CoV-2/France/HF1805/2020__EPI_ISL_414628 spike protein (1-1147)(A972C_R995C) Foldon construct
MFVFLVLLPLVSSQCVNLTTRTQLPPAYTNSFTRGVYYPDKVFRSSVLHSTQDLFLPFFSNVTWFHAIHVSGTNGTKRFDNPVLPFNDGVYFASTEKSNIIRGWIFGTTLDSKTQSLLIVNNATNVVIKVCEFQFCNDPFLGVYYHKNNKSWMESEFRVYSSANNCTFEYVSQPFLMDLEGKQGNFKNLREFVFKNIDGYFKIYSKHTPINLVRDLPQGFSALEPLVDLPIGINITRFQTLLALHRSYLTPGDSSSGWTAGAAAYYVGYLQPRTFLLKYNENGTITDAVDCALDPLSETKCTLKSFTVEKGIYQTSNFRVQPTESIVRFPNITNLCPFGEVFNATRFASVYAWNRKRISNCVADYSVLYNSASFSTFKCYGVSPTKLNDLCFTNVYADSFVIRGDEVRQIAPGQTGKIADYNYKLPDDFTGCVIAWNSNNLDSKVGGNYNYLYRLFRKSNLKPFERDISTEIYQAGSTPCNGVEGFNCYFPLQSYGFQPTNGVGYQPYRVVVLSFELLHAPATVCGPKKSTNLVKNKCVNFNFNGLTGTGVLTESNKKFLPFQQFGRDIADTTDAVRDPQTLEILDITPCSFGGVSVITPGTNTSNQVAVLYQGVNCTEVPVAIHADQLTPTWRVYSTGSNVFQTRAGCLIGAEHVNNSYECDIPIGAGICASYQTQTNSPRRARSVASQSIIAYTMSLGAENSVAYSNNSIAIPTNFTISVTTEILPVSMTKTSVDCTMYICGDSTECSNLLLQYGSFCTQLNRALTGIAVEQDKNTQEVFAQVKQIYKTPPIKDFGGFNFSQILPDPSKPSKRSFIEDLLFNKVTLADAGFIKQYGDCLGDIAARDLICAQKFNGLTVLPPLLTDEMIAQYTSALLAGTITSGWTFGAGAALQIPFAMQMAYRFNGIGVTQNVLYENQKLIANQFNSAIGKIQDSLSSTASALGKLQDVVNQNAQALNTLVKQLSSNFGCISSVLNDILSRLDKVEAEVQIDCLITGRLQSLQTYVTQQLIRAAEIRASANLAATKMSECVLGQSKRVDFCGKGYHLMSFPQSAPHGVVFLHVTYVPAQEKNFTTAPAICHDGKAHFPREGVFVSNGTHWFVTQRNFYEPQIITTDNTFVSGNCDVVIGVVNNTVYDPLQPELDSGGSGYIPEAPRDGQAYVRKDGEWVLLSTFL

SEQ ID NO: 10487 - protein, 1177 aa, Artificial Sequence
  SARS-CoV-2/Netherlands/ZuidHolland_9/2020__EPI_ISL_414445 spike protein (1-1147)(A972C_R995C) Foldon construct
MFVFLVLLPLVSSQCVNLTTRTQLPPAYTNSFTRGVYYPDKVFRSSVLHSTQDLFLPFFSNVTWFHAIHVSGTNGTKRFDNPVLPFNDGVYFASTEKSNIIRGWIFGTTLDSKTQSLLIVNNATNVVIKVCEFQFCNDPFLGVYYHKNNKSWMESEFRVYSSANNCTFEYVSQPFLMDLEGKQGNFKNLREFVFKNIDGYFKIYSKHTPINLVRDLPQGFSALEPLVDLPIGINITRFQTLLALHRSYLTPGDSSSGWTAGAAAYYVGYLQPRTFLLKYNENGTITDAVDCALDPLSETKCTLKSFTVEKGIYQTSNFRVQPTESIVRFPNITNLCPFGEVFNATRFASVYAWNRKRISNCVADYSVLYNSASFSTFKCYGVSPTKLNDLCFTNVYADSFVIRGDEVRQIAPGQTGKIADYNYKLPDDFTGCVIAWNSNNLDSKVGGNYNYLYRLFRKSNLKPFERDISTEIYQAGSTPCNGVEGFNCYFPLQSYGFQPTNGVGYQPYRVVVLSFELLHAPATVCGPKKSTNLVKNKCVNFNFNGLTGTGVLTESNKKFLPFQQFGRDIADTTDAVRDPQTLEILDITPCSFGGVSVITPGTNTSNQVAVLYQGVNCTEVPVAIHADQLTPTWRVYSTGSNVFQTRAGCLIGAEHVNNSYECDIPIGAGICASYQTQTNSPRRARSVASQSIIAYTMSLGAENSVAYSNNSIAIPTNFTISVTTEILPVSMTKTSVDCTMYICGDSTECSNLLLQYGSFCTQLNRALTGIAVEQDKNTQEVFAQVKQIYKTPPIKDFGGFNFSQILPDPSKPSKRSFIEDLLFNKVTLADAGFIKQYGDCLGDIAARDLICVQKFNGLTVLPPLLTDEMIAQYTSALLAGTITSGWTFGAGAALQIPFAMQMAYRFNGIGVTQNVLYENQKLIANQFNSAIGKIQDSLSSTASALGKLQDVVNQNAQALNTLVKQLSSNFGCISSVLNDILSRLDKVEAEVQIDCLITGRLQSLQTYVTQQLIRAAEIRASANLAATKMSECVLGQSKRVDFCGKGYHLMSFPQSAPHGVVFLHVTYVPAQEKNFTTAPAICHDGKAHFPREGVFVSNGTHWFVTQRNFYEPQIITTDNTFVSGNCDVVIGIVNNTVYDPLQPELDSGGSGYIPEAPRDGQAYVRKDGEWVLLSTFL

SEQ ID NO: 10488 - protein, 1177 aa, Artificial Sequence
  SARS-CoV-2/Finland/FIN03032020A/2020__EPI_ISL_413602 spike protein (1-1147)(A972C_R995C) Foldon construct
MFVFLVLLPLVSSQCVNLTTRTQLPPAYTNSFTRGVYYPDKVFRSSVLHSTQDLFLPFFSNVTWFHAIHVSGTNGTKRFDNPVLPFNDGVYFASTEKSNIIRGWIFGTTLDSKTQSLLIVNNATNVVIKVCEFQFCNDPFLGVYYHKNNKSWMESEFRVYSSANNCTFEYVSQPFLMDLEGKQGNFKNLREFVFKNIDGYFKIYSKHTPINLVRDLPQGFSALEPLVDLPIGINITRFQTLLALHRSYLTPGDSSSGWTAGAAAYYVGYLQPRTFLLKYNENGTITDAVDCALDPLSETKCTLKSFTVEKGIYQTSNFRVQPTESIVRFPNITNLCPFGEVFNATRFASVYAWNRKRISNCVADYSVLYNSASFSTFKCYGVSPTKLNDLCFTNVYADSFVIRGDEVRQIAPGQTGKIADYNYKLPDDFTGCVISWNSNNLDSKVGGNYNYLYRLFRKSNLKPFERDISTEIYQAGSTPCNGVEGFNCYFPLQSYGFQPTNGVGYQPYRVVVLSFELLHAPATVCGPKKSTNLVKNKCVNFNFNGLTGTGVLTESNKKFLPFQQFGRDIADTTDAVRDPQTLEILDITPCSFGGVSVITPGTNTSNQVAVLYQGVNCTEVPVAIHADQLTPTWRVYSTGSNVFQTRAGCLIGAEHVNNSYECDIPIGAGICASYQTQTNSPRRARSVASQSIIAYTMSLGAENSVAYSNNSIAIPTNFTISVTTEILPVSMTKTSVDCTMYICGDSTECSNLLLQYGSFCTQLNRALTGIAVEQDKNTQEVFAQVKQIYKTPPIKDFGGFNFSQILPDPSKPSKRSFIEDLLFNKVTLADAGFIKQYGDCLGDIAARDLICAQKFNGLTVLPPLLTDEMIAQYTSALLAGTITSGWTFGAGAALQIPFAMQMAYRFNGIGVTQNVLYENQKLIANQFNSAIGKIQDSLSSTASALGKLQDVVNQNAQALNTLVKQLSSNFGCISSVLNDILSRLDKVEAEVQIDCLITGRLQSLQTYVTQQLIRAAEIRASANLAATKMSECVLGQSKRVDFCGKGYHLMSFPQSAPHGVVFLHVTYVPAQEKNFTTAPAICHDGKAHFPREGVFVSNGTHWFVTQRNFYEPQIITTDNTFVSGNCDVVIGIVNNTVYDPLQPELDSGGSGYIPEAPRDGQAYVRKDGEWVLLSTFL

SEQ ID NO: 10489 - protein, 1177 aa, Artificial Sequence
  SARS-CoV-2/France/GE1977/2020__EPI_ISL_414632 spike protein (1-1147)(A972C_R995C) Foldon construct
MFVFLVLLPLVSSQCVNLTTRTQLPPAYTNSFTRGVYYPDKVFRSSVLHSTQDLFLPFFSNVTWFHAIHVSGTNGTKRFDNPVLPFNDGVYFASTEKSNIIRGWIFGTTLDSKTQSLLIVNNATNVVIKVCEFQFCNDPFLGVYYHKNNKSWMESEFRVYSSANNCTFEYVSQPFLMDLEGKQGNFKNLREFVFKNIDGYFKIYSKHTPINLVRDLPQGFSALEPLVDLPIGINITRFQTLLALHRSYLTPGDSSSGWTAGAAAYYVGYLQPRTFLLKYNENGTITDAVDCALDPLSETKCTLKSFTVEKGIYQTSNFRVQPTESIVRFPNITNLCPFGEVFNATRFASVYAWNRKRISNCVADYSVLYNSASFSTFKCYGVSPTKLNDLCFTNVYADSFVIRGDEVRQIAPGQTGKIADYNYKLPDDFTGCVIAWNSNNLDSKVGGNYNYLYRLFRKSNLKPFERDISTEIYQAGSTPCNGVEGFNCYFPLQSYGFQPTNGVGYQPYRVVVLSFELLHAPATVCGPKKSTNLVKNKCVNFNFNGLTGTGVLTESNKKFLPFQQFGRDIADTTDAVRDPQTLEILDITPCSFGGVSVITPGTNTSNQVAVLYQGVNCTEVPVAIHADQLTPTWRVYSTGSNVFQTRAGCLIGAEHVNNSYECDIPIGAGICASYQTQTNSPRRARSVASQSIIAYTMSLGAENSVAYSNNSIAIPTNFTISVTTEILPVSMTKTSVDCTMYICGDSTECSNLLLQYGSFCTQLNRALTGIAVEQDKNTQEVFAQVKQIYKTPPIKDFGGFNFSQILPDPSKPSKRSFIEDLLFNKVTLADAGFIKQYGDCLGDIAARDLICAQKFNGLTVLPPLLTDEMIAQYTSALLAGTITSGWTFGAGAALQIPFAMQMAYRFNGIGVTQNVLYENQKLIANQFNSAIGKIQDSLFSTASALGKLQDVVNQNAQALNTLVKQLSSNFGCISSVLNDILSRLDKVEAEVQIDCLITGRLQSLQTYVTQQLIRAAEIRASANLAATKMSECVLGQSKRVDFCGKGYHLMSFPQSAPHGVVFLHVTYVPAQEKNFTTAPAICHDGKAHFPREGVFVSNGTHWFVTQRNFYEPQIITTDNTFVSGNCDVVIGIVNNTVYDPLQPELDSGGSGYIPEAPRDGQAYVRKDGEWVLLSTFL

SEQ ID NO: 10490 - protein, 1177 aa, Artificial Sequence
  SARS-CoV-2/Finland/FIN-313/2020__EPI_ISL_414641 spike protein (1-1147)(A972C_R995C) Foldon construct
MFVFLVLLPLVSSQCVNLTTRTQLPPAYTNSFTRGVYYPDKVFRSSVLHSTQDLFLPFFSNVTWFHAIHVSGTNGTKRFDNPVLPFNDGVYFASTEKSNIIRGWIFGTTLDSKTQSLLIVNNATNVVIKVCEFQFCNDPFLGVYYHKNNKSWMESEFRVYSSANNCTFEYVSQPFLMDLEGKQGNFKNLREFVFKNIDGYFKIYSKHTPINLVRDLPQGFSALEPLVDLPIGINITRFKTLLALHRSYLTPGDSSSGWTAGAAAYYVGYLQPRTFLLKYNENGTITDAVDCALDPLSETKCTLKSFTVEKGIYQTSNFRVQPTESIVRFPNITNLCPFGEVFNATRFASVYAWNRKRISNCVADYSVLYNSASFSTFKCYGVSPTKLNDLCFTNVYADSFVIRGDEVRQIAPGQTGKIADYNYKLPDDFTGCVIAWNSNNLDSKVGGNYNYLYRLFRKSNLKPFERDISTEIYQAGSTPCNGVEGFNCYFPLQSYGFQPTNGVGYQPYRVVVLSFELLHAPATVCGPKKSTNLVKNKCVNFNFNGLTGTGVLTESNKKFLPFQQFGRDIADTTDAVRDPQTLEILDITPCSFGGVSVITPGTNTSNQVAVLYQGVNCTEVPVAIHADQLTPTWRVYSTGSNVFQTRAGCLIGAEHVNNSYECDIPIGAGICASYQTQTNSPRRARSVASQSIIAYTMSLGAENSVAYSNNSIAIPTNFTISVTTEILPVSMTKTSVDCTMYICGDSTECSNLLLQYGSFCTQLNRALTGIAVEQDKNTQEVFAQVKQIYKTPPIKDFGGFNFSQILPDPSKPSKRSFIEDLLFNKVTLADAGFIKQYGDCLGDIAARDLICAQKFNGLTVLPPLLTDEMIAQYTSALLAGTITSGWTFGAGAALQIPFAMQMAYRFNGIGVTQNVLYENQKLIANQFNSAIGKIQDSLSSTASALGKLQDVVNQNAQALNTLVKQLSSNFGCISSVLNDILSRLDKVEAEVQIDCLITGRLQSLQTYVTQQLIRAAEIRASANLAATKMSECVLGQSKRVDFCGKGYHLMSFPQSAPHGVVFLHVTYVPAQEKNFTTAPAICHDGKAHFPREGVFVSNGTHWFVTQRNFYEPQIITTDNTFVSGNCDVVIGIVNNTVYDPLQPELDSGGSGYIPEAPRDGQAYVRKDGEWVLLSTFL

SEQ ID NO: 10491 - protein, 1177 aa, Artificial Sequence
  SARS-CoV-2/Netherlands/ZuidHolland_2/2020__EPI_ISL_414556 spike protein (1-1147)(A972C_R995C) Foldon construct
MFVFLVLLPLVSSQCVNLTTRTQLPPAYTNSFTRGVYYPDKVFRSSVLHSTQDLFLPFFSNVTWFHAIHVSGTNGTKRFDNPVLPFNDGVYFASTEKSNIIRGWIFGTTLDSKTQSLLIVNNATNVVIKVCEFQFCNDPFLGVYYHKNNKSWMESEFRVYSSANNCTFEYVSQPFLMDLEGKQGNFKNLREFVFKNIDGYFKIYSKHTPINLVRDLPQGFSALEPLVDLPIGINITRFQTLLALHRSYLTPGDSSSGWTAGAAAYYVGYLQPRTFLLKYNENGTITDAVDCALDPLSETKCTLKSFTVEKGIYQTSNFRVQPTESIVRFPNITNLCPFGEVFNATRFASVYAWNRKRISNCVADYSVLYNSASFSTFKCYGVSPTKLNDLCFTNVYADSFVIRGDEVRQIAPGQTGKIADYNYKLPDDFTGCVIAWNSNNLDSKVGGNYNYLYRLFRKSNLKPFERDISTEIYQAGSTPCNGVEGFNCYFPLQSYGFQPTNGVGYQPYRVVVLSFELLHAPATVCGPKKSTNLVKNKCVNFNFNGLTGTGVLTESNKKFLPFQQFGRDIADTTDAVRDPQTLEILDITPCSFGGVSVITPGTNTSNQVAVLYQGVNCTEVPVAIHADQLTPTWRVYSTGSNVFQTRAGCLIGAEHVNNSYECDIPIGAGICASYQTQTNSPRRARSVASQSIIAYTMSLGAENSVAYSNNSIAIPTNFTISVTTEILPVSMTKTSVDCTMYICGDSTECSNLLLQYGSFCTQLNRALTGIALEQDKNTQEVFAQVKQIYKTPPIKDFGGFNFSQILPDPSKPSKRSFIEDLLFNKVTLADAGFIKQYGDCLGDIAARDLICAQKFNGLTVLPPLLTDEMIAQYTSALLAGTITSGWTFGAGAALQIPFAMQMAYRFNGIGVTQNVLYENQKLIANQFNSAIGKIQDSLSSTASALGKLQDVVNQNAQALNTLVKQLSSNFGCISSVLNDILSRLDKVEAEVQIDCLITGRLQSLQTYVTQQLIRAAEIRASANLAATKMSECVLGQSKRVDFCGKGYHLMSFPQSAPHGVVFLHVTYVPAQEKNFTTAPAICHDGKAHFPREGVFVSNGTHWFVTQRNFYEPQIITTDNTFVSGNCDVVIGIVNNTVYDPLQPELDSGGSGYIPEAPRDGQAYVRKDGEWVLLSTFL

SEQ ID NO: 10492 - protein, 1177 aa, Artificial Sequence
  SARS-CoV-2/USA/WA-UW31/2020__EPI_ISL_414618 spike protein (1-1147)(A972C_R995C) Foldon construct
MFVFLVLLPLVSSQCVNLTTRTQLPPAYTNSFTRGVYYPDKVFRSSVLHSTQDLFLPFFSNVTWFHAIHVSGTNGTKRFDNPVLPFNDGVYFASTEKSNIIRGWIFGTTLDSKTQSLLIVNNATNVVIKVCEFQFCNDPFLGVYYHKNNKSWMESEFRVYSSANNCTFEYVSQPFLMDLEGKQGNFKNLREFVFKNIDGYFKIYSKHTPINLVRDLPQGFSALEPLVDLPIGINITRFQTLLALHRSYLTPGDSSSGWTAGAAAYYVGYLQPRTFLLKYNENGTITDAVDCALDPLSETKCTLKSFTVEKGIYQTSNFRVQPTESIVRFPNITNLCPFGEVFNATRFASVYAWNRKRISNCVADYSVLYNSASFSTFKCYGVSPTKLNDLCFTNVYADSFVIRGDEVRQIAPGQTGKIADYNYKLPDDFTGCVIAWNSNNLDSKVGGNYNYLYRLFRKSNLKPFERDISTEIYQAGSTPCNGAEGFNCYFPLQSYGFQPTNGVGYQPYRVVVLSFELLHAPATVCGPKKSTNLVKNKCVNFNFNGLTGTGVLTESNKKFLPFQQFGRDIADTTDAVRDPQTLEILDITPCSFGGVSVITPGTNTSNQVAVLYQDVNCTEVPVAIHADQLTPTWRVYSTGSNVFQTRAGCLIGAEHVNNSYECDIPIGAGICASYQTQTNSPRRARSVASQSIIAYTMSLGAENSVAYSNNSIAIPTNFTISVTTEILPVSMTKTSVDCTMYICGDSTECSNLLLQYGSFCTQLNRALTGIAVEQDKNTQEVFAQVKQIYKTPPIKDFGGFNFSQILPDPSKPSKRSFIEDLLFNKVTLADAGFIKQYGDCLGDIAARDLICAQKFNGLTVLPPLLTDEMIAQYTSALLAGTITSGWTFGAGAALQIPFAMQMAYRFNGIGVTQNVLYENQKLIANQFNSAIGKIQDSLSSTASALGKLQDVVNQNAQALNTLVKQLSSNFGCISSVLNDILSRLDKVEAEVQIDCLITGRLQSLQTYVTQQLIRAAEIRASANLAATKMSECVLGQSKRVDFCGKGYHLMSFPQSAPHGVVFLHVTYVPAQEKNFTTAPAICHDGKAHFPREGVFVSNGTHWFVTQRNFYEPQIITTDNTFVSGNCDVVIGIVNNTVYDPLQPELDSGGSGYIPEAPRDGQAYVRKDGEWVLLSTFL

SEQ ID NO: 10493 - protein, 1177 aa, Artificial Sequence
  SARS-CoV-2/South Korea/SNU01/2020__EPI_ISL_411929 spike protein (1-1147)(A972C_R995C) Foldon construct
MFVFLVLLPLVSSQCVNLTTRTQLPPAYTNSFTRGVYYPDKVFRSSVLHSTQDLFLPFFSNVTWFHAIHVSGTNGTKRFDNPVLPFNDGVYFASTEKSNIIRGWIFGTTLDSKTQSLLIVNNATNVVIKVCEFQFCNDPFLGVYYHKNNKSWMESEFRVYSSANNCTFEYVSQPFLMDLEGKQGNFKNLREFVFKNIDGYFKIYSKHTPINLVRDLPQGFWALEPLVDLPIGINITRFQTLLALHRSYLTPGDSSSGWTAGAAAYYVGYLQPRTFLLKYNENGTITDAVDCALDPLSETKCTLKSFTVEKGIYQTSNFRVQPTESIVRFPNITNLCPFGEVFNATRFASVYAWNRKRISNCVADYSVLYNSASFSTFKCYGVSPTKLNDLCFTNVYADSFVIRGDEVRQIAPGQTGKIADYNYKLPDDFTGCVIAWNSNNLDSKVGGNYNYLYRLFRKSNLKPFERDISTEIYQAGSTPCNGVEGFNCYFPLQSYGFQPTNGVGYQPYRVVVLSFELLHAPATVCGPKKSTNLVKNKCVNFNFNGLTGTGVLTESNKKFLPFQQFGRDIADTTDAVRDPQTLEILDITPCSFGGVSVITPGTNTSNQVAVLYQDVNCTEVPVAIHADQLTPTWRVYSTGSNVFQTRAGCLIGAEHVNNSYECDIPIGAGICASYQTQTNSPRRARSVASQSIIAYTMSLGAENSVAYSNNSIAIPTNFTISVTTEILPVSMTKTSVDCTMYICGDSTECSNLLLQYGSFCTQLNRALTGIAVEQDKNTQEVFAQVKQIYKTPPIKDFGGFNFSQILPDPSKPSKRSFIEDLLFNKVTLADAGFIKQYGDCLGDIAARDLICAQKFNGLTVLPPLLTDEMIAQYTSALLAGTITSGWTFGAGAALQIPFAMQMAYRFNGIGVTQNVLYENQKLIANQFNSAIGKIQDSLSSTASALGKLQDVVNQNAQALNTLVKQLSSNFGCISSVLNDILSRLDKVEAEVQIDCLITGRLQSLQTYVTQQLIRAAEIRASANLAATKMSECVLGQSKRVDFCGKGYHLMSFPQSAPHGVVFLHVTYVPAQEKNFTTAPAICHDGKAHFPREGVFVSNGTHWFVTQRNFYEPQIITTDNTFVSGNCDVVIGIVNNTVYDPLQPELDSGGSGYIPEAPRDGQAYVRKDGEWVLLSTFL

SEQ ID NO: 10494 - protein, 1177 aa, Artificial Sequence
  SARS-CoV-2/China/WF0004/2020__EPI_ISL_413694 spike protein (1-1147)(A972C_R995C) Foldon construct
MFVFLVLLPLVSSQCVNLTTRTQLPPAYTNSFTRGVYYPDKVFRSSVLHSTQDLFLPFFSNVTWFHAIHVSGTNGTKRFDNPVLPFNDGVYFASTEKSNIIRGWIFGTTLDSKTQSLLIVNNATNVVIKVCEFQFCNDPFLGVYYHKNNKSWTESEFRVYSSANNCTFEYVSQPFLMDLEGKQGNFKNLREFVFKNIDGYFKIYSKHTPINLVRDLPQGFSALEPLVDLPIGINITRFQTLLALHRSYLTPGDSSSGWTAGAAAYYVGYLQPRTFLLKYNENGTITDAVDCALDPLSETKCTLKSFTVEKGIYQTSNFRVQPTESIVRFPNITNLCPFGEVFNATRFASVYAWNRKRISNCVADYSVLYNSASFSTFKCYGVSPTKLNDLCFTNVYADSFVIRGDEVRQIAPGQTGKIADYNYKLPDDFTGCVIAWNSNNLDSKVGGNYNYLYRLFRKSNLKPFERDISTEIYQAGSTPCNGVEGFNCYFPLQSYGFQPTNGVGYQPYRVVVLSFELLHAPATVCGPKKSTNLVKNKCVNFNFNGLTGTGVLTESNKKFLPFQQFGRDIADTTDAVRDPQTLEILDITPCSFGGVSVITPGTNTSNQVAVLYQDVNCTEVPVAIHADQLTPTWRVYSTGSNVFQTRAGCLIGAEHVNNSYECDIPIGAGICASYQTQTNSPRRARSVASQSIIAYTMSLGAENSVAYSNNSIAIPTNFTISVTTEILPVSMTKTSVDCTMYICGDSTECSNLLLQYGSFCTQLNRALTGIAVEQDKNTQEVFAQVKQIYKTPPIKDFGGFNFSQILPDPSKPSKRSFIEDLLFNKVTLADAGFIKQYGDCLGDIAARDLICAQKFNGLTVLPPLLTDEMIAQYTSALLAGTITSGWTFGAGAALQIPFAMQMAYRFNGIGVTQNVLYENQKLIANQFNSAIGKIQDSLSSTASALGKLQDVVNQNAQALNTLVKQLSSNFGCISSVLNDILSRLDKVEAEVQIDCLITGRLQSLQTYVTQQLIRAAEIRASANLAATKMSECVLGQSKRFDFCGKGYHLMSFPQSAPHGVVFLHVTYVPAQEKNFTTAPAICHDGKAHFPREGVFVSNGTHWFVTQRNFYEPQIITTDNTFVSGNCDVVIGIVNNTVYDPLQPELDSGGSGYIPEAPRDGQAYVRKDGEWVLLSTFL

SEQ ID NO: 10495 - protein, 1177 aa, Artificial Sequence
  SARS-CoV-2/China/WF0028/2020__EPI_ISL_413791 spike protein (1-1147)(A972C_R995C) Foldon construct
MFVFLVLLPLVSSQCVNLTTRTQLPPAYTNSFTRGVYYPDKVFRSSVLHSTQDLFLPFFSNVTWFHAIHVSGTNGTKRFDNPVLPFNDGVYFASTEKSNIIRGWIFGTTLDSKTQSLLIVNNATNVVIKVCEFQFCNDPFLGVYYHKNNKSWMESEFRVYSSANNCTFEYVSQPFLMDLEGKQGNFKNLREFVFKNIDGYFKIYSKHTPINLVRDLPQGFSALEPLVDLPIGINITRFQTLLALHRSYLTPGDSSSGWTAGAAAYYVGYLQPRTFLLKYNENGTITDAVDCALDPLSETKCTLKSFTVEKGIYQTSNFRVQPTESIVRFPNITNLCPFGEVFNATRFASVYAWNRKRISNCVADYSVLYNSASFSTFKCYGVSPTKLNDLCFTNVYADSFVIRGDEVRQIAPGQTGKIADYNYKLPDDFTGCVIAWNSNNLDSKVGGNYNYLYRLFRKSNLKPFERDISTEIYQAGSTPCNGVEGFNCYFPLQSYGFQPTNGVGYQPYRVVVLSFELLHAPATVCGPKKSTNLVKNKCVNFNFNGLTGTGVLTESNKKFLPFQQFGRDIADTTDAVRDPQTLEILDITPCSFGGVSVITPGTNTSNQVAVLYQDVNCTEVPVAIHADQLTPTWRVYSTGSNVFQTRAGCLIGAEHVNNSYECDIPIGAGICASYQTQTNSPRRARSVASQSIIAYTMSLGAENSVAYSNNSIAIPTNFTISVTTEILPVSMTKTSVDCTMYICGDSTECSNLLLQYGSFCTQLNRALTGIAVEQDKNTQEVFAQVKQIYKTPPIKDFGGFNFSQILPDPSKPSKRSFIEDLLFNKVTLADAGFIKQYGDCLGDIAARDLICAQKFNGLTVLPPLLTDEMIAQYTSALLAGTITSGWTFGAGAALQIPFAMQMAYRFNGIGVTQNVLYENQKLIANQFNSAIGKIQDSLSSTASALGKLQDVVNQNAQALNTLVKQLSSNFGCISSVLNDILSRLDKVEAEVQIDCLITGRLQSLQTYVTQQLIRAAEIRASANLAATKMSECVLGQSKRVDFCGKGYHLMSFPQSAPHGVVFLHVTYVPAQEKNFTTAPAICHDGKAHFPREGVFVSNGTHWFVTQRNFYEPQIITTDNTFVSGNCDVVIGIVNNTVYDPLQPELESGGSGYIPEAPRDGQAYVRKDGEWVLLSTFL

SEQ ID NO: 10496 - protein, 1177 aa, Artificial Sequence
  SARS-CoV-2/2019-nCoV/USA-CruiseA-18/2020__MT159716.1 spike protein (1-1147)(A972C_R995C) Foldon construct
MFVFLVLLPLVSSQCVNLTTRTQLPPAYTNSFTRGVYYPDKVFRSSVLHSTQDLFLPFFSNVTWFHAIHVSGTNGTKRFDNPVLPFNDGVYFASTEKSNIIRGWIFGTTLDSKTQSLLIVNNATNVVIKVCEFQFCNDPFLGVYYHKNNKSWMESELRVYSSANNCTFEYVSQPFLMDLEGKQGNFKNLREFVFKNIDGYFKIYSKHTPINLVRDLPQGFSALEPLVDLPIGINITRFQTLLALHRSYLTPGDSSSGWTAGAAAYYVGYLQPRTFLLKYNENGTITDAVDCALDPLSETKCTLKSFTVEKGIYQTSNFRVQPTESIVRFPNITNLCPFGEVFNATRFASVYAWNRKRISNCVADYSVLYNSASFSTFKCYGVSPTKLNDLCFTNVYADSFVIRGDEVRQIAPGQTGKIADYNYKLPDDFTGCVIAWNSNNLDSKVGGNYNYLYRLFRKSNLKPFERDISTEIYQAGSTPCNGVEGFNCYFPLQSYGFQPTNGVGYQPYRVVVLSFELLHAPATVCGPKKSTNLVKNKCVNFNFNGLTGTGVLTESNKKFLPFQQFGRDIADTTDAVRDPQTLEILDITPCSFGGVSVITPGTNTSNQVAVLYQDVNCTEVPVAIHADQLTPTWRVYSTGSNVFQTRAGCLIGAEHVNNSYECDIPIGAGICASYQTQTNSPRRARSVASQSIIAYTMSLGAENSVAYSNNSIAIPTNFTISVTTEILPVSMTKTSVDCTMYICGDSTECSNLLLQYGSFCTQLNRALTGIAVEQDKNTQEVFAQVKQIYKTPPIKDFGGFNFSQILPDPSKPSKRSFIEDLLFNKVTLADAGFIKQYGDCLGDIAARDLICAQKFNGLTVLPPLLTDEMIAQYTSALLAGTITSGWTFGAGAALQIPFAMQMAYRFNGIGVTQNVLYENQKLIANQFNSAIGKIQDSLSSTASALGKLQDVVNQNAQALNTLVKQLSSNFGCISSVLNDILSRLDKVEAEVQIDCLITGRLQSLQTYVTQQLIRAAEIRASANLAATKMSECVLGQSKRVDFCGKGYHLMSFPQSAPHGVVFLHVTYVPAQEKNFTTAPAICHDGKAHFPREGVFVSNGTHWFVTQRNFYEPQIITTDNTFVSGNCDVVIGIVNNTVYDPLQPELDSGGSGYIPEAPRDGQAYVRKDGEWVLLSTFL

SEQ ID NO: 10497 - protein, 1177 aa, Artificial Sequence
  SARS-CoV-2/SARS-CoV-2/Yunnan-01/human/2020/CHN__MT049951.1 spike protein (1-1147)(A972C_R995C) Foldon construct
MFVFLVLLPLVSSQCVNLTTRTQLPPANTNSFTRGVYYPDKVFRSSVLHSTQDLFLPFFSNVTWFHAIHVSGTNGTKRFDNPVLPFNDGVYFASTEKSNIIRGWIFGTTLDSKTQSLLIVNNATNVVIKVCEFQFCNDPFLGVYYHKNNKSWMESEFRVYSSANNCTFEYVSQPFLMDLEGKQGNFKNLREFVFKNIDGYFKIYSKHTPINLVRDLPQGFSALEPLVDLPIGINITRFQTLLALHRSYLTPGDSSSGWTAGAAAYYVGYLQPRTFLLKYNENGTITDAVDCALDPLSETKCTLKSFTVEKGIYQTSNFRVQPTESIVRFPNITNLCPFGEVFNATRFASVYAWNRKRISNCVADYSVLYNSASFSTFKCYGVSPTKLNDLCFTNVYADSFVIRGDEVRQIAPGQTGKIADYNYKLPDDFTGCVIAWNSNNLDSKVGGNYNYLYRLFRKSNLKPFERDISTEIYQAGSTPCNGVEGFNCYFPLQSYGFQPTNGVGYQPYRVVVLSFELLHAPATVCGPKKSTNLVKNKCVNFNFNGLTGTGVLTESNKKFLPFQQFGRDIADTTDAVRDPQTLEILDITPCSFGGVSVITPGTNTSNQVAVLYQDVNCTEVPVAIHADQLTPTWRVYSTGSNVFQTRAGCLIGAEHVNNSYECDIPIGAGICASYQTQTNSPRRARSVASQSIIAYTMSLGAENSVAYSNNSIAIPTNFTISVTTEILPVSMTKTSVDCTMYICGDSTECSNLLLQYGSFCTQLNRALTGIAVEQDKNTQEVFAQVKQIYKTPPIKDFGGFNFSQILPDPSKPSKRSFIEDLLFNKVTLADAGFIKQYGDCLGDIAARDLICAQKFNGLTVLPPLLTDEMIAQYTSALLAGTITSGWTFGAGAALQIPFAMQMAYRFNGIGVTQNVLYENQKLIANQFNSAIGKIQDSLSSTASALGKLQDVVNQNAQALNTLVKQLSSNFGCISSVLNDILSRLDKVEAEVQIDCLITGRLQSLQTYVTQQLIRAAEIRASANLAATKMSECVLGQSKRVDFCGKGYHLMSFPQSAPHGVVFLHVTYVPAQEKNFTTAPAICHDGKAHFPREGVFVSNGTHWFVTQRNFYEPQIITTDNTFVSGNCDVVIGIVNNTVYDPLQPELDSGGSGYIPEAPRDGQAYVRKDGEWVLLSTFL

SEQ ID NO: 10498 - protein, 1177 aa, Artificial Sequence
  SARS-CoV-2/USA/WA-UW292/2020__EPI_ISL_418077 spike protein (1-1147)(A972C_R995C) Foldon construct
MFVFLVLLPLVSSQCVNLTTRTQLPPAYTNSFTRGVYYPDKVFRSSVLHSTQDLFLPFFSNVTWFHAIHVSGTNGTKRFDNPVLPFNDGVYFASTEKSNIIRGWIFGTTLDSKTQSLLIVNNATNVVIKVCEFQFCNDPFLGVYYHKNNKSWMESEFRVYSSANNCTFEYVSQPFLMDLEGKQGNFKNLREFVFKNIDGYFKIYSKHTPINLVRDLPQGFSALEPLVDLPIGINITRFQTLLALHRSYLTPGDSSSGWTAGAAAYYVGYLQPRTFLLKYNENGTITDAVDCALDPLSETKCTLKSFTVEKGIYQTSNFRVQPTESIVRFPNITNLCPFGEVFNATRFASVYAWNRKRISNCVADYSVLYNSASFSTFKCYGVSPTKLNDLCFTNVYADSFVIRGDEVRQIAPGQTGKIADYNYKLPDDFTGCVIAWNSNNLDSKVGGNYNYLYRLFRKSNLKPFERDISTEIYQASSTPCNGVEGFNCYFPLQSYGFQPTNGVGYQPYRVVVLSFELLHAPATVCGPKKSTNLVKNKCVNFNFNGLTGTGVLTESNKKFLPFQQFGRDIADTTDAVRDPQTLEILDITPCSFGGVSVITPGTNTSNQVAVLYQDVNCTEVPVAIHADQLTPTWRVYSTGSNVFQTRAGCLIGAEHVNNSYECDIPIGAGICASYQTQTNSPRRARSVASQSIIAYTMSLGAENSVAYSNNSIAIPTNFTISVTTEILPVSMTKTSVDCTMYICGDSTECSNLLLQYGSFCTQLNRALTGIAVEQDKNTQEVFAQVKQIYKTPPIKDFGGFNFSQILPDPSKPSKRSFIEDLLFNKVTLADAGFIKQYGDCLGDIAARDLICAQKFNGLTVLPPLLTDEMIAQYTSALLAGTITSGWTFGAGAALQIPFAMQMAYRFNGIGVTQNVLYENQKLIANQFNSAIGKIQDSLSSTASALGKLQDVVNQNAQALNTLVKQLSSNFGCISSVLNDILSRLDKVEAEVQIDCLITGRLQSLQTYVTQQLIRAAEIRASANLAATKMSECVLGQSKRVDFCGKGYHLMSFPQSAPHGVVFLHVTYVPAQEKNFTTAPAICHDGKAHFPREGVFVSNGTHWFVTQRNFYEPQIITTDNTFVSGNCDVVIGIVNNTVYDPLQPELDSGGSGYIPEAPRDGQAYVRKDGEWVLLSTFL

SEQ ID NO: 10499 - protein, 1177 aa, Artificial Sequence
  SARS-CoV-2/Iceland/192/2020__EPI_ISL_417819 spike protein (1-1147)(A972C_R995C) Foldon construct
MFVFFVLLPLVSSQCVNLTTRTQLPPAYTNSFTRGVYYPDKVFRSSVLHSTQDLFLPFFSNVTWFHAIHVSGTNGTKRFDNPVLPFNDGVYFASTEKSNIIRGWIFGTTLDSKTQSLLIVNNATNVVIKVCEFQFCNDPFLGVYYHKNNKSWMESEFRVYSSANNCTFEYVSQPFLMDLEGKQGNFKNLREFVFKNIDGYFKIYSKHTPINLVRDLPQGFSALEPLVDLPIGINITRFQTLLALHRSYLTPGDSSSGWTAGAAAYYVGYLQPRTFLLKYNENGTITDAVDCALDPLSETKCTLKSFTVEKGIYQTSNFRVQPTESIVRFPNITNLCPFGEVFNATRFASVYAWNRKRISNCVADYSVLYNSASFSTFKCYGVSPTKLNDLCFTNVYADSFVIRGDEVRQIAPGQTGKIADYNYKLPDDFTGCVIAWNSNNLDSKVGGNYNYLYRLFRKSNLKPFERDISTEIYQAGSTPCNGVEGFNCYFPLQSYGFQPTNGVGYQPYRVVVLSFELLHAPATVCGPKKSTNLVKNKCVNFNFNGLTGTGVLTESNKKFLPFQQFGRDIADTTDAVRDPQTLEILDITPCSFGGVSVITPGTNTSNQVAVLYQGVNCTEVPVAIHADQLTPTWRVYSTGSNVFQTRAGCLIGAEHVNNSYECDIPIGAGICASYQTQTNSPRRARSVASQSIIAYTMSLGAENSVAYSNNSIAIPTNFTISVTTEILPVSMTKTSVDCTMYICGDSTECSNLLLQYGSFCTQLNRALTGIAVEQDKNTQEVFAQVKQIYKTPPIKDFGGFNFSQILPDPSKPSKRSFIEDLLFNKVTLADAGFIKQYGDCLGDIAARDLICAQKFNGLTVLPPLLTDEMIAQYTSALLAGTITSGWTFGAGAALQIPFAMQMAYRFNGIGVTQNVLYENQKLIANQFNSAIGKIQDSLSSTASALGKLQDVVNQNAQALNTLVKQLSSNFGCISSVLNDILSRLDKVEAEVQIDCLITGRLQSLQTYVTQQLIRAAEIRASANLAATKMSECVLGQSKRVDFCGKGYHLMSFPQSAPHGVVFLHVTYVPAQEKNFTTAPAICHDGKAHFPREGVFVSNGTHWFVTQRNFYEPQIITTDNTFVSGNCDVVIGIVNNTVYDPLQPELDSGGSGYIPEAPRDGQAYVRKDGEWVLLSTFL

SEQ ID NO: 10500 - protein, 1177 aa, Artificial Sequence
  SARS-CoV-2/Belgium/ULG-6939/2020__EPI_ISL_417020 spike protein (1-1147)(A972C_R995C) Foldon construct
MFVFLVLLPLVSSQCVNLTTRTQLPPAYTNSFTRGVYYPDKVFRSSVLHSTQDLFLPFFSNVTWFHAIHVSGTNGTKRFDNPVLPFNDGVYFASTEKSNIIRGWIFGTTLDSKTQSLLIVNNATNVVIKVCEFQFCNDPFLGVYYHKNNKSWMESEFRVYSSANNCTFEYVSQPFLMDLEGKQGNFKNLREFVFKNIDGYFKIYSKHTPINLVRDLPQGFSALEPLVDLPIGINITRFQTLLALHRSYLTPGDSSSGWTAGAAAYYVGYLQPRTFLLKYNENGTITDAVDCALDPLSETKCTLKSFTVEKGIYQTSNFRVQPTESIVRFPNITNLCPFGEVFNATRFASVYAWNRKRISNCVADYSVLYNSASFSTFKCYGVSPTKLNDLCFTNVYADSFVIRGDEVRQIAPGQTGKIADYNYKLPDDFTGCVIAWNSNNLDSKVGGNYNYLYRLFRKSNLKPFERDISTEIYQAGSTPCNGVEGFNCYFPLQSYGFQPTNGVGYQPYRVVVLSFELLHAPATVCGPKKSTNLVKNKCVNFNFNGLTGTGVLTESNKKFLPFQQFGRDIADTTDAVRDPQTLEILDITPCSFGGVSVITPGTNTSNQVAVLYQGVNCTEVPVAIHADQLTPTWRVYSTGSNVFQTRAGCLIGAEHVNNSYECDIPIGAGICASYQTQTNSPRRARSVASQSIIAYTMSLGAENSVVYSNNSIAIPTNFTISVTTEILPVSMTKTSVDCTMYICGDSTECSNLLLQYGSFCTQLNRALTGIAVEQDKNTQEVFAQVKQIYKTPPIKDFGGFNFSQILPDPSKPSKRSFIEDLLFNKVTLADAGFIKQYGDCLGDIAARDLICAQKFNGLTVLPPLLTDEMIAQYTSALLAGTITSGWTFGAGAALQIPFAMQMAYRFNGIGVTQNVLYENQKLIANQFNSAIGKIQDSLSSTASALGKLQDVVNQNAQALNTLVKQLSSNFGCISSVLNDILSRLDKVEAEVQIDCLITGRLQSLQTYVTQQLIRAAEIRASANLAATKMSECVLGQSKRVDFCGKGYHLMSFPQSAPHGVVFLHVTYVPAQEKNFTTAPAICHDGKAHFPREGVFVSNGTHWFVTQRNFYEPQIITTDNTFVSGNCDVVIGIVNNTVYDPLQPELDSGGSGYIPEAPRDGQAYVRKDGEWVLLSTFL

SEQ ID NO: 10501 - protein, 1177 aa, Artificial Sequence
  SARS-CoV-2/France/HF2496/2020__EPI_ISL_418231 spike protein (1-1147)(A972C_R995C) Foldon construct
MFVFLVLLPLVSSQCVNLTTRTQLPPAYTNSFTRGVYYPDKVFRSSVLHSTQDLFLPFFSNVTWFHAIHVSGTNGTKRFDNPVLPFNDGVYFASTEKSNIIRGWIFGTTLDSKTQSLLIVNNATNVVIKVCEFQFCNDPFLGVYYHKNNKSWMESEFRVYSSANNCTFEYVSQPFLMDLEGKQGNFKNLREFVFKNIDGYFKIYSKHTPINLVRDLPQGFSALEPLVDLPIGINITRFQTLLALHRSYLTPGDSSSGWTAGAAAYYVGYLQPRTFLLKYNENGTITDAVDCALDPLSETKCTLKSFTVEKGIYQTSNFRVQPTESIVRFPNITNLCPFGEVFNATRFASVYAWNRKRISNCVADYSVLYNSASFSTFKCYGVSPTKLNDLCFTNVYADSFVIRGDEVRQIAPGQTGKIADYNYKLPDDFTGCVIAWNSNNLDSKVGGNYNYLYRLFRKSNLKPFERDISTEIYQAGSTPCNGVEGFNCYFPLQSYGFQPTNGVGYQPYRVVVLSFELLHAPATVCGPKKSTNLVKNKCVNFNFNGLTGTGVLTESNKKFLPFQQFGRDIADTTDAVRDPQTLEILDITPCSFGGVSVITPGTNTSNQVAVLYQGVNCTEVPVAIHADQLTPTWRVYSTGSNVFQTRAGCLIGAEHVNNSYECDIPIGAGICASYQTQTNSPRRARSVASQSIIAYTMSLGAENSVAYSNNSIAIPTNFTISVTTEILPVSMTKTSVDCTMYICGDSTECSNLLLQYGSFCTQLNRALTGIAVEQDKNTQEVFAQVKQIYKTPPIKDFGGFNFSQILPDPSKPSKRSFIEDLLFNKVTLADAGFIKQYGDCLGDIVARDLICAQKFNGLTVLPPLLTDEMIAQYTSALLAGTITSGWTFGAGAALQIPFAMQMAYRFNGIGVTQNVLYENQKLIANQFNSAIGKIQDSLSSTASALGKLQDVVNQNAQALNTLVKQLSSNFGCISSVLNDILSRLDKVEAEVQIDCLITGRLQSLQTYVTQQLIRAAEIRASANLAATKMSECVLGQSKRVDFCGKGYHLMSFPQSAPHGVVFLHVTYVPAQEKNFTTAPAICHDGKAHFPREGVFVSNGTHWFVTQRNFYEPQIITTDNTFVSGNCDVVIGIVNNTVYDPLQPELDSGGSGYIPEAPRDGQAYVRKDGEWVLLSTFL

SEQ ID NO: 10502 - protein, 1177 aa, Artificial Sequence
  SARS-CoV-2/USA/WA-UW291/2020__EPI_ISL_418076 spike protein (1-1147)(A972C_R995C) Foldon construct
MFVFLVLLPLVSSQCVNLTTRTQLPPAYTNSFTRGVYYPDKVFRSSVLHSTQDLFLPFFSNVTWFHAIHVSGTNGTKRFDNPVLPFNDGVYFASTEKSNIIRGWIFGTTLDSKTQSLLIVNNATNVVIKVCEFQFCNDPFLGVYYHKNNKSWMESEFRVYSSANNCTFEYVSQPFLMDLEGKQGNFKNLREFVFKNIDGYFKIYSKHTPINLVRDLPQGFSALEPLVDLPIGINITRFQTLLALHRSYLTPGDSSSGWTAGAAAYYVGYLQPRTFLLKYNENGTITDAVDCALDPLSETKCTLKSFTVEKGIYQTSNFRVQPTESIVRFPNITNLCPFGEVFNATRFASVYAWNRKRISNCVADYSVLYNSASFSTFKCYGVSPTKLNDLCFTNVYADSFVIRGDEVRQIAPGQTGKIADYNYKLPDDFTGCVIAWNSNNLDSKVGGNYNYLYRLFRKSNLKPFERDISTEIYQAGSTPCNGVEGFNCYFPLQSYGFQPTNGVGYQPYRVVVLSFELLHAPATVCGPKKSTNLVKNKCVNFNFNGLTGTGVLTESNKKFLPFQQFGRDIADTTDAVRDPQTLEILDITPCSFGGVSVITPGTNTSNQVAVLYQGVNCTEVPVAIHADQLTPTWRVYSTGSNVFQTRAGCLIGAEHVNNSYECDIPIGAGICASYQTQTNSPRRARSVASQSIIAYTMSLGAENSVAYSNNSIAIPTNFTISVTTEILPVSMTKTSVDCTMYICGDSTECSNLLLQYGSFCTQLNRALTGIAVEQDKNTQEVFAQVKQIYKTPPIKDFGGFNFSQILPDPSKPSKRSFIEDLLFNKVTLADAGFIKQYGDCLGDIAARDLICAQKFNGLTVLPPLLTDEMIAQYTSALLAGTITSGWTFGAGAALQIPFAMQMAYRFNGIGVTQNVLYENQKLIANQFNSAIGKIQYSLSSTASALGKLQDVVNQNAQALNTLVKQLSSNFGCISSVLNDILSRLDKVEAEVQIDCLITGRLQSLQTYVTQQLIRAAEIRASANLAATKMSECVLGQSKRVDFCGKGYHLMSFPQSAPHGVVFLHVTYVPAQEKNFTTAPAICHDGKAHFPREGVFVSNGTHWFVTQRNFYEPQIITTDNTFVSGNCDVVIGIVNNTVYDPLQPELDSGGSGYIPEAPRDGQAYVRKDGEWVLLSTFL

SEQ ID NO: 10503 - protein, 1177 aa, Artificial Sequence; identical to SEQ ID NO: 10466
  SARS-CoV-2/Portugal/PT0034/2020__EPI_ISL_418019 spike protein (1-1147)(A972C_R995C) Foldon construct

SEQ ID NO: 10504 - protein, 1177 aa, Artificial Sequence; identical to SEQ ID NO: 10458
  SARS-CoV-2/Iceland/202/2020__EPI_ISL_417750 spike protein (1-1147)(A972C_R995C) Foldon construct

SEQ ID NO: 10505 - protein, 1177 aa, Artificial Sequence
  SARS-CoV-2/USA/WA-UW261/2020__EPI_ISL_418046 spike protein (1-1147)(A972C_R995C) Foldon construct
MFVFLVLLPLVSSQCVNLTTRTQLPPAYTNSFTRGVYYPDKVFRSSVLHSTQDLFLPFFSNVTWFHAIHVSGTNGTKRFDNPVLPFNDGVYFASTEKSNIIRGWIFGTTLDSKTQSLLIVNNATNVVIKVCEFQFCNDPFLGVYYHKNNKSWMESEFRVYSSANNCTFEYVSQPFLMDLEGKQGNFKNLREFVFKNIDGYFKIYSKHTPINLVRDLPQGFSALEPLVDLPIGINITRFQTLLALHRSYLTPGDSSSGWTAGAAAYYVGYLQPRTFLLKYNENGTITDAVDCALDPLSETKCTLKSFTVEKGIYQTSNFRVQPTESIVRFPNITNLCPFGEVFNATRFTSVYAWNRKRISNCVADYSVLYNSASFSTFKCYGVSPTKLNDLCFTNVYADSFVIRGDEVRQIAPGQTGKIADYNYKLPDDFTGCVIAWNSNNLDSKVGGNYNYLYRLFRKSNLKPFERDISTEIYQAGSTPCNGVEGFNCYFPLQSYGFQPTNGVGYQPYRVVVLSFELLHAPATVCGPKKSTNLVKNKCVNFNFNGLTGTGVLTESNKKFLPFQQFGRDIADTTDAVRDPQTLEILDITPCSFGGVSVITPGTNTSNQVAVLYQDVNCTEVPVAIHADQLTPTWRVYSTGSNVFQTRAGCLIGAEHVNNSYECDIPIGAGICASYQTQTNSPRRARSVASQSIIAYTMSLGAENSVAYSNNSIAIPTNFTISVTTEILPVSMTKTSVDCTMYICGDSTECSNLLLQYGSFCTQLNRALTGIAVEQDKNTQEVFAQVKQIYKTPPIKDFGGFNFSQILPDPSKPSKRSFIEDLLFNKVTLADAGFIKQYGDCLGDIAARDLICAQKFNGLTVLPPLLTDEMIAQYTSALLAGTITSGWTFGAGAALQIPFAMQMAYRFNGIGVTQNVLYENQKLIANQFNSAIGKIQDSLSSTASALGKLQDVVNQNAQALNTLVKQLSSNFGCISSVLNDILSRLDKVEAEVQIDCLITGRLQSLQTYVTQQLIRAAEIRASANLAATKMSECVLGQSKRVDFCGKGYHLMSFPQSAPHGVVFLHVTYVPAQEKNFTTAPAICHDGKAHFPREGVFVSNGTHWFVTQRNFYEPQIITTDNTFVSGNCDVVIGIVNNTVYDPLQPELDSGGSGYIPEAPRDGQAYVRKDGEWVLLSTFL

SEQ ID NO: 10506 - protein, 1177 aa, Artificial Sequence
  SARS-CoV-2/Portugal/PT0035/2020__EPI_ISL_418020 spike protein (1-1147)(A972C_R995C) Foldon construct
MFVFLVLLPLVSSQCVNLTTRTQLPPAYTNSFTRGVYYPDKVFRSSVLHSTQDLFLPFFSNVTWFHAIHVSGTNGTKRFDNPVLPFNDGVYFASTEKSNIIRGWIFGTTLDSKTQSLLIVNNATNVVIKVCEFQFCNDPFLGVYYHKNNKSWMESEFRVYSSANNCTFEYVSQPFLMDLEGKQGNFKNLREFVFKNIDGYFKIYSKHTPINLVRDLPQGFSALEPLVDLPIGINITRFQTLLALHRSYLTPGDSSSGWTAGAAAYYVGYLQPRTFLLKYNENGTITDAVDCALDPLSETKCTLKSFTVEKGIYQTSNFRVQPTESIVRFPNITNLCPFGEVFNATRFASVYAWNRKRISNCVADYSVLYNSASFSTFKCYGVSPTKLNDLCFTNVYADSFVIRGDEVRQIAPGQTGKIADYNYKLPDDFTGCVIAWNSNNLDSKVGGNYNYLYRLFRKSNLKPFERDISTEIYQAGSTPCNGVEGFNCYFPLQSYGFQPTNGVGYQPYRVVVLSFELLHAPATVCGPKKSTNLVKNKCVNFNFNGLTGTGVLTESNKKFLPFQQFGRDIADTTDAVRDPQTLEILDITPCSFGGVSVITPGTNTSNQVAVLYQDVNCTEVPVAIHADQLTPTWRVYSTGSNVFQTRAGCLIGAEHVNNSYECDIPIGAGICASYQTQTNSPRRARSVASQSIIAYTMSLGAENSVAYSNNSIAIPTNFTISVTTEILPVSMTKTSVDCTMYICGDSTECSNLLLQYGSFCTQLNRALTGIAVEQDKNTQEVFAQVKQIYKTPPIKDFGGFNFSQILPDPSKPSKRSFIEDLLFNKVTLADAGFIKQYGDCLGDISARDLICAQKFNGLTVLPPLLTDEMIAQYTSALLAGTITSGWTFGAGAALQIPFAMQMAYRFNGIGVTQNVLYENQKLIANQFNSAIGKIQDSLSSTASALGKLQDVVNQNAQALNTLVKQLSSNFGCISSVLNDILSRLDKVEAEVQIDCLITGRLQSLQTYVTQQLIRAAEIRASANLAATKMSECVLGQSKRVDFCGKGYHLMSFPQSAPHGVVFLHVTYVPAQEKNFTTAPAICHDGKAHFPREGVFVSNGTHWFVTQRNFYEPQIITTDNTFVSGNCDVVIGIVNNTVYDPLQPELDSGGSGYIPEAPRDGQAYVRKDGEWVLLSTFL

SEQ ID NO: 10507 - protein, 1177 aa, Artificial Sequence
  SARS-CoV-2/USA/NY-NYUMC7/2020__EPI_ISL_418192 spike protein (1-1147)(A972C_R995C) Foldon construct
MFVFLVLLPLVSSQCVNLTTRTQLPPAYTNSFTRGVYYPDKVFRSSVLHSTQDLFLPFFSNVTWFHAIHVSGTNGTKRFDNPVLPFNDGVYFASTEKSNIIRGWIFGTTLDSKTQSLLIVNNATNVVIKVCEFQFCNDPFLGVYHHKNNKSWMESEFRVYSSANNCTFEYVSQPFLMDLEGKQGNFKNLREFVFKNIDGYFKIYSKHTPINLVRDLPQGFSALEPLVDLPIGINITRFQTLLALHRSYLTPGDSSSGWTAGAAAYYVGYLQPRTFLLKYNENGTITDAVDCALDPLSETKCTLKSFTVEKGIYQTSNFRVQPTESIVRFPNITNLCPFGEVFNATRFASVYAWNRKRISNCVADYSVLYNSASFSTFKCYGVSPTKLNDLCFTNVYADSFVIRGDEVRQIAPGQTGKIADYNYKLPDDFTGCVIAWNSNNLDSKVGGNYNYLYRLFRKSNLKPFERDISTEIYQAGSTPCNGVEGFNCYFPLQSYGFQPTNGVGYQPYRVVVLSFELLHAPATVCGPKKSTNLVKNKCVNFNFNGLTGTGVLTESNKKFLPFQQFGRDIADTTDAVRDPQTLEILDITPCSFGGVSVITPGTNTSNQVAVLYQGVNCTEVPVAIHADQLTPTWRVYSTGSNVFQTRAGCLIGAEHVNNSYECDIPIGAGICASYQTQTNSPRRARSVASQSIIAYTMSLGAENSVAYSNNSIAIPTNFTISVTTEILPVSMTKTSVDCTMYICGDSTECSNLLLQYGSFCTQLNRALTGIAVEQDKNTQEVFAQVKQIYKTPPIKDFGGFNFSQILPDPSKPSKRSFIEDLLFNKVTLADAGFIKQYGDCLGDIAARDLICAQKFNGLTVLPPLLTDEMIAQYTSALLAGTITSGWTFGAGAALQIPFAMQMAYRFNGIGVTQNVLYENQKLIANQFNSAIGKIQDSLSSTASALGKLQDVVNQNAQALNTLVKQLSSNFGCISSVLNDILSRLDKVEAEVQIDCLITGRLQSLQTYVTQQLIRAAEIRASANLAATKMSECVLGQSKRVDFCGKGYHLMSFPQSAPHGVVFLHVTYVPAQEKNFTTAPAICHDGKAHFPREGVFVSNGTHWFVTQRNFYEPQIITTDNTFVSGNCDVVIGIVNNTVYDPLQPELDSGGSGYIPEAPRDGQAYVRKDGEWVLLSTFL

SEQ ID NO: 10508 - protein, 1177 aa, Artificial Sequence
  SARS-CoV-2/Iceland/189/2020__EPI_ISL_417709 spike protein (1-1147)(A972C_R995C) Foldon construct
MFVFLVLLPLVSSQCVNLTTRTQLPPAYTNSFTRGVYYPDKVFRSSVLHSTQDLFLPFFSNVTWFHAIHVSGTNGTKRFDNPVLPFNDGVYFASTEKSNIIRGWIFGTTLDSKTQSLLIVNNATNVVIKVCEFQFCNDPFLGVYYHKNNKSWMESEFRVYSSANNCTFEYVSQPFLMDLEGKQGNFKNLREFVFKNIDGYFKIYSKHTPINLVRDLPQGFSALEPLVDLPIGINITRFQTLLALHRSYLTPGDSSSGWTAGAAAYYVGYLQPRTFLLKYNENGTITDAVDCALDPLSETKCTLKSFTVEKGIYQTSNFRVQPTESIVRFPNITNLCPFGEVFNATRFASVYAWNRKRISNCVADYSVLYNSASFSTFKCYGVSPTKLNDLCFTNVYADSFVIRGDEVRQIAPGQTGKIADYNYKLPDDFTGCVIAWNSNNLDSKVGGNYNYLYRLFRKSNLKPFERDISTEIYQAGSTPCNGVEGFNCYFPLQSYGFQPTNGVGYQPYRVVVLSFELLHAPATVCGPKKSTNLVKNKCVNFNFNGLTGTGVLTESNKKFLPFQQFGRDIADTTDAVRDPQTLEILDITPCSFGGVSVITPGTNTSNQVAVLYQGVNCTEVPVAIHADQLTPTWRVYSTGSNVFQTRAGCLIGAEHVNNSYECDIPIGAGICASYQTQTNSPRRARSVASQSIIAYTMSLGAENSVAYSNNSIAIPTNFTISVTTEILPVSMTKTSVDCTMYICGDSTECSNLLLQYGSFCTQLNRALTGIAVEQDKNTQEVFAQVKQIYKTPPIKDFGGFNFSQILPDPSKPSKRSFIEDLLFNKVTLADAGFTKQYGDCLGDIAARDLICAQKFNGLTVLPPLLTDEMIAQYTSALLAGTITSGWTFGAGAALQIPFAMQMAYRFNGIGVTQNVLYENQKLIANQFNSAIGKIQDSLSSTASALGKLQDVVNQNAQALNTLVKQLSSNFGCISSVLNDILSRLDKVEAEVQIDCLITGRLQSLQTYVTQQLIRAAEIRASANLAATKMSECVLGQSKRVDFCGKGYHLMSFPQSAPHGVVFLHVTYVPAQEKNFTTAPAICHDGKAHFPREGVFVSNGTHWFVTQRNFYEPQIITTDNTFVSGNCDVVIGIVNNTVYDPLQPELDSGGSGYIPEAPRDGQAYVRKDGEWVLLSTFL

SEQ ID NO: 10509 - protein, 1177 aa, Artificial Sequence
  SARS-CoV-2/Australia/NSW56/2020__EPI_ISL_417408 spike protein (1-1147)(A972C_R995C) Foldon construct
MFVFLVLLPLVSSQCVNLTTRTQLPPAYTNSFTRGVYYPDKVFRSSVLHSTQDLFLPFFSNVTWFHAIHVSGTNGTKRFDNPVLPFNDGVYFASTEKSNIIRGWIFGTTLDSKTQSLLIVNNATNVVIKVCEFQFCNDPFLGVYYHKNNKSWMESEFRVYSSANNCTFEYVSQPFLMDLEGKQGNFKNLREFVFKNIDGYFKIYSKHTPINLVRDLPQGFSALEPLVDLPIGINITRFQTLLALHRSYLTPGDSSSGWTAGAAAYYVGYLQPRTFLLKYNENGTITDAVDCALDPLSETKCTLKSFTVEKGIYQTSNFRVQPTESIVRFPNITNLCPFGEVFNATRFASVYAWNRKRISNCVADYSVLYNSASFSTFKCYGVSPTKLNDLCFTNVYADSFVIRGDEVRQIAPGQTGKIADYNYKLPDDFTGCVIAWNSNNLDSKVGGNYNYLYRLFRKSNLKPFERDISTEIYQAGSTPCNGVEGFNCYFPLQSYGFQPTNGVGYQPYRVVVLSFELLHAPATVCGPKKSTNLVKNKCVNFNFNGLTGTGVLTESNKKFLPFQQFGRDIADTTDAVRDPQTLEILDITPCSFGGVSVITPGTNTSNQVAVLYQDVNCTEVPVAIHADQLTPTWRVYSTGSNVFQTRAGCLIGAEHVNNSYECDIPIGAGICASYQTQTNSPRRARSVASQSIIAYTMSLGAENSVAYSNNSIAIPTNFTISVTTEILPVSMTKTSVDCTMYICGDSTECSNLLLQYGSFCTQLNRALTGIAVEQDKNTQEVFAQVKQIYKTPPIKDFGGFNFSQILPDSSKPSKRSFIEDLLFNKVTLADAGFIKQYGDCLGDIAARDLICAQKFNGLTVLPPLLTDEMIAQYTSALLAGTITSGWTFGAGAALQIPFAMQMAYRFNGIGVTQNVLYENQKLIANQFNSAIGKIQDSLSSTASALGKLQDVVNQNAQALNTLVKQLSSNFGCISSVLNDILSRLDKVEAEVQIDCLITGRLQSLQTYVTQQLIRAAEIRASANLAATKMSECVLGQSKRVDFCGKGYHLMSFPQSAPHGVVFLHVTYVPAQEKNFTTAPAICHDGKAHFPREGVFVSNGTHWFVTQRNFYEPQIITTDNTFVSGNCDVVIGIVNNTVYDPLQPELDSGGSGYIPEAPRDGQAYVRKDGEWVLLSTFL

SEQ ID NO: 10510 - protein, 1177 aa, Artificial Sequence
  SARS-CoV-2/Iceland/280/2020__EPI_ISL_417608 spike protein (1-1147)(A972C_R995C) Foldon construct
MFVFLVLLPLVSSQCVNLTTRTQLPPAYTNSFTRGVYYPDKVFRSSVLHSTQDLFLPFFSNVTWFHAIHVSGTNGTKRFDNPVLPFNDGVYFASTEKSNIIRGWIFGTTLDSKTQSLLIVNNATNVVIKVCEFQFCNDPFLGVYYHKNNKSWMESEFRVYSSANNCTFEYVSQPFLMDLEGKQGNFKNLREFVFKNIDGYFKIYSKHTPINLVRDLPQGFSALEPLVDLPIGINITRFQTLLALHRSYLTPGDSSSGWTAGAAAYYVGYLQPRTFLLKYNENGTITDAVDCALDPLSETKCTLKSFTVEKGIYQTSNFRVQPTESIVRFPNITNLCPFGEVFNATRFASVYAWNRKRISNCVADYSVLYNSASFSTFKCYGVSPTKLNDLCFTNVYADSFVIRGDEVRQIAPGQTGKIADYNYKLPDDFTGCVIAWNSNNLDSKVGGNYNYLYRLFRKSNLKPFERDISTEIYQAGSTPCNGVEGFNCYFPLQSYGFQPTNGVGYQPYRVVVLSFELLHAPATVCGPKKSTNLVKNKCVNFNFNGLTGTGVLTESNKKFLPFQQFGRDIADTTDAVRDPQTLEILDITPCSFGGVSVITPGTNTSNQVAVLYQGVNCTEVPVAIHADQLTPTWRVYSTGSNVFQTRAGCLIGAEHVNNSYECDIPIGAGICASYHTQTNSPRRARSVASQSIIAYTMSLGAENSVAYSNNSIAIPTNFTISVTTEILPVSMTKTSVDCTMYICGDSTECSNLLLQYGSFCTQLNRALTGIAVEQDKNTQEVFAQVKQIYKTPPIKDFGGFNFSQILPDPSKPSKRSFIEDLLFNKVTLADAGFIKQYGDCLGDIAARDLICAQKFNGLTVLPPLLTDEMIAQYTSALLAGTITSGWTFGAGAALQIPFAMQMAYRFNGIGVTQNVLYENQKLIANQFNSAIGKIQDSLSSTASALGKLQDVVNQNAQALNTLVKQLSSNFGCISSVLNDILSRLDKVEAEVQIDCLITGRLQSLQTYVTQQLIRAAEIRASANLAATKMSECVLGQSKRVDFCGKGYHLMSFPQSAPHGVVFLHVTYVPAQEKNFTTAPAICHDGKAHFPREGVFVSNGTHWFVTQRNFYEPQIITTDNTFVSGNCDVVIGIVNNTVYDPLQPELDSGGSGYIPEAPRDGQAYVRKDGEWVLLSTFL

SEQ ID NO: 10511 - protein, 1177 aa, Artificial Sequence; identical to SEQ ID NO: 10466
  SARS-CoV-2/Iceland/247/2020__EPI_ISL_417575 spike protein (1-1147)(A972C_R995C) Foldon construct

SEQ ID NO: 10512 - protein, 1177 aa, Artificial Sequence
  SARS-CoV-2/Iceland/238/2020__EPI_ISL_417566 spike protein (1-1147)(A972C_R995C) Foldon construct
MFVFLVLLPLVSSQCVNLTTRTQLPPAYTNSFTRGVYYPDKVFRSSVLHSTQDLFLPFFSNVTWFHAIHVSGTNGTKRFDNPVLPFNDGVYFASTEKSNIIRGWIFGTTLDSKTQSLLIVNNATNVVIKVCEFQFCNDPFLGVYYHKNNKSWMESEFRVYSSANNCTFEYVSQPFLMDLEGKQGNFKNLREFVFKNIDGYFKIYSKHTPINLVRDLPQGFSALEPLVDLPIGINITRFQTLLALHRSYLTPGDSSSGWTAGAAAYYVGYLQPRTFLLKYNENGTITDAVDCALDPLSETKCTLKSFTVEKGIYQTSNFRVQPTESIVRFPNITNLCPFGEVFNATRFASVYAWNRKRISNCVADYSVLYNSASFSTFKCYGVSPTKLNDLCFTNVYADSFVIRGDEVRQIAPGQTGKIADYNYKLPDDFTGCVIAWNSNNLDSKVGGNYNYLYRLFRKSNLKPFERDISTEIYQAGSTPCNGVEGFNCYFPLQSYGFQPTNGVGYQPYRVVVLSFELLHAPATVCGPKKSTNLVKNKCVNFNFNGLTGTGVLTESNKKFLPFQQFGRDIADTTDAVRDPQTLEILDITPCSFGGVSVITPGTNTSNQVAVLYQGVNCTEVPVAIHADQLTPTWRVYSTGSNVFQTRAGCLIGAEHVNNSYECDIPIGAGICASYQTQTNSPRRARSVASQSIIAYTMSLGAENSVAYSNNSIAIPTNFTISVTTEILPVSMTKTSVDCTMYICGDSTECSNLLLQYGSFCTQLNRALTGIAVEQDKNTQEVFAQVKQIYKTPPIKDFGGFNFSQILPDPSKPSKRSFIEDLLFNKVTLADVGFIKQYGDCLGDIAARDLICAQKFNGLTVLPPLLTDEMIAQYTSALLAGTITSGWTFGAGAALQIPFAMQMAYRFNGIGVTQNVLYENQKLIANQFNSAIGKIQDSLSSTASALGKLQDVVNQNAQALNTLVKQLSSNFGCISSVLNDILSRLDKVEAEVQIDCLITGRLQSLQTYVTQQLIRAAEIRASANLAATKMSECVLGQSKRVDFCGKGYHLMSFPQSAPHGVVFLHVTYVPAQEKNFTTAPAICHDGKAHFPREGVFVSNGTHWFVTQRNFYEPQIITTDNTFVSGNCDVVIGIVNNTVYDPLQPELDSGGSGYIPEAPRDGQAYVRKDGEWVLLSTFL

SEQ ID NO: 10513 - protein, 1177 aa, Artificial Sequence
  SARS-CoV-2/Greece/16/2020__EPI_ISL_418265 spike protein (1-1147)(A972C_R995C) Foldon construct
MFVFLVLLPLVSSQCVNLTTRTQLPPAYTNSFTRGVYYPDKVFRSSVLHSTQDLFLPFFSNVTWFHAIHVSGTNGTKRFDNPVLPFNDGVYFASTEKSNIIRGWIFGTTLDSKTQSLLIVNNATNVVIKVCEFQFCNDPFLGVYYHKNNKSWMESEFRVYSSANNCTFEYVSQPFLMDLEGKQGNFKNLREFVFKNVDGYFKIYSKHTPINLVRDLPQGFSALEPLVDLPIGINITRFQTLLALHRSYLTPGDSSSGWTAGAAAYYVGYLQPRTFLLKYNENGTITDAVDCALDPLSETKCTLKSFTVEKGIYQTSNFRVQPTESIVRFPNITNLCPFGEVFNATRFASVYAWNRKRISNCVADYSVLYNSASFSTFKCYGVSPTKLNDLCFTNVYADSFVIRGDEVRQIAPGQTGKIADYNYKLPDDFTGCVIAWNSNNLDSKVGGNYNYLYRLFRKSNLKPFERDISTEIYQAGSTPCNGVEGFNCYFPLQSYGFQPTNGVGYQPYRVVVLSFELLHAPATVCGPKKSTNLVKNKCVNFNFNGLTGTGVLTESNKKFLPFQQFGRDIADTTDAVRDPQTLEILDITPCSFGGVSVITPGTNTSNQVAVLYQDVNCTEVPVAIHADQLTPTWRVYSTGSNVFQTRAGCLIGAEHVNNSYECDIPIGAGICASYQTQTNSPRRARSVASQSIIAYTMSLGAENSVAYSNNSIAIPTNFTISVTTEILPVSMTKTSVDCTMYICGDSTECSNLLLQYGSFCTQLNRALTGIAVEQDKNTQEVFAQVKQIYKTPPIKDFGGFNFSQILPDPSKPSKRSFIEDLLFNKVTLADAGFIKQYGDCLGDIAARDLICAQKFNGLTVLPPLLTDEMIAQYTSALLAGTITSGWTFGAGAALQIPFAMQMAYRFNGIGVTQNVLYENQKLIANQFNSAIGKIQDSLSSTASALGKLQDVVNQNAQALNTLVKQLSSNFGCISSVLNDILSRLDKVEAEVQIDCLITGRLQSLQTYVTQQLIRAAEIRASANLAATKMSECVLGQSKRVDFCGKGYHLMSFPQSAPHGVVFLHVTYVPAQEKNFTTAPAICHDGKAHFPREGVFVSNGTHWFVTQRNFYEPQIITTDNTFVSGNCDVVIGIVNNTVYDPLQPELDSGGSGYIPEAPRDGQAYVRKDGEWVLLSTFL

SEQ ID NO: 10514 - protein, 1177 aa, Artificial Sequence
  SARS-CoV-2/Iceland/319/2020__EPI_ISL_417648 spike protein (1-1147)(A972C_R995C) Foldon construct
MFVFLVLLPLVSSQCVNLTTRTQLPPAYTNSFTRGVYYPDKVFRSSVLHSTQDLFLPFFSNVTWFHAIHVSGTNGTKRFDNPVLPFNDGVYFASTEKSNIIRGWIFGTTLDSKTQSLLIVNNATNVVIKVCEFQFCNDPFLGVYYHKNNKSWMESEFRVYSSANNCTFEYVSQPFLIDLEGKQGNFKNLREFVFKNIDGYFKIYSKHTPINLVRDLPQGFSALEPLVDLPIGINITRFQTLLALHRSYLTPGDSSSGWTAGAAAYYVGYLQPRTFLLKYNENGTITDAVDCALDPLSETKCTLKSFTVEKGIYQTSNFRVQPTESIVRFPNITNLCPFGEVFNATRFASVYAWNRKRISNCVADYSVLYNSASFSTFKCYGVSPTKLNDLCFTNVYADSFVIRGDEVRQIAPGQTGKIADYNYKLPDDFTGCVIAWNSNNLDSKVGGNYNYLYRLFRKSNLKPFERDISTEIYQAGSTPCNGVEGFNCYFPLQSYGFQPTNGVGYQPYRVVVLSFELLHAPATVCGPKKSTNLVKNKCVNFNFNGLTGTGVLTESNKKFLPFQQFGRDIADTTDAVRDPQTLEILDITPCSFGGVSVITPGTNTSNQVAVLYQGVNCTEVPVAIHADQLTPTWRVYSTGSNVFQTRAGCLIGAEHVNNSYECDIPIGAGICASYQTQTNSPRRARSVASQSIIAYTMSLGAENSVAYSNNSIAIPTNFTISVTTEILPVSMTKTSVDCTMYICGDSTECSNLLLQYGSFCTQLNRALTGIAVEQDKNTQEVFAQVKQIYKTPPIKDFGGFNFSQILPDPSKPSKRSFIEDLLFNKVTLADAGFIKQYGDCLGDIAARDLICAQKFNGLTVLPPLLTDEMIAQYTSALLAGTITSGWTFGAGAALQIPFAMQMAYRFNGIGVTQNVLYENQKLIANQFNSAIGKIQDSLSSTASALGKLQDVVNQNAQALNTLVKQLSSNFGCISSVLNDILSRLDKVEAEVQIDCLITGRLQSLQTYVTQQLIRAAEIRASANLAATKMSECVLGQSKRVDFCGKGYHLMSFPQSAPHGVVFLHVTYVPAQEKNFTTAPAICHDGKAHFPREGVFVSNGTHWFVTQRNFYEPQIITTDNTFVSGNCDVVIGIVNNTVYDPLQPELDSGGSGYIPEAPRDGQAYVRKDGEWVLLSTFL

SEQ ID NO: 10515 - protein, 1177 aa, Artificial Sequence
  SARS-CoV-2/Congo/94/2020__EPI_ISL_417947 spike protein (1-1147)(A972C_R995C) Foldon construct
MFVFLVLLPLVSSQCVNLTTRTQLPPAYTNSFTRGVYYPDKVFRSSVLHSTQDLFLPFFSNVTWFHAIHVSGTNGTKRFDNPVLPFNDGVYFASTEKSNIIRGWIFGTTLDSKTQSLLIVNNATNVVIKVCEFQFCNDPFLGVYYHKNNKSWMESEFRVYSSANNCTFEYVSQPFLMDLEGKQGNFKNLREFVFKNIDGYFKIYSKHTPINLVRDLPQGFSALEPLVDLPIGINITRFQTLLALHRSYLTPGDSSSGWTAGAAAYYVGYLQPRTFLLKYNENGTITDAVDCALDPLSETKCTLKSFTVEKGIYQTSNFRVQPTESIVRFPNITNLCPFGEVFNATRFASVYAWNRKRISNCVADYSVLYNSASFSTFKCYGVSPTKLNDLCFTNVYADSFVIRGDEVRQIAPGQTGKIADYNYKLPDDFTGCVIAWNSNNLDSKVGGNYNYLYRLFRKSNLKPFERDISTEIYQAGSTPCNGVEGFNCYFPLQSYGFQPTNGVGYQPYRVVVLSFELLHAPATVCGPKKSTNLVKNKCVNFNFNGLTGTGVLTESNKKFLPFQQFGRDIADTTDAVRDPQTLEILDITPCSFGGVSVITPGTNTSNQVAVLYQGVNCTEVPVAIHADQLTPTWRVYSTGSNVFQTRAGCLIGAEHVNNSYECDIPIGAGICASYQTQTNSPRRARSVASQSIIAYTMSLGAENSVAYSNNSIAIPTNFTISVTTEILPVSMTKTSVDCTMYICGDSTECSNLLLQYGSFCTQLNRALTGIAVEQDKNTQEVFAQVKQIYKTPPIKDFGGFNFSQILPDPSKPSKRSFIEDILFNKVTLADAGFIKQYGDCLGDIAARDLICAQKFNGLTVLPPLLTDEMIAQYTSALLAGTITSGWTFGAGAALQIPFAMQMAYRFNGIGVTQNVLYENQKLIANQFNSAIGKIQDSLSSTASALGKLQDVVNQNAQALNTLVKQLSSNFGCISSVLNDILSRLDKVEAEVQIDCLITGRLQSLQTYVTQQLIRAAEIRASANLAATKMSECVLGQSKRVDFCGKGYHLMSFPQSAPHGVVFLHVTYVPAQEKNFTTAPAICHDGKAHFPREGVFVSNGTHWFVTQRNFYEPQIITTDNTFVSGNCDVVIGIVNNTVYDPLQPELDSGGSGYIPEAPRDGQAYVRKDGEWVLLSTFL

SEQ ID NO: 10516 - protein, 1177 aa, Artificial Sequence
  SARS-CoV-2/Congo/158/2020__EPI_ISL_417950 spike protein (1-1147)(A972C_R995C) Foldon construct
MFVFLVLLPLVSSQCVNLTTRTQLPPAYTNSFTRGVYYPDKVFRSSVLHSTQDLFLPFFSNVTWFHAIHVSGTNGTKRFDNPVLPFNDGVYFASTEKSNIIRGWIFGTTLDSKTQSLLIVNNATNVVIKVCEFQFCNDPFLGVYYHKNNKSWMESEFRVYSSANNCTFEYVSQPFLMDLEGKQGNFKNLREFVFKNIDGYFKIYSKHTPINLVRDLPQGFSALEPLVDLPIGINITRFQTLLALHRSYLTPGDSSSGWTAGAAAYYVGYLQPRTFLLKYNENGTITDAVDCALDPLSETKCTLKSFTVEKGIYQTSNFRVQPTESIVRFPNITNLCPFGEVFNATRFASVYAWNRKRISNCVADYSVLYNSASFSTFKCYGVSPTKLNDLCFTNVYADSFVIRGDEVRQIAPGQTGKIADYNYKLPDDFTGCVIAWNSNNLDSKVGGNYNYLYRLFRKSNLKPFERDISTEIYQAGSTPCNGVEGFNCYFPLQSYGFQPTNGVGYQPYRVVVLSFELLHAPATVCGPKKSTNLVKNKCVNFNFNGLTGTGVLTESNKKFLPFQQFGRDIADTTDAVRDPQTLEILDITPCSFGGVSVITPGTNTSNQVAVLYQDVNCTEVPVAIHADQLTPTWRVYSTGSNVFQTRAGCLIGAEHVNNSYECDIPIGAGICASYQTQTNSPRRARSVASQSIIAYTMSLGAENSVAYSNNSIAIPTNFTISVTTEILPVSMTKTSVDCTMYICGDSTECSNLLLQYGSFCTQLNRALTGIAVEQDKNTQEVFAQVKQIYKTPPIKDFGGFNFSQILPDPSKPSKRSFIEDLLFNKVTLADAGFIKQYGDCLGDIAARDLICAQKFNGLTVLPPLLTDEMIAQYTSALLAGTITSGWTFGAGAALQIPFAMQMAYRFNGIGVTQNVLYENQKLIANQFNSAIGKIQDSLSSTASALGKLQDVVNQNAQALNTLVKQLSSNFGCISSVLNDILSRLDKVEAEVQIDCLITGRLQSLQTYVTQQLIRAAEIRASANLAATKMSECVLGQSKRVDFCGKGYHLMSFPQSAPHGVVFLHVTYVPAQEKNFTTAPAICHDGKAHFPREGVFVSNGTHWFVTQRNFYEPQIITTDNTFLSGNCDVVIGIVNNTVYDPLQPELDSGGSGYIPEAPRDGQAYVRKDGEWVLLSTFL

SEQ ID NO: 10517 - protein, 1177 aa, Artificial Sequence
  SARS-CoV-2/USA/UT-00034/2020__EPI_ISL_417977 spike protein (1-1147)(A972C_R995C) Foldon construct
MFVFLVLLPLVSSQCVNLTTRTQLPPAYTNSFTRGVYYPDKVFRSSVLHSTQDLFLPFFSNVTWFHAIHVSGTNGTKRFDNPVLPFNDGVYFASTEKSNIIRGWIFGTTLDSKTQSLLIVNNATNVVIKVCEFQFCNDPFLGVYYYKNNKSWMESEFRVYSSANNCTFEYVSQPFLMDLEGKQGNFKNLREFVFKNIDGYFKIYSKHTPINLVRDLPQGFSALEPLVDLPIGINITRFQTLLALHRSYLTPGDSSSGWTAGAAAYYVGYLQPRTFLLKYNENGTITDAVDCALDPLSETKCTLKSFTVEKGIYQTSNFRVQPTESIVRFPNITNLCPFGEVFNATRFASVYAWNRKRISNCVADYSVLYNSASFSTFKCYGVSPTKLNDLCFTNVYADSFVIRGDEVRQIAPGQTGKIADYNYKLPDDFTGCVIAWNSNNLDSKVGGNYNYLYRLFRKSNLKPFERDISTEIYQAGSTPCNGVEGFNCYFPLQSYGFQPTNGVGYQPYRVVVLSFELLHAPATVCGPKKSTNLVKNKCVNFNFNGLTGTGVLTESNKKFLPFQQFGRDIADTTDAVRDPQTLEILDITPCSFGGVSVITPGTNTSNQVAVLYQGVNCTEVPVAIHADQLTPTWRVYSTGSNVFQTRAGCLIGAEHVNNSYECDIPIGAGICASYQTQTNSPRRARSVASQSIIAYTMSLGAENSVAYSNNSIAIPTNFTISVTTEILPVSMTKTSVDCTMYICGDSTECSNLLLQYGSFCTQLNRALTGIAVEQDKNTQEVFAQVKQIYKTPPIKDFGGFNFSQILPDPSKPSKRSFIEDLLFNKVTLADAGFIKQYGDCLGDIAARDLICAQKFNGLTVLPPLLTDEMIAQYTSALLAGTITSGWTFGAGAALQIPFAMQMAYRFNGIGVTQNVLYENQKLIANQFNSAIGKIQDSLSSTASALGKLQDVVNQNAQALNTLVKQLSSNFGCISSVLNDILSRLDKVEAEVQIDCLITGRLQSLQTYVTQQLIRAAEIRASANLAATKMSECVLGQSKRVDFCGKGYHLMSFPQSAPHGVVFLHVTYVPAQEKNFTTAPAICHDGKAHFPREGVFVSNGTHWFVTQRNFYEPQIITTDNTFVSGNCDVVIGIVNNTVYDPLQPELDSGGSGYIPEAPRDGQAYVRKDGEWVLLSTFL

SEQ ID NO: 10518 - protein, 1177 aa, Artificial Sequence
  SARS-CoV-2/USA/UT-00033/2020__EPI_ISL_417976 spike protein (1-1147)(A972C_R995C) Foldon construct
MFVFLVLLPLVSSQCVNLTTRTQLPPAYTNSFTRGVYYPDKVFRSSVLHSTQDLFLPFFSNVTWFHAIHVSGTNGTKRFDNPVLPFNDGVYFASTEKSNIIRGWIFGTTLDSKTQSLLIVNNATNVVIKVCEFQFCNDPFLGVYYHKNNKSWMESEFRVYSSANNCTFEYVSQPFLMDLEGKQGNFKNLREFVFKNIDGYFKIYSKHTPINLVRDLPQGFSALEPLVDLPIGINITRFQTLLALHRSYLTPGDSSSGLTAGAAAYYVGYLQPRTFLLKYNENGTITDAVDCALDPLSETKCTLKSFTVEKGIYQTSNFRVQPTESIVRFPNITNLCPFGEVFNATRFASVYAWNRKRISNCVADYSVLYNSASFSTFKCYGVSPTKLNDLCFTNVYADSFVIRGDEVRQIAPGQTGKIADYNYKLPDDFTGCVIAWNSNNLDSKVGGNYNYLYRLFRKSNLKPFERDISTEIYQAGSTPCNGVEGFNCYFPLQSYGFQPTNGVGYQPYRVVVLSFELLHAPATVCGPKKSTNLVKNKCVNFNFNGLTGTGVLTESNKKFLPFQQFGRDIADTTDAVRDPQTLEILDITPCSFGGVSVITPGTNTSNQVAVLYQGVNCTEVPVAIHADQLTPTWRVYSTGSNVFQTRAGCLIGAEHVNNSYECDIPIGAGICASYQTQTNSPRRARSVASQSIIAYTMSLGAENSVAYSNNSIAIPTNFTISVTTEILPVSMTKTSVDCTMYICGDSTECSNLLLQYGSFCTQLNRALTGIAVEQDKNTQEVFAQVKQIYKTPPIKDFGGFNFSQILPDPSKPSKRSFIEDLLFNKVTLADAGFIKQYGDCLGDIAARDLICAQKFNGLTVLPPLLTDEMIAQYTSALLAGTITSGWTFGAGAALQIPFAMQMAYRFNGIGVTQNVLYENQKLIANQFNSAIGKIQDSLSSTASALGKLQDVVNQNAQALNTLVKQLSSNFGCISSVLNDILSRLDKVEAEVQIDCLITGRLQSLQTYVTQQLIRAAEIRASANLAATKMSECVLGQSKRVDFCGKGYHLMSFPQSAPHGVVFLHVTYVPAQEKNFTTAPAICHDGKAHFPREGVFVSNGTHWFVTQRNFYEPQIITTDNTFVSGNCDVVIGIVNNTVYDPLQPELDSGGSGYIPEAPRDGQAYVRKDGEWVLLSTFL

SEQ ID NO: 10519 - protein, 1177 aa, Artificial Sequence
  SARS-CoV-2/USA/WI-13/2020__EPI_ISL_417516 spike protein (1-1147)(A972C_R995C) Foldon construct
MFVFLVLLPLVSSQCVNLTTRTQLPPAYTNSFTRGVYYPDKVFRSSVLHSTQDLFLPFFSNVTWFHAIHVSGTNGTKRFDNPVLPFNDGVYFASTEKSNIIRGWIFGTTLDSKTQSLLIVNNATNVVIKVCEFQFCNDPFLGVYYHKNNKSWMESEFRVYSSANNCTFEYVSQPFLMDLEGKQGNFKNLREFVFKNIDGYFKIYSKHTPINLVRDLPQGFSALEPLVDLPIGINITRFQTLLALHRSYLTPGDSSSGWTAGAAAYYVGYLQPRTFLLKYNENGTITDAVDCALDPLSETKCTLKSFTVEKGIYQTSNFRVLPTESIVRFPNITNLCPFGEVFNATRFASVYAWNRKRISNCVADYSVLYNSASFSTFKCYGVSPTKLNDLCFTNVYADSFVIRGDEVRQIAPGQTGKIADYNYKLPDDFTGCVIAWNSNNLDSKVGGNYNYLYRLFRKSNLKPFERDISTEIYQAGSTPCNGVEGFNCYFPLQSYGFQPTNGVGYQPYRVVVLSFELLHAPATVCGPKKSTNLVKNKCVNFNFNGLTGTGVLTESNKKFLPFQQFGRDIADTTDAVRDPQTLEILDITPCSFGGVSVITPGTNTSNQVAVLYQGVNCTEVPVAIHADQLTPTWRVYSTGSNVFQTRAGCLIGAEHVNNSYECDIPIGAGICASYQTQTNSPRRARSVASQSIIAYTMSLGAENSVAYSNNSIAIPTNFTISVTTEILPVSMTKTSVDCTMYICGDSTECSNLLLQYGSFCTQLNRALTGIAVEQDKNTQEVFAQVKQIYKTPPIKDFGGFNFSQILPDPSKPSKRSFIEDLLFNKVTLADAGFIKQYGDCLGDIAARDLICAQKFNGLTVLPPLLTDEMIAQYTSALLAGTITSGWTFGAGAALQIPFAMQMAYRFNGIGVTQNVLYENQKLIANQFNSAIGKIQDSLSSTASALGKLQDVVNQNAQALNTLVKQLSSNFGCISSVLNDILSRLDKVEAEVQIDCLITGRLQSLQTYVTQQLIRAAEIRASANLAATKMSECVLGQSKRVDFCGKGYHLMSFPQSAPHGVVFLHVTYVPAQEKNFTTAPAICHDGKAHFPREGVFVSNGTHWFVTQRNFYEPQIITTDNTFVSGNCDVVIGIVNNTVYDPLQPELDSGGSGYIPEAPRDGQAYVRKDGEWVLLSTFL

SEQ ID NO: 10520 - protein, 1176 aa, Artificial Sequence
  SARS-CoV-2/India/1-27/2020__EPI_ISL_413522 spike protein (1-1146)(A971C_R994C) Foldon construct
MFVFLVLLPLVSSQCVNLTTRTQLPPAYTNSFTRGVYYPDKVFRSSVLHSTQDLFLPFFSNVTWFHAIHVSGTNGTKRFDNPVLPFNDGVYFASTEKSNIIRGWIFGTTLDSKTQSLLIVNNATNVVIKVCEFQFCNDPFLGVYHKNNKSWMESEFRVYSSANNCTFEYVSQPFLMDLEGKQGNFKNLREFVFKNIDGYFKIYSKHTPINLVRDLPQGFSALEPLVDLPIGINITRFQTLLALHRSYLTPGDSSSGWTAGAAAYYVGYLQPRTFLLKYNENGTITDAVDCALDPLSETKCTLKSFTVEKGIYQTSNFRVQPTESIVRFPNITNLCPFGEVFNATRFASVYAWNRKRISNCVADYSVLYNSASFSTFKCYGVSPTKLNDLCFTNVYADSFVIRGDEVIQIAPGQTGKIADYNYKLPDDFTGCVIAWNSNNLDSKVGGNYNYLYRLFRKSNLKPFERDISTEIYQAGSTPCNGVEGFNCYFPLQSYGFQPTNGVGYQPYRVVVLSFELLHAPATVCGPKKSTNLVKNKCVNFNFNGLTGTGVLTESNKKFLPFQQFGRDIADTTDAVRDPQTLEILDITPCSFGGVSVITPGTNTSNQVAVLYQDVNCTEVPVAIHADQLTPTWRVYSTGSNVFQTRAGCLIGAEHVNNSYECDIPIGAGICASYQTQTNSPRRARSVASQSIIAYTMSLGAENSVAYSNNSIAIPTNFTISVTTEILPVSMTKTSVDCTMYICGDSTECSNLLLQYGSFCTQLNRALTGIAVEQDKNTQEVFAQVKQIYKTPPIKDFGGFNFSQILPDPSKPSKRSFIEDLLFNKVTLADAGFIKQYGDCLGDIAARDLICAQKFNGLTVLPPLLTDEMIAQYTSALLAGTITSGWTFGAGAALQIPFAMQMAYRFNGIGVTQNVLYENQKLIANQFNSAIGKIQDSLSSTASALGKLQDVVNQNAQALNTLVKQLSSNFGCISSVLNDILSRLDKVEAEVQIDCLITGRLQSLQTYVTQQLIRAAEIRASANLAATKMSECVLGQSKRVDFCGKGYHLMSFPQSAPHGVVFLHVTYVPAQEKNFTTAPAICHDGKAHFPREGVFVSNGTHWFVTQRNFYEPQIITTDNTFVSGNCDVVIGIVNNTVYDPLQPELDSGGSGYIPEAPRDGQAYVRKDGEWVLLSTFL

SEQ ID NO: 10521 - protein, 1171 aa, Artificial Sequence
  SARS-CoV-2/pangolin/Guangxi/P4L/2017__EPI_ISL_410538 spike protein (1-1141)(A966C_R989C) Foldon construct
MFVFLFVLPLVSSQCVNLTTRTGIPPGYTNSSTRGVYYPDKVFRSSILHLTQDLFLPFFSNVTWFNTINYQGGFKKFDNPVLPFNDGVYFASTEKSNIIRGWIFGTTLDARTQSLLIVNNATNVVIKVCEFQFCTDPFLGVYYHNNNKTWVENEFRVYSSANNCTFEYISQPFLMDLEGKQGNFKNLREFVFKNVDGYFKIYSKHTPIDLVRDLPRGFAALEPLVDLPIGINITRFQTLLALHRSYLTPGNLESGWTTGAAAYYVGYLQQRTFLLSYNQNGTITDAVDCSLDPLSETKCTLKSLTVEKGIYQTSNFRVQPTISIVRFPNITNLCPFGEVFNASKFASVYAWNRKRISNCVADYSVLYNSTSFSTFKCYGVSPTKLNDLCFTNVYADSFVVKGDEVRQIAPGQTGVIADYNYKLPDDFTGCVIAWNSVKQDALTGGNYGYLYRLFRKSKLKPFERDISTEIYQAGSTPCNGQVGLNCYYPLERYGFHPTTGVNYQPFRVVVLSFELLNGPATVCGPKLSTTLVKDKCVNFNFNGLTGTGVLTTSKKQFLPFQQFGRDISDTTDAVRDPQTLEILDITPCSFGGVSVITPGTNTSNQVAVLYQDVNCTEVPMAIHAEQLTPAWRVYSAGANVFQTRAGCLVGAEHVNNSYECDIPVGAGICASYHSMSSLRSVNQRSIIAYTMSLGAENSVAYSNNSIAIPTNFTISVTTEILPVSMTKTSVDCTMYICGDSIECSNLLLQYGSFCTQLNRALTGIAVEQDKNTQEVFAQVKQIYKTPPIKDFGGFNFSQILPDPSKPSKRSFIEDLLFNKVTLADAGFIKQYGDCLGDIAARDLICAQKFNGLTVLPPLLTDEMIAQYTSALLAGTITSGWTFGAGAALQIPFAMQMAYRFNGIGVTQNVLYENQKLIANQFNSAIGKIQDSLSSTASALGKLQDVVNQNAQALNTLVKQLSSNFGCISSVLNDILSRLDKVEAEVQIDCLITGRLQSLQTYVTQQLIRAAEIRASANLAATKMSECVLGQSKRVDFCGKGYHLMSFPQSAPHGVVFLHVTYVPAQEKNFTTAPAICHEGKAHFPREGVFVSNGTHWFITQRNFYEPQIITTDNTFVSGSCDVVIGIVNNTVYDPLQPELDSGGSGYIPEAPRDGQAYVRKDGEWVLLSTFL

SEQ ID NO: 10522 - protein, 1171 aa, Artificial Sequence
  SARS-CoV-2/pangolin/Guangxi/P5L/2017__EPI_ISL_410540 spike protein (1-1141)(A966C_R989C) Foldon construct
MFVFLFVLPLVSSQCVNLTTRTGIPPGYTNSSTRGVYYPDKVFRSSILHLTQDLFLPFFSNVTWFNTINYQGGFKKFDNPVLPFNDGVYFASTEKSNIIRGWIFGTTLDARTQSLLIVNNATNVVIKVCEFQFCTDPFLGVYYHNNNKTWVENEFRVYSSANNCTFEYISQPFLMDLEGKQGNFKNLREFVFKNVDGYFKIYSKHTPIDLVRDLPRGFAALEPLVDLPIGINITRFQTLLALHRSYLTPGKLESGWTTGAAAYYVGYLQQRTFLLSYNQNGTITDAVDCSLDPLSETKCTLKSLTVEKGIYQTSNFRVQPTISIVRFPNITNLCPFGEVFNASKFASVYAWNRKRISNCVADYSVLYNSTSFSTFKCYGVSPTKLNDLCFTNVYADSFVVKGDEVRQIAPGQTGVIADYNYKLPDDFTGCVIAWNSVKQDALTGGNYGYLYRLFRKSKLKPFERDISTEIYQAGSTPCNGQVGLNCYYPLERYGFHPTTGVNYQPFRVVVLSFELLNGPATVCGPKLSTTLVKDKCVNFNFNGLTGTGVLTTSKKQFLPFQQFGRDISDTTDAVRDPQTLEILDITPCSFGGVSVITPGTNTSNQVAVLYQDVNCTEVPMAIHAEQLTPAWRVYSAGANVFQTRAGCLVGAEHVNNSYECDIPVGAGICASYHSMSSFRSVNQRSIIAYTMSLGAENSVAYSNNSIAIPTNFTISVTTEILPVSMTKTSVDCTMYICGDSIECSNLLLQYGSFCTQLNRALTGIAVEQDKNTQEVFAQVKQIYKTPPIKDFGGFNFSQILPDPSKPSKRSFIEDLLFNKVTLADAGFIKQYGDCLGDIAARDLICAQKFNGLTVLPPLLTDEMIAQYTSALLAGTITSGWTFGAGAALQIPFAMQMAYRFNGIGVTQNVLYENQKLIANQFNSAIGKIQDSLSSTASALGKLQDVVNQNAQALNTLVKQLSSNFGCISSVLNDILSRLDKVEAEVQIDCLITGRLQSLQTYVTQQLIRAAEIRASANLAATKMSECVLGQSKRVDFCGKGYHLMSFPQSAPHGVVFLHVTYVPAQEKNFTTAPAICHEGKAHFPREGVFVSNGTHWFITQRNFYEPQIITTDNTFVSGSCDVVIGIVNNTVYDPLQPELDSGGSGYIPEAPRDGQAYVRKDGEWVLLSTFL

SEQ ID NO: 10523 - protein, 1171 aa, Artificial Sequence
  SARS-CoV-2/pangolin/Guangxi/P5E/2017__EPI_ISL_410541 spike protein (1-1141)(A966C_R989C) Foldon construct
MFVFLFVLPLVSSQCVNLTTRTGIPPGYTNSSTRGVYYPDKVFRSSILHLTQDLFLPFFSNVTWFNTITYQGGSKKFDNPVLPFNDGVYFASTEKSNIIRGWIFGTTLDARTQSLLIVNNATNVVIKVCEFQFCTDPFLGVYYHNNNKTWVENEFRVYSSANNCTFEYISQPFLMDLEGKQGNFKNLREFVFKNVDGYFKIYSKHTPIDLVRDLPRGFAALEPLVDLPIGINITRFQTLLALHRSYLTPGKLESGWTTGAAAYYVGYLQQRTFLLSYNQNGTITDAVDCSLDPLSETKCTLKSLTVEKGIYQTSNFRVQPTISIVRFPNITNLCPFGEVFNASKFASVYAWNRKRISNCVADYSVLYNSTSFSTFKCYGVSPTKLNDLCFTNVYADSFVVKGDEVRQIAPGQTGVIADYNYKLPDDFTGCVIAWNSVKQDALTGDNYGYLYRLFRKSKLKPFERDISTEIYQAGSTPCNGQVGLNCYYPLERYGFHPTTGVNYQPFRVVVLSFELLNGPATVCGPKLSTTLVKDKCVNFNFNGLTGTGVLTTSKKQFLPFQQFGRDISDTTDAVRDPQTLEILDITPCSFGGVSVITPGTNTSNQVAVLYQDVNCTEVPMAIHAEQLTPAWRVYSAGANVFQTRAGCLVGAEHVNNSYECDIPVGAGICASYHSMSSFRSVNQRSIIAYTMSLGAENSVAYSNNSIAIPTNFTISVTTEILPVSMTKTSVDCTMYICGDSIECSNLLLQYGSFCTQLNRALTGIAVEQDKNTQEVFAQVKQIYKTPPIKDFGGFNFSQILPDPSKPSKRSFIEDLLFNKVTLADAGFIKQYGDCLGDIAARDLICAQKFNGLTVLPPLLTDEMIAQYTSALLAGTITSGWTFGAGAALQIPFAMQMAYRFNGIGVTQNVLYENQKLIANQFNSAIGKIQDSLSSTASALGKLQDVVNQNAQALNTLVKQLSSNFGCISSVLNDILSRLDKVEAEVQIDCLITGRLQSLQTYVTQQLIRAAEIRASANLAATKMSECVLGQSKRVDFCGKGYHLMSFPQSAPHGVVFLHVTYVPAQEKNFTTAPAICHEGKAHFPREGVFVSNGTHWFITQRNFYEPQIITTDNTFVSGSCDVVIGIVNNTVYDPLQPELDSGGSGYIPEAPRDGQAYVRKDGEWVLLSTFL

SEQ ID NO: 10524 - protein, 1169 aa, Artificial Sequence
  SARS-CoV-2/pangolin/Guangxi/P1E/2017__EPI_ISL_410539 spike protein (1-1139)(A964C_R987C) Foldon construct
MFVFLFVLPLVSSQCVNLTTRTGIQPGYTNSSTRGVYYPDKVFRSSILHLTQDLFLPFFSNVTWFNTINYQGGFKKFDNPVLPFNDGVYFASTEKSNIIRGWIFGTTLDARTQSLLIVNNATNVVIKVCEFQFCTDPFLGVYYHNNNKTWVENEFRVYSSANNCTFEYISQPFLMDLEGKQGNFKNLREFVFKNVDGYFKIYSKHTPIDLVRDLPRGFAALEPLVDLPIGINITRFQTLLALHRSYLTPGKLESGWTTGAAAYYVGYLQQRTFLLSYNQNGTITDAVDCSLDPLSETKCTLKSLTVEKGIYQTSNFRVQPTISIVRFPNITNLCPFGEVFNASKFASVYAWNRKRISNCVADYSVLYNSTSFSTFKCYGVSPTKLNDLCFTNVYADSFVVKGDEVRQIAPGQTGVIADYNYKLPDDFTGCVIAWNSVKQDALTGGNYLYRLFRKSKLKPFERDISTEIYQAGSTPCNGQVGLNCYYPLERYGFHPTTGVNYQPFRVVVLSFELLNGPATVCGPKLSTTLVKDKCVNFNFNGLTGTGVLTTSKKQFLPFQQFGRDISDTTDAVRDPQTLEILDITPCSFGGVSVITPGTNTSNQVAVLYQDVNCTEVPMAIHAEQLTPAWRVYSAGANVFQTRAGCLVGAEHVNNSYECDIPVGAGICASYHSMSSLRSVNQRSIIAYTMSLGAENSVAYSNNSIAIPTNFTISVTTEILPVSMTKTSVDCTMYICGDSIECSNLLLQYGSFCTQLNRALTGIAVEQDKNTQEVFAQVKQIYKTPPIKDFGGFNFSQILPDPSKPSKRSFIEDLLFNKVTLADAGFIKQYGDCLGDIAARDLICAQKFNGLTVLPPLLTDEMIAQYTSALLAGTITSGWTFGAGAALQIPFAMQMAYRFNGIGVTQNVLYENQKLIANQFNSAIGKIQDSLSSTASALGKLQDVVNQNAQALNTLVKQLSSNFGCISSVLNDILSRLDKVEAEVQIDCLITGRLQSLQTYVTQQLIRAAEIRASANLAATKMSECVLGQSKRVDFCGKGYHLMSFPQSAPHGVVFLHVTYVPAQEKNFTTAPAICHEGKAHFPREGVFVSNGTHWFITQRNFYEPQIITTDNTFVSGSCDVVIGIVNNTVYDPLQPELDSGGSGYIPEAPRDGQAYVRKDGEWVLLSTFL

SEQ ID NO: 10525 - protein, 1177 aa, Artificial Sequence
  SARS-CoV-2/Wuhan/WIV05/2019__EPI_ISL_402128 spike protein (1-1147)(A890C_V1040C) Foldon construct
MFVFLVLLPLVSSQCVNLTTRTQLPPAYTNSFTRGVYYPDKVFRSSVLHSTQDLFLPFFSNVTWFHAIHVSGTNGTKRFDNPVLPFNDGVYFASTEKSNIIRGWIFGTTLDSKTQSLLIVNNATNVVIKVCEFQFCNDPFLGVYYHKNNKSWMESEFRVYSSANNCTFEYVSQPFLMDLEGKQGNFKNLREFVFKNIDGYFKIYSKHTPINLVRDLPQGFSALEPLVDLPIGINITRFQTLLALHRSYLTPGDSSSGWTAGAAAYYVGYLQPRTFLLKYNENGTITDAVDCALDPLSETKCTLKSFTVEKGIYQTSNFRVQPTESIVRFPNITNLCPFGEVFNATRFASVYAWNRKRISNCVADYSVLYNSASFSTFKCYGVSPTKLNDLCFTNVYADSFVIRGDEVRQIAPGQTGKIADYNYKLPDDFTGCVIAWNSNNLDSKVGGNYNYLYRLFRKSNLKPFERDISTEIYQAGSTPCNGVEGFNCYFPLQSYGFQPTNGVGYQPYRVVVLSFELLHAPATVCGPKKSTNLVKNKCVNFNFNGLTGTGVLTESNKKFLPFQQFGRDIADTTDAVRDPQTLEILDITPCSFGGVSVITPGTNTSNQVAVLYQDVNCTEVPVAIHADQLTPTWRVYSTGSNVFQTRAGCLIGAEHVNNSYECDIPIGAGICASYQTQTNSPRRARSVASQSIIAYTMSLGAENSVAYSNNSIAIPTNFTISVTTEILPVSMTKTSVDCTMYICGDSTECSNLLLQYGSFCTQLNRALTGIAVEQDKNTQEVFAQVKQIYKTPPIKDFGGFNFSQILPDPSKPSKRSFIEDLLFNKVTLADAGFIKQYGDCLGDIAARDLICAQKFNGLTVLPPLLTDEMIAQYTSALLAGTITSGWTFGCGAALQIPFAMQMAYRFNGIGVTQNVLYENQKLIANQFNSAIGKIQDSLSSTASALGKLQDVVNQNAQALNTLVKQLSSNFGAISSVLNDILSRLDKVEAEVQIDRLITGRLQSLQTYVTQQLIRAAEIRASANLAATKMSECVLGQSKRCDFCGKGYHLMSFPQSAPHGVVFLHVTYVPAQEKNFTTAPAICHDGKAHFPREGVFVSNGTHWFVTQRNFYEPQIITTDNTFVSGNCDVVIGIVNNTVYDPLQPELDSGGSGYIPEAPRDGQAYVRKDGEWVLLSTFL

SEQ ID NO: 10526 - protein, 1173 aa, Artificial Sequence; identical to SEQ ID NO: 10258
  SARS-CoV-2/bat/Yunnan/RaTG13/2013__EPI_ISL_402131 spike protein (1-1143)(A886C_V1036C) Foldon construct

SEQ ID NO: 10527 - protein, 1177 aa, Artificial Sequence; identical to SEQ ID NO: 10259
  SARS-CoV-2/Wuhan/HBCDC-HB-01/2019__EPI_ISL_402132 spike protein (1-1147)(A890C_V1040C) Foldon construct

SEQ ID NO: 10528 - protein, 1177 aa, Artificial Sequence; identical to SEQ ID NO: 10260
  SARS-CoV-2/Guangdong/20SF028/2020__EPI_ISL_403936 spike protein (1-1147)(A890C_V1040C) Foldon construct

SEQ ID NO: 10529 - protein, 1177 aa, Artificial Sequence; identical to SEQ ID NO: 10261
  SARS-CoV-2/Shenzhen/SZTH-001/2020__EPI_ISL_406592 spike protein (1-1147)(A890C_V1040C) Foldon construct

SEQ ID NO: 10530 - protein, 1177 aa, Artificial Sequence; identical to SEQ ID NO: 10262
  SARS-CoV-2/Shenzhen/SZTH-004/2020__EPI_ISL_406595 spike protein (1-1147)(A890C_V1040C) Foldon construct

SEQ ID NO: 10531 - protein, 1177 aa, Artificial Sequence; identical to SEQ ID NO: 10263
  SARS-CoV-2/France/IDF0372/2020__EPI_ISL_406596 spike protein (1-1147)(A890C_V1040C) Foldon construct

SEQ ID NO: 10532 - protein, 1177 aa, Artificial Sequence; identical to SEQ ID NO: 10264
  SARS-CoV-2/Australia/VIC01/2020__EPI_ISL_406844 spike protein (1-1147)(A890C_V1040C) Foldon construct

SEQ ID NO: 10533 - protein, 1177 aa, Artificial Sequence; identical to SEQ ID NO: 10265
  SARS-CoV-2/Germany/BavPat1/2020__EPI_ISL_406862 spike protein (1-1147)(A890C_V1040C) Foldon construct

SEQ ID NO: 10534 - protein, 1177 aa, Artificial Sequence; identical to SEQ ID NO: 10266
  SARS-CoV-2/Wuhan/HBCDC-HB-02/2020__EPI_ISL_412978 spike protein (1-1147)(A890C_V1040C) Foldon construct

SEQ ID NO: 10535 - protein, 1177 aa, Artificial Sequence; identical to SEQ ID NO: 10267
  SARS-CoV-2/Australia/QLD02/2020__EPI_ISL_407896 spike protein (1-1147)(A890C_V1040C) Foldon construct

SEQ ID NO: 10536 - protein, 1177 aa, Artificial Sequence; identical to SEQ ID NO: 10268
  SARS-CoV-2/India/1-31/2020__EPI_ISL_413523 spike protein (1-1147)(A890C_V1040C) Foldon construct

SEQ ID NO: 10537 - protein, 1177 aa, Artificial Sequence; identical to SEQ ID NO: 10269
  SARS-CoV-2/Guangdong/GD2020087-P0008/2020__EPI_ISL_413863 spike protein (1-1147)(A890C_V1040C) Foldon construct

SEQ ID NO: 10538 - protein, 1177 aa, Artificial Sequence; identical to SEQ ID NO: 10270
  SARS-CoV-2/Sweden/01/2020__EPI_ISL_411951 spike protein (1-1147)(A890C_V1040C) Foldon construct

SEQ ID NO: 10539 - protein, 1177 aa, Artificial Sequence; identical to SEQ ID NO: 10271
  SARS-CoV-2/Tianmen/HBCDC-HB-07/2020__EPI_ISL_412983 spike protein (1-1147)(A890C_V1040C) Foldon construct

SEQ ID NO: 10540 - protein, 1177 aa, Artificial Sequence; identical to SEQ ID NO: 10272
  SARS-CoV-2/Hong Kong/case42_VM20002493/2020__EPI_ISL_414527 spike protein (1-1147)(A890C_V1040C) Foldon construct

SEQ ID NO: 10541 - protein, 1177 aa, Artificial Sequence; identical to SEQ ID NO: 10273
  SARS-CoV-2/USA/CruiseA-23/2020__EPI_ISL_414482 spike protein (1-1147)(A890C_V1040C) Foldon construct

SEQ ID NO: 10542 - protein, 1177 aa, Artificial Sequence; identical to SEQ ID NO: 10274
  SARS-CoV-2/Hong Kong/case85_VM20002868/2020__EPI_ISL_414519 spike protein (1-1147)(A890C_V1040C) Foldon construct

SEQ ID NO: 10543 - protein, 1177 aa, Artificial Sequence; identical to SEQ ID NO: 10265
  SARS-CoV-2/England/200990660/2020__EPI_ISL_414523 spike protein (1-1147)(A890C_V1040C) Foldon construct

SEQ ID NO: 10544 - protein, 1177 aa, Artificial Sequence; identical to SEQ ID NO: 10276
  SARS-CoV-2/Australia/NSW09/2020__EPI_ISL_413595 spike protein (1-1147)(A890C_V1040C) Foldon construct

SEQ ID NO: 10545 - protein, 1177 aa, Artificial Sequence; identical to SEQ ID NO: 10257
  SARS-CoV-2/Australia/NSW10/2020__EPI_ISL_413596 spike protein (1-1147)(A890C_V1040C) Foldon construct

SEQ ID NO: 10546 - protein, 1177 aa, Artificial Sequence; identical to SEQ ID NO: 10278
  SARS-CoV-2/Switzerland/1000477797/2020__EPI_ISL_413023 spike protein (1-1147)(A890C_V1040C) Foldon construct

SEQ ID NO: 10547 - protein, 1177 aa, Artificial Sequence; identical to SEQ ID NO: 10279
  SARS-CoV-2/Belgium/BA-02291/2020__EPI_ISL_415159 spike protein (1-1147)(A890C_V1040C) Foldon construct

SEQ ID NO: 10548 - protein, 1177 aa, Artificial Sequence; identical to SEQ ID NO: 10280
  SARS-CoV-2/USA/WA8-UW5/2020__EPI_ISL_413486 spike protein (1-1147)(A890C_V1040C) Foldon construct

SEQ ID NO: 10549 - protein, 1177 aa, Artificial Sequence; identical to SEQ ID NO: 10281
  SARS-CoV-2/England/20102000506/2020__EPI_ISL_415147 spike protein (1-1147)(A890C_V1040C) Foldon construct

SEQ ID NO: 10550 - protein, 1177 aa, Artificial Sequence; identical to SEQ ID NO: 10282
  SARS-CoV-2/Belgium/VAG-03013/2020__EPI_ISL_415155 spike protein (1-1147)(A890C_V1040C) Foldon construct

SEQ ID NO: 10551 - protein, 1177 aa, Artificial Sequence; identical to SEQ ID NO: 10283
  SARS-CoV-2/Belgium/BC-03016/2020__EPI_ISL_415157 spike protein (1-1147)(A890C_V1040C) Foldon construct

SEQ ID NO: 10552 - protein, 1177 aa, Artificial Sequence; identical to SEQ ID NO: 10284
  SARS-CoV-2/Germany/BavPat3/2020__EPI_ISL_414521 spike protein (1-1147)(A890C_V1040C) Foldon construct

SEQ ID NO: 10553 - protein, 1177 aa, Artificial Sequence; identical to SEQ ID NO: 10285
  SARS-CoV-2/France/HF1805/2020__EPI_ISL_414628 spike protein (1-1147)(A890C_V1040C) Foldon construct

SEQ ID NO: 10554 - protein, 1177 aa, Artificial Sequence; identical to SEQ ID NO: 10286
  SARS-CoV-2/Netherlands/ZuidHolland_9/2020__EPI_ISL_414445 spike protein (1-1147)(A890C_V1040C) Foldon construct

SEQ ID NO: 10555 - protein, 1177 aa, Artificial Sequence; identical to SEQ ID NO: 10287
  SARS-CoV-2/Finland/FIN03032020A/2020__EPI_ISL_413602 spike protein (1-1147)(A890C_V1040C) Foldon construct

SEQ ID NO: 10556 - protein, 1177 aa, Artificial Sequence; identical to SEQ ID NO: 10288
  SARS-CoV-2/France/GE1977/2020__EPI_ISL_414632 spike protein (1-1147)(A890C_V1040C) Foldon construct

SEQ ID NO: 10557 - protein, 1177 aa, Artificial Sequence; identical to SEQ ID NO: 10289
  SARS-CoV-2/Finland/FIN-313/2020__EPI_ISL_414641 spike protein (1-1147)(A890C_V1040C) Foldon construct

SEQ ID NO: 10558 - protein, 1177 aa, Artificial Sequence; identical to SEQ ID NO: 10290
  SARS-CoV-2/Netherlands/ZuidHolland_2/2020__EPI_ISL_414556 spike protein (1-1147)(A890C_V1040C) Foldon construct

SEQ ID NO: 10559 - protein, 1177 aa, Artificial Sequence; identical to SEQ ID NO: 10291
  SARS-CoV-2/USA/WA-UW31/2020__EPI_ISL_414618 spike protein (1-1147)(A890C_V1040C) Foldon construct

SEQ ID NO: 10560 - protein, 1177 aa, Artificial Sequence; identical to SEQ ID NO: 10292
  SARS-CoV-2/South Korea/SNU01/2020__EPI_ISL_411929 spike protein (1-1147)(A890C_V1040C) Foldon construct

SEQ ID NO: 10561 - protein, 1177 aa, Artificial Sequence; identical to SEQ ID NO: 10293
  SARS-CoV-2/China/WF0004/2020__EPI_ISL_413694 spike protein (1-1147)(A890C_V1040C) Foldon construct

SEQ ID NO: 10562 - protein, 1177 aa, Artificial Sequence; identical to SEQ ID NO: 10294
  SARS-CoV-2/China/WF0028/2020__EPI_ISL_413791 spike protein (1-1147)(A890C_V1040C) Foldon construct

SEQ ID NO: 10563 - protein, 1177 aa, Artificial Sequence; identical to SEQ ID NO: 10295
  SARS-CoV-2/2019-nCoV/USA-CruiseA-18/2020__MT159716.1 spike protein (1-1147)(A890C_V1040C) Foldon construct

SEQ ID NO: 10564 - protein, 1177 aa, Artificial Sequence; identical to SEQ ID NO: 10296
  SARS-CoV-2/SARS-CoV-2/Yunnan-01/human/2020/CHN__MT049951.1 spike protein (1-1147)(A890C_V1040C) Foldon construct

SEQ ID NO: 10565 - protein, 1177 aa, Artificial Sequence; identical to SEQ ID NO: 10297
  SARS-CoV-2/USA/WA-UW292/2020__EPI_ISL_418077 spike protein (1-1147)(A890C_V1040C) Foldon construct

SEQ ID NO: 10566 - protein, 1177 aa, Artificial Sequence; identical to SEQ ID NO: 10298
  SARS-CoV-2/Iceland/192/2020__EPI_ISL_417819 spike protein (1-1147)(A890C_V1040C) Foldon construct

SEQ ID NO: 10567 - protein, 1177 aa, Artificial Sequence; identical to SEQ ID NO: 10299
  SARS-CoV-2/Belgium/ULG-6939/2020__EPI_ISL_417020 spike protein (1-1147)(A890C_V1040C) Foldon construct

SEQ ID NO: 10568 - protein, 1177 aa, Artificial Sequence; identical to SEQ ID NO: 10300
  SARS-CoV-2/France/HF2496/2020__EPI_ISL_418231 spike protein (1-1147)(A890C_V1040C) Foldon construct

SEQ ID NO: 10569 - protein, 1177 aa, Artificial Sequence; identical to SEQ ID NO: 10301
  SARS-CoV-2/USA/WA-UW291/2020__EPI_ISL_418076 spike protein (1-1147)(A890C_V1040C) Foldon construct

SEQ ID NO: 10570 - protein, 1177 aa, Artificial Sequence; identical to SEQ ID NO: 10265
  SARS-CoV-2/Portugal/PT0034/2020__EPI_ISL_418019 spike protein (1-1147)(A890C_V1040C) Foldon construct

SEQ ID NO: 10571 - protein, 1177 aa, Artificial Sequence; identical to SEQ ID NO: 10257
  SARS-CoV-2/Iceland/202/2020__EPI_ISL_417750 spike protein (1-1147)(A890C_V1040C) Foldon construct

SEQ ID NO: 10572 - protein, 1177 aa, Artificial Sequence; identical to SEQ ID NO: 10304
  SARS-CoV-2/USA/WA-UW261/2020__EPI_ISL_418046 spike protein (1-1147)(A890C_V1040C) Foldon construct

SEQ ID NO: 10573 - protein, 1177 aa, Artificial Sequence; identical to SEQ ID NO: 10305
  SARS-CoV-2/Portugal/PT0035/2020__EPI_ISL_418020 spike protein (1-1147)(A890C_V1040C) Foldon construct

SEQ ID NO: 10574 - protein, 1177 aa, Artificial Sequence; identical to SEQ ID NO: 10306
  SARS-CoV-2/USA/NY-NYUMC7/2020__EPI_ISL_418192 spike protein (1-1147)(A890C_V1040C) Foldon construct

SEQ ID NO: 10575 - protein, 1177 aa, Artificial Sequence; identical to SEQ ID NO: 10307
  SARS-CoV-2/Iceland/189/2020__EPI_ISL_417709 spike protein (1-1147)(A890C_V1040C) Foldon construct

SEQ ID NO: 10576 - protein, 1177 aa, Artificial Sequence; identical to SEQ ID NO: 10308
  SARS-CoV-2/Australia/NSW56/2020__EPI_ISL_417408 spike protein (1-1147)(A890C_V1040C) Foldon construct

SEQ ID NO: 10577 - protein, 1177 aa, Artificial Sequence; identical to SEQ ID NO: 10309
  SARS-CoV-2/Iceland/280/2020__EPI_ISL_417608 spike protein (1-1147)(A890C_V1040C) Foldon construct

SEQ ID NO: 10578 - protein, 1177 aa, Artificial Sequence; identical to SEQ ID NO: 10265
  SARS-CoV-2/Iceland/247/2020__EPI_ISL_417575 spike protein (1-1147)(A890C_V1040C) Foldon construct

SEQ ID NO: 10579 - protein, 1177 aa, Artificial Sequence; identical to SEQ ID NO: 10311
  SARS-CoV-2/Iceland/238/2020__EPI_ISL_417566 spike protein (1-1147)(A890C_V1040C) Foldon construct

SEQ ID NO: 10580 - protein, 1177 aa, Artificial Sequence; identical to SEQ ID NO: 10312
  SARS-CoV-2/Greece/16/2020__EPI_ISL_418265 spike protein (1-1147)(A890C_V1040C) Foldon construct

SEQ ID NO: 10581 - protein, 1177 aa, Artificial Sequence; identical to SEQ ID NO: 10313
  SARS-CoV-2/Iceland/319/2020__EPI_ISL_417648 spike protein (1-1147)(A890C_V1040C) Foldon construct

SEQ ID NO: 10582 - protein, 1177 aa, Artificial Sequence; identical to SEQ ID NO: 10314
  SARS-CoV-2/Congo/94/2020__EPI_ISL_417947 spike protein (1-1147)(A890C_V1040C) Foldon construct

SEQ ID NO: 10583 - protein, 1177 aa, Artificial Sequence; identical to SEQ ID NO: 10315
  SARS-CoV-2/Congo/158/2020__EPI_ISL_417950 spike protein (1-1147)(A890C_V1040C) Foldon construct

SEQ ID NO: 10584 - protein, 1177 aa, Artificial Sequence; identical to SEQ ID NO: 10316
  SARS-CoV-2/USA/UT-00034/2020__EPI_ISL_417977 spike protein (1-1147)(A890C_V1040C) Foldon construct

SEQ ID NO: 10585 - protein, 1177 aa, Artificial Sequence; identical to SEQ ID NO: 10317
  SARS-CoV-2/USA/UT-00033/2020__EPI_ISL_417976 spike protein (1-1147)(A890C_V1040C) Foldon construct

SEQ ID NO: 10586 - protein, 1177 aa, Artificial Sequence; identical to SEQ ID NO: 10318
  SARS-CoV-2/USA/WI-13/2020__EPI_ISL_417516 spike protein (1-1147)(A890C_V1040C) Foldon construct

SEQ ID NO: 10587 - protein, 1176 aa, Artificial Sequence; identical to SEQ ID NO: 10319
  SARS-CoV-2/India/1-27/2020__EPI_ISL_413522 spike protein (1-1146)(A889C_V1039C) Foldon construct

SEQ ID NO: 10588 - protein, 1171 aa, Artificial Sequence; identical to SEQ ID NO: 10320
  SARS-CoV-2/pangolin/Guangxi/P4L/2017__EPI_ISL_410538 spike protein (1-1141)(A884C_V1034C) Foldon construct

SEQ ID NO: 10589 - protein, 1171 aa, Artificial Sequence; identical to SEQ ID NO: 10321
  SARS-CoV-2/pangolin/Guangxi/P5L/2017__EPI_ISL_410540 spike protein (1-1141)(A884C_V1034C) Foldon construct

SEQ ID NO: 10590 - protein, 1171 aa, Artificial Sequence; identical to SEQ ID NO: 10322
  SARS-CoV-2/pangolin/Guangxi/P5E/2017__EPI_ISL_410541 spike protein (1-1141)(A884C_V1034C) Foldon construct

SEQ ID NO: 10591 - protein, 1169 aa, Artificial Sequence; identical to SEQ ID NO: 10323
  SARS-CoV-2/pangolin/Guangxi/P1E/2017__EPI_ISL_410539 spike protein (1-1139)(A882C_V1032C) Foldon construct

SEQ ID NO: 10592 - protein, 1177 aa, Artificial Sequence
  SARS-CoV-2/Wuhan/WIV05/2019__EPI_ISL_402128 spike protein (1-1147)(T874C_S1055C) Foldon construct
MFVFLVLLPLVSSQCVNLTTRTQLPPAYTNSFTRGVYYPDKVFRSSVLHSTQDLFLPFFSNVTWFHAIHVSGTNGTKRFDNPVLPFNDGVYFASTEKSNIIRGWIFGTTLDSKTQSLLIVNNATNVVIKVCEFQFCNDPFLGVYYHKNNKSWMESEFRVYSSANNCTFEYVSQPFLMDLEGKQGNFKNLREFVFKNIDGYFKIYSKHTPINLVRDLPQGFSALEPLVDLPIGINITRFQTLLALHRSYLTPGDSSSGWTAGAAAYYVGYLQPRTFLLKYNENGTITDAVDCALDPLSETKCTLKSFTVEKGIYQTSNFRVQPTESIVRFPNITNLCPFGEVFNATRFASVYAWNRKRISNCVADYSVLYNSASFSTFKCYGVSPTKLNDLCFTNVYADSFVIRGDEVRQIAPGQTGKIADYNYKLPDDFTGCVIAWNSNNLDSKVGGNYNYLYRLFRKSNLKPFERDISTEIYQAGSTPCNGVEGFNCYFPLQSYGFQPTNGVGYQPYRVVVLSFELLHAPATVCGPKKSTNLVKNKCVNFNFNGLTGTGVLTESNKKFLPFQQFGRDIADTTDAVRDPQTLEILDITPCSFGGVSVITPGTNTSNQVAVLYQDVNCTEVPVAIHADQLTPTWRVYSTGSNVFQTRAGCLIGAEHVNNSYECDIPIGAGICASYQTQTNSPRRARSVASQSIIAYTMSLGAENSVAYSNNSIAIPTNFTISVTTEILPVSMTKTSVDCTMYICGDSTECSNLLLQYGSFCTQLNRALTGIAVEQDKNTQEVFAQVKQIYKTPPIKDFGGFNFSQILPDPSKPSKRSFIEDLLFNKVTLADAGFIKQYGDCLGDIAARDLICAQKFNGLTVLPPLLTDEMIAQYCSALLAGTITSGWTFGAGAALQIPFAMQMAYRFNGIGVTQNVLYENQKLIANQFNSAIGKIQDSLSSTASALGKLQDVVNQNAQALNTLVKQLSSNFGAISSVLNDILSRLDKVEAEVQIDRLITGRLQSLQTYVTQQLIRAAEIRASANLAATKMSECVLGQSKRVDFCGKGYHLMSFPQCAPHGVVFLHVTYVPAQEKNFTTAPAICHDGKAHFPREGVFVSNGTHWFVTQRNFYEPQIITTDNTFVSGNCDVVIGIVNNTVYDPLQPELDSGGSGYIPEAPRDGQAYVRKDGEWVLLSTFL

SEQ ID NO: 10593 - protein, 1173 aa, Artificial Sequence
  SARS-CoV-2/bat/Yunnan/RaTG13/2013__EPI_ISL_402131 spike protein (1-1143)(T870C_S1051C) Foldon construct
MFVFLVLLPLVSSQCVNLTTRTQLPPAYTNSSTRGVYYPDKVFRSSVLHLTQDLFLPFFSNVTWFHAIHVSGTNGIKRFDNPVLPFNDGVYFASTEKSNIIRGWIFGTTLDSKTQSLLIVNNATNVVIKVCEFQFCNDPFLGVYYHKNNKSWMESEFRVYSSANNCTFEYVSQPFLMDLEGKQGNFKNLREFVFKNIDGYFKIYSKHTPINLVRDLPPGFSALEPLVDLPIGINITRFQTLLALHRSYLTPGDSSSGWTAGAAAYYVGYLQPRTFLLKYNENGTITDAVDCALDPLSETKCTLKSFTVEKGIYQTSNFRVQPTDSIVRFPNITNLCPFGEVFNATTFASVYAWNRKRISNCVADYSVLYNSTSFSTFKCYGVSPTKLNDLCFTNVYADSFVITGDEVRQIAPGQTGKIADYNYKLPDDFTGCVIAWNSKHIDAKEGGNFNYLYRLFRKANLKPFERDISTEIYQAGSKPCNGQTGLNCYYPLYRYGFYPTDGVGHQPYRVVVLSFELLNAPATVCGPKKSTNLVKNKCVNFNFNGLTGTGVLTESNKKFLPFQQFGRDIADTTDAVRDPQTLEILDITPCSFGGVSVITPGTNASNQVAVLYQDVNCTEVPVAIHADQLTPTWRVYSTGSNVFQTRAGCLIGAEHVNNSYECDIPIGAGICASYQTQTNSRSVASQSIIAYTMSLGAENSVAYSNNSIAIPTNFTISVTTEILPVSMTKTSVDCTMYICGDSTECSNLLLQYGSFCTQLNRALTGIAVEQDKNTQEVFAQVKQIYKTPPIKDFGGFNFSQILPDPSKPSKRSFIEDLLFNKVTLADAGFIKQYGDCLGDIAARDLICAQKFNGLTVLPPLLTDEMIAQYCSALLAGTITSGWTFGAGAALQIPFAMQMAYRFNGIGVTQNVLYENQKLIANQFNSAIGKIQDSLSSTASALGKLQDVVNQNAQALNTLVKQLSSNFGAISSVLNDILSRLDKVEAEVQIDRLITGRLQSLQTYVTQQLIRAAEIRASANLAATKMSECVLGQSKRVDFCGKGYHLMSFPQCAPHGVVFLHVTYVPAQEKNFTTAPAICHDGKAHFPREGVFVSNGTHWFVTQRNFYEPQIITTDNTFVSGSCDVVIGIVNNTVYDPLQPELDSGGSGYIPEAPRDGQAYVRKDGEWVLLSTFL

SEQ ID NO: 10594 - protein, 1177 aa, Artificial Sequence
  SARS-CoV-2/Wuhan/HBCDC-HB-01/2019__EPI_ISL_402132 spike protein (1-1147)(T874C_S1055C) Foldon construct
MFVFLVLLPLVSSQCVNLTTRTQLPPAYTNSITRGVYYPDKVFRSSVLHSTQDLFLPFFSNVTWFHAIHVSGTNGTKRFDNPVLPFNDGVYFASTEKSNIIRGWIFGTTLDSKTQSLLIVNNATNVVIKVCEFQFCNDPFLGVYYHKNNKSWMESEFRVYSSANNCTFEYVSQPFLMDLEGKQGNFKNLREFVFKNIDGYFKIYSKHTPINLVRDLPQGFSALEPLVDLPIGINITRFQTLLALHRSYLTPGDSSSGWTAGAAAYYVGYLQPRTFLLKYNENGTITDAVDCALDPLSETKCTLKSFTVEKGIYQTSNFRVQPTESIVRFPNITNLCPFGEVFNATRFASVYAWNRKRISNCVADYSVLYNSASFSTFKCYGVSPTKLNDLCFTNVYADSFVIRGDEVRQIAPGQTGKIADYNYKLPDDFTGCVIAWNSNNLDSKVGGNYNYLYRLFRKSNLKPFERDISTEIYQAGSTPCNGVEGFNCYFPLQSYGFQPTNGVGYQPYRVVVLSFELLHAPATVCGPKKSTNLVKNKCVNFNFNGLTGTGVLTESNKKFLPFQQFGRDIADTTDAVRDPQTLEILDITPCSFGGVSVITPGTNTSNQVAVLYQDVNCTEVPVAIHADQLTPTWRVYSTGSNVFQTRAGCLIGAEHVNNSYECDIPIGAGICASYQTQTNSPRRARSVASQSIIAYTMSLGAENSVAYSNNSIAIPTNFTISVTTEILPVSMTKTSVDCTMYICGDSTECSNLLLQYGSFCTQLNRALTGIAVEQDKNTQEVFAQVKQIYKTPPIKDFGGFNFSQILPDPSKPSKRSFIEDLLFNKVTLADAGFIKQYGDCLGDIAARDLICAQKFNGLTVLPPLLTDEMIAQYCSALLAGTITSGWTFGAGAALQIPFAMQMAYRFNGIGVTQNVLYENQKLIANQFNSAIGKIQDSLSSTASALGKLQDVVNQNAQALNTLVKQLSSNFGAISSVLNDILSRLDKVEAEVQIDRLITGRLQSLQTYVTQQLIRAAEIRASANLAATKMSECVLGQSKRVDFCGKGYHLMSFPQCAPHGVVFLHVTYVPAQEKNFTTAPAICHDGKAHFPREGVFVSNGTHWFVTQRNFYEPQIITTDNTFVSGNCDVVIGIVNNTVYDPLQPELDSGGSGYIPEAPRDGQAYVRKDGEWVLLSTFL

SEQ ID NO: 10595 - protein, 1177 aa, Artificial Sequence
  SARS-CoV-2/Guangdong/20SF028/2020__EPI_ISL_403936 spike protein (1-1147)(T874C_S1055C) Foldon construct
MFVFLVLLPLVSSQCVNLTTRTQLPPAYTNSFTRGVYYPDKVFRSSVLYSTQDLFLPFFSNVTWFHAIHVSGTNGTKRFDNPVLPFNDGVYFASTEKSNIIRGWIFGTTLDSKTQSLLIVNNATNVVIKVCEFQFCNDPFLGVYYHKNNKSWMESEFRVYSSANNCTFEYVSQPFLMDLEGKQGNFKNLREFVFKNIDGYFKIYSKHTPINLVRDLPQGFSALEPLVDLPIGINITRFQTLLALHRSYLTPGDSSSGWTAGAAAYYVGYLQPRTFLLKYNENGTITDAVDCALDPLSETKCTLKSFTVEKGIYQTSNFRVQPTESIVRFPNITNLCPFGEVFNATRFASVYAWNRKRISNCVADYSVLYNSASFSTFKCYGVSPTKLNDLCFTNVYADSFVIRGDEVRQIAPGQTGKIADYNYKLPDDFTGCVIAWNSNNLDSKVGGNYNYLYRLFRKSNLKPFERDISTEIYQAGSTPCNGVEGFNCYFPLQSYGFQPTNGVGYQPYRVVVLSFELLHAPATVCGPKKSTNLVKNKCVNFNFNGLTGTGVLTESNKKFLPFQQFGRDIADTTDAVRDPQTLEILDITPCSFGGVSVITPGTNTSNQVAVLYQDVNCTEVPVAIHADQLTPTWRVYSTGSNVFQTRAGCLIGAEHVNNSYECDIPIGAGICASYQTQTNSPRRARSVASQSIIAYTMSLGAENSVAYSNNSIAIPTNFTISVTTEILPVSMTKTSVDCTMYICGDSTECSNLLLQYGSFCTQLNRALTGIAVEQDKNTQEVFAQVKQIYKTPPIKDFGGFNFSQILPDPSKPSKRSFIEDLLFNKVTLADAGFIKQYGDCLGDIAARDLICAQKFNGLTVLPPLLTDEMIAQYCSALLAGTITSGWTFGAGAALQIPFAMQMAYRFNGIGVTQNVLYENQKLIANQFNSAIGKIQDSLSSTASALGKLQDVVNQNAQALNTLVKQLSSNFGAISSVLNDILSRLDKVEAEVQIDRLITGRLQSLQTYVTQQLIRAAEIRASANLAATKMSECVLGQSKRVDFCGKGYHLMSFPQCAPHGVVFLHVTYVPAQEKNFTTAPAICHDGKAHFPREGVFVSNGTHWFVTQRNFYEPQIITTDNTFVSGNCDVVIGIVNNTVYDPLQPELDSGGSGYIPEAPRDGQAYVRKDGEWVLLSTFL

SEQ ID NO: 10596 - protein, 1177 aa, Artificial Sequence
  SARS-CoV-2/Shenzhen/SZTH-001/2020__EPI_ISL_406592 spike protein (1-1147)(T874C_S1055C) Foldon construct
MFVFLVLLPLVSSQCVNLTTRTQLPPAYTNSFTRGVYYPDKVFRSSVLHSTQDLFLPFFSNVTWFHAIHVSGTNGTKRFDNPVLPFNDGVYFASTEKSNIIRGWIFGTTLDSKTQSLLIVNNATNVVIKVCEFQFCNDPFLGVYYHKNNKSWMESEFRVYSSANNCTFEYVSQPFLMDLEGKQGNFKNLREFVFKNIDGYFKIYSKHTPINLVRDLPQGFSALEPLVDLPIGINITRFQTLLALHRSYLTPGDSSSGWTAGAAAYYVGYLQPRTFLLKYNENGTITDAVDCALDPLSETKCTLKSFTVEKGIYQTSNFRVQPTESIVRFPNITNLCPFGEVFNATRFASVYAWNRKRISNCVADYSVLYNSASFSTFKCYGVSPTKLNDLCFTNVYADSFVIRGDEVRQIAPGQTGKIADYNYKLPDDFTGCVIAWNSNNLDSKVGGNYNYLYRLFRKSNLKPFERDISTEIYQAGSTPCNGVEGFNCYFPLQSYGFQPTNGVGYQPYRVVVLSFELLHAPATVCGPKKSTNLVKNKCVNFNFNGLTGTGVLTESNKKFLPFQQFGRDIADTTDAVRDPQTLEILDITPCSFGGVSVITPGTNTSNQVAVLYQDVNCTEVPVAIHADQLTPTWRVYSTGSNVFQTRAGCLIGAEHVNNSYECDIPIGAGICASYQTQTNSPRRARSVASQSIIAYTMSLGAENSVAYSNNSIAIPTNFTISVTTEILPVSMTKTSVDCTMYICGDSTECSNLLLQYGSFCTQLNRALTGIAVEQDKNTQEVFAQVKQIYKTPPIKDFGGFNFSQILPDPSKPSKRSFIEDLLFNKVTLADAGFIKQYGDCLGDIAARDLICAQKFNGLTVLPPLLTDEMIAQYCSALLAGTITSGWTFGAGAALQIPFAMQMAYRFNGIGVTQNVLYENQKLIANQFNSAIGKIQDSLSSTASALGKLQDVVNQNAQALNTLVKQLSSNFGAISSVLNDILSRLDKVEAEVQIDRLITGRLQSLQTYVTQQLIRAAEIRASANLAATKMSECVLGQSKRVDFCGKGYHLMSFPQCAPHGVVFLHVTYVPAQEKNFTTAPAICHDGKAHFPREGVFVSNGTHWFVTQRNFYEPQIITTDNTFVSGNCDVLIGIVNNTVYDPLQPELDSGGSGYIPEAPRDGQAYVRKDGEWVLLSTFL

SEQ ID NO: 10597 - protein, 1177 aa, Artificial Sequence
  SARS-CoV-2/Shenzhen/SZTH-004/2020__EPI_ISL_406595 spike protein (1-1147)(T874C_S1055C) Foldon construct
MFVFLVLLPLVSSQCVNLTTRTQLPPAYTNSFTRGVYYPDKVFRSSVLHSTQDLFLPFFSNVTWFHAIHVSGTNGTKRFDNPVLPFNDGVYFASTEKSNIIRGWIFGTTLDSKTQSLLIVNNATNVVIKVCEFQFCNDPFLGVYYHKNNKSWMESEFRVYSSANNCTFEYVSQPFLMDLEGKQGNFKNLREFVFKNIDGYFKIYSKHTPINLVRDLPQGFSALEPLVDLPIGINITRFQTLLALHRSYLTPGDSSSGWTAGAAAYYVGYLQPRTFLLKYNENGTITDAVDCALDPLSETKCTLKSFTVEKGIYQTSNFRVQPTESIVRFPNITNLCPFGEVFNATRFASVYAWDRKRISNCVAYYSVLYNSASFSTFKCYGVSPTKLNDLCFTNVYADSFVIRGDEVRQIAPGQTGKIADYNYKLPDDFTGCVIAWNSNNLDSKVGGNYNYLYRLFRKSNLKPFERDISTEIYQAGSTPCNGVEGFNCYFPLQSYGFQPTNGVGYQPYRVVVLSFELLHAPATVCGPKKSTNLVKNKCVNFNFNGLTGTGVLTESNKKFLPFQQFGRDIADTTDAVRDPQTLEILDITPCSFGGVSVITPGTNTSNQVAVLYQDVNCTEVPVAIHADQLTPTWRVYSTGSNVFQTRAGCLIGAEHVNNSYECDIPIGAGICASYQTQTNSPRRARSVASQSIIAYTMSLGAENSVAYSNNSIAIPTNFTISVTTEILPVSMTKTSVDCTMYICGDSTECSNLLLQYGSFCTQLNRALTGIAVEQDKNTQEVFAQVKQIYKTPPIKDFGGFNFSQILPDPSKPSKRSFIEDLLFNKVTLADAGFIKQYGDCLGDIAARDLICAQKFNGLTVLPPLLTDEMIAQYCSALLAGTITSGWTFGAGAALQIPFAMQMAYRFNGIGVTQNVLYENQKLIANQFNSAIGKIQDSLSSTASALGKLQDVVNQNAQALNTLVKQLSSNFGAISSVLNDILSRLDKVEAEVQIDRLITGRLQSLQTYVTQQLIRAAEIRASANLAATKMSECVLGQSKRVDFCGKGYHLMSFPQCAPHGVVFLHVTYVPAQEKNFTTAPAICHDGKAHFPREGVFVSNGTHWFVTQRNFYEPQIITTDNTFVSGNCDVVIGIVNNTVYDPLQPELDSGGSGYIPEAPRDGQAYVRKDGEWVLLSTFL

SEQ ID NO: 10598 - protein, 1177 aa, Artificial Sequence
  SARS-CoV-2/France/IDF0372/2020__EPI_ISL_406596 spike protein (1-1147)(T874C_S1055C) Foldon construct
MFVFLVLLPLVSSQCVNLTTRTQLPPAYTNSFTRGVYYPDKVFRSSVLHSTQDLFLPFFSNVTWFHAIHVSGTNGTKRFDNPVLPFNDGVYFASTEKSNIIRGWIFGTTLDSKTQSLLIVNNATNVVIKVCEFQFCNDPFLGVYYHKNNKSWMESEFRVYSSANNCTFEYVSQPFLMDLEGKQGNFKNLREFVFKNIDGYFKIYSKHTPINLVRDLPQGFSALEPLVDLPIGINITRFQTLLALHRSYLTPGDSSSGWTAGAAAYYVGYLQPRTFLLKYNENGTITDAVDCALDPLSETKCTLKSFTVEKGIYQTSNFRVQPTESIVRFPNITNLCPFGEVFNATRFASVYAWNRKRISNCVADYSFLYNSASFSTFKCYGVSPTKLNDLCFTNVYADSFVIRGDEVRQIAPGQTGKIADYNYKLPDDFTGCVIAWNSNNLDSKVGGNYNYLYRLFRKSNLKPFERDISTEIYQAGSTPCNGVEGFNCYFPLQSYGFQPTNGVGYQPYRVVVLSFELLHAPATVCGPKKSTNLVKNKCVNFNFNGLTGTGVLTESNKKFLPFQQFGRDIADTTDAVRDPQTLEILDITPCSFGGVSVITPGTNTSNQVAVLYQDVNCTEVPVAIHADQLTPTWRVYSTGSNVFQTRAGCLIGAEHVNNSYECDIPIGAGICASYQTQTNSPRRARSVASQSIIAYTMSLGAENSVAYSNNSIAIPTNFTISVTTEILPVSMTKTSVDCTMYICGDSTECSNLLLQYGSFCTQLNRALTGIAVEQDKNTQEVFAQVKQIYKTPPIKDFGGFNFSQILPDPSKPSKRSFIEDLLFNKVTLADAGFIKQYGDCLGDIAARDLICAQKFNGLTVLPPLLTDEMIAQYCSALLAGTITSGWTFGAGAALQIPFAMQMAYRFNGIGVTQNVLYENQKLIANQFNSAIGKIQDSLSSTASALGKLQDVVNQNAQALNTLVKQLSSNFGAISSVLNDILSRLDKVEAEVQIDRLITGRLQSLQTYVTQQLIRAAEIRASANLAATKMSECVLGQSKRVDFCGKGYHLMSFPQCAPHGVVFLHVTYVPAQEKNFTTAPAICHDGKAHFPREGVFVSNGTHWFVTQRNFYEPQIITTDNTFVSGNCDVVIGIVNNTVYDPLQPELDSGGSGYIPEAPRDGQAYVRKDGEWVLLSTFL

SEQ ID NO: 10599 - protein, 1177 aa, Artificial Sequence
  SARS-CoV-2/Australia/VIC01/2020__EPI_ISL_406844 spike protein (1-1147)(T874C_S1055C) Foldon construct
MFVFLVLLPLVSSQCVNLTTRTQLPPAYTNSFTRGVYYPDKVFRSSVLHSTQDLFLPFFSNVTWFHAIHVSGTNGTKRFDNPVLPFNDGVYFASTEKSNIIRGWIFGTTLDSKTQSLLIVNNATNVVIKVCEFQFCNDPFLGVYYHKNNKSWMESEFRVYSSANNCTFEYVSQPFLMDLEGKQGNFKNLREFVFKNIDGYFKIYSKHTPINLVRDLPQGFSALEPLVDLPIGINITRFQTLLALHRRYLTPGDSSSGWTAGAAAYYVGYLQPRTFLLKYNENGTITDAVDCALDPLSETKCTLKSFTVEKGIYQTSNFRVQPTESIVRFPNITNLCPFGEVFNATRFASVYAWNRKRISNCVADYSVLYNSASFSTFKCYGVSPTKLNDLCFTNVYADSFVIRGDEVRQIAPGQTGKIADYNYKLPDDFTGCVIAWNSNNLDSKVGGNYNYLYRLFRKSNLKPFERDISTEIYQAGSTPCNGVEGFNCYFPLQSYGFQPTNGVGYQPYRVVVLSFELLHAPATVCGPKKSTNLVKNKCVNFNFNGLTGTGVLTESNKKFLPFQQFGRDIADTTDAVRDPQTLEILDITPCSFGGVSVITPGTNTSNQVAVLYQDVNCTEVPVAIHADQLTPTWRVYSTGSNVFQTRAGCLIGAEHVNNSYECDIPIGAGICASYQTQTNSPRRARSVASQSIIAYTMSLGAENSVAYSNNSIAIPTNFTISVTTEILPVSMTKTSVDCTMYICGDSTECSNLLLQYGSFCTQLNRALTGIAVEQDKNTQEVFAQVKQIYKTPPIKDFGGFNFSQILPDPSKPSKRSFIEDLLFNKVTLADAGFIKQYGDCLGDIAARDLICAQKFNGLTVLPPLLTDEMIAQYCSALLAGTITSGWTFGAGAALQIPFAMQMAYRFNGIGVTQNVLYENQKLIANQFNSAIGKIQDSLSSTASALGKLQDVVNQNAQALNTLVKQLSSNFGAISSVLNDILSRLDKVEAEVQIDRLITGRLQSLQTYVTQQLIRAAEIRASANLAATKMSECVLGQSKRVDFCGKGYHLMSFPQCAPHGVVFLHVTYVPAQEKNFTTAPAICHDGKAHFPREGVFVSNGTHWFVTQRNFYEPQIITTDNTFVSGNCDVVIGIVNNTVYDPLQPELDSGGSGYIPEAPRDGQAYVRKDGEWVLLSTFL

SEQ ID NO: 10600 - protein, 1177 aa, Artificial Sequence
  SARS-CoV-2/Germany/BavPat1/2020__EPI_ISL_406862 spike protein (1-1147)(T874C_S1055C) Foldon construct
MFVFLVLLPLVSSQCVNLTTRTQLPPAYTNSFTRGVYYPDKVFRSSVLHSTQDLFLPFFSNVTWFHAIHVSGTNGTKRFDNPVLPFNDGVYFASTEKSNIIRGWIFGTTLDSKTQSLLIVNNATNVVIKVCEFQFCNDPFLGVYYHKNNKSWMESEFRVYSSANNCTFEYVSQPFLMDLEGKQGNFKNLREFVFKNIDGYFKIYSKHTPINLVRDLPQGFSALEPLVDLPIGINITRFQTLLALHRSYLTPGDSSSGWTAGAAAYYVGYLQPRTFLLKYNENGTITDAVDCALDPLSETKCTLKSFTVEKGIYQTSNFRVQPTESIVRFPNITNLCPFGEVFNATRFASVYAWNRKRISNCVADYSVLYNSASFSTFKCYGVSPTKLNDLCFTNVYADSFVIRGDEVRQIAPGQTGKIADYNYKLPDDFTGCVIAWNSNNLDSKVGGNYNYLYRLFRKSNLKPFERDISTEIYQAGSTPCNGVEGFNCYFPLQSYGFQPTNGVGYQPYRVVVLSFELLHAPATVCGPKKSTNLVKNKCVNFNFNGLTGTGVLTESNKKFLPFQQFGRDIADTTDAVRDPQTLEILDITPCSFGGVSVITPGTNTSNQVAVLYQGVNCTEVPVAIHADQLTPTWRVYSTGSNVFQTRAGCLIGAEHVNNSYECDIPIGAGICASYQTQTNSPRRARSVASQSIIAYTMSLGAENSVAYSNNSIAIPTNFTISVTTEILPVSMTKTSVDCTMYICGDSTECSNLLLQYGSFCTQLNRALTGIAVEQDKNTQEVFAQVKQIYKTPPIKDFGGFNFSQILPDPSKPSKRSFIEDLLFNKVTLADAGFIKQYGDCLGDIAARDLICAQKFNGLTVLPPLLTDEMIAQYCSALLAGTITSGWTFGAGAALQIPFAMQMAYRFNGIGVTQNVLYENQKLIANQFNSAIGKIQDSLSSTASALGKLQDVVNQNAQALNTLVKQLSSNFGAISSVLNDILSRLDKVEAEVQIDRLITGRLQSLQTYVTQQLIRAAEIRASANLAATKMSECVLGQSKRVDFCGKGYHLMSFPQCAPHGVVFLHVTYVPAQEKNFTTAPAICHDGKAHFPREGVFVSNGTHWFVTQRNFYEPQIITTDNTFVSGNCDVVIGIVNNTVYDPLQPELDSGGSGYIPEAPRDGQAYVRKDGEWVLLSTFL

SEQ ID NO: 10601 - protein, 1177 aa, Artificial Sequence
  SARS-CoV-2/Wuhan/HBCDC-HB-02/2020__EPI_ISL_412978 spike protein (1-1147)(T874C_S1055C) Foldon construct
MFVFLVLLPLVSSQCVNLTTRTQLPPAYTNSFTRGVYYPDKVFRSSVLHSTQDLFLPFFSNVTWFHAIHVSGTNGTKRFDNPVLPFNDGVYFASTEKSNIIRGWIFGTTLDSKTQSLLIVNNATNVVIKVCEFQFCNDPFLGVYYHKNNKSWMESEFRVYSSANNCTFEYVSQPFLMDLEGKQGNFKNLREFVFKNIDGYFKIYSKHTPINLVRDLPQGFSALEPLVDLPIGINITRFQTLLALHRSYLTPGDSSSGWTAGAAAYYVGYLQPRTFLLKYNENGTITDAVDCALDPLSETKCTLKSFTVEKGIYQTSNFRVQPTESIVRFPNITNLCPFGEVFNATRFASVYAWNRKRISNCVADYSVLYNSASFSTFKCYGVSPTKLNDLCFTNVYADSFVIRGDEVRQIAPGQTGKIADYNYKLPDDFTGCVIAWNSNNLDSKVGGNYNYLYRLFRKSNLKPFERDISTEIYQAGSTPCNGVEGFNCYFPLQSYGFQPTNGVGYQPYRVVVLSFELLHAPATVCGPKKSTNLVKNKCVNFNFNGLTGTGVLTESNKKFLPFQQFGRDIADTTDAVRDPQTLEILDITPCSFGGVSVITPGTNTSNQVAVLYQDVNCTEVPVAIHADQLTPTWRVYSTGSNVFQTRAGCLIGAEHVNNSYECDIPIGAGICASYQTQTNSPRRARSVASQSIIAYTMSLGAENSVAYSNNSIAIPTNFTISVTTEILPVSMTKTSVDCTMYICGDSTECSNFLLQYGSFCTQLNRALTGIAVEQDKNTQEVFAQVKQIYKTPPIKDFGGFNFSQILPDPSKPSKRSFIEDLLFNKVTLADAGFIKQYGDCLGDIAARDLICAQKFNGLTVLPPLLTDEMIAQYCSALLAGTITSGWTFGAGAALQIPFAMQMAYRFNGIGVTQNVLYENQKLIANQFNSAIGKIQDSLSSTASALGKLQDVVNQNAQALNTLVKQLSSNFGAISSVLNDILSRLDKVEAEVQIDRLITGRLQSLQTYVTQQLIRAAEIRASANLAATKMSECVLGQSKRVDFCGKGYHLMSFPQCAPHGVVFLHVTYVPAQEKNFTTAPAICHDGKAHFPREGVFVSNGTHWFVTQRNFYEPQIITTDNTFVSGNCDVVIGIVNNTVYDPLQPELDSGGSGYIPEAPRDGQAYVRKDGEWVLLSTFL

SEQ ID NO: 10602 - protein, 1177 aa, Artificial Sequence
  SARS-CoV-2/Australia/QLD02/2020__EPI_ISL_407896 spike protein (1-1147)(T874C_S1055C) Foldon construct
MFVFLVLLPLVSSQCVNLTTRTQLPPAYTNSFTRGVYYPDKVFRSSVLHSTQDLFLPFFSNVTWFHAIHVSGTNGTKRFDNPVLPFNDGVYFASTEKSNIIRGWIFGTTLDSKTQSLLIVNNATNVVIKVCEFQFCNDPFLGVYYHKNNKSWMESEFRVYSSANNCTFEYVSQPFLMDLEGKQGNFKNLREFVFKNIDGYFKIYSKHTPINLVRDLPQGFSALEPLVDLPIGINITRFQTLLALHRSYLTPGDSSSGWTAGAAAYYVGYLQPRTFLLKYNENGTITDAVDCALDPLSETKCTLKSFTVEKGIYQTSNFRVQPTESIVRFPNITNLCPFGEVFNATRFASVYAWNRKRISNCVADYSVLYNSASFSTFKCYGVSPTKLNDLCFTNVYADSFVIRGDEVRQIAPGQTGKIADYNYKLPDDFTGCVIAWNSNNLDSKVGGNYNYLYRLFRKSNLKPFERDISTEIYQAGSTPCNGVEGFNCYFPLQSYGFQPTNGVGYQPYRVVVLSFELLHAPATVCGPKKSTNLVKNKCVNFNFNGLTGTGVLTESNKKFLPFQQFGRDIADTTDAVRDPQTLEILDITPCSFGGVSVITPGTNTSNQVAVLYQDVNCTEVPVAIHADQLTPTWRVYSTGSNVFQTRAGCLIGAEHVNNSYECDIPIGAGICASYQTQTNSPRRARSVASQSIIAYTMSLGAENSVAYSNNSIAIPTNFTISVTTEILPVSMTKTSVDCTMYICGDSTECSNLLLQYGSFCTQLNRALTGIAVEQDKNTQEVFAQVKQIYKTPPIKDFGGFNFSQILPDPSKPSKRSFIEDLLFNKVTLADAGFIKQYGDCLGDIAARDLICAQKFNGLTVLPPLLTDEMIAQYCSALLAGTITSGWTFGAGAALQIPFAMQMAYRFNGIGVTQNVLYENQKLIANQFNSAIGKIQDSLSSTASALGKLQDVVNQNAQALNTLVKQLSSNFGAISSVLNDILSRLDKVEAEVQIDRLITGRLQSLQTYVTQQLIRAAEIRASANLAATKMSECVLGQSKRVDFCGKGYHLMSFPQCAPHGVVFLHVTYVPAQEKNFTTAPAICHDGKAHFPREGVFVSNGTHWFVTQRNFYEPQIITTDNTFVSGNCDVVIGIVNNTVYDPLQLELDSGGSGYIPEAPRDGQAYVRKDGEWVLLSTFL

SEQ ID NO: 10603 - protein, 1177 aa, Artificial Sequence
  SARS-CoV-2/India/1-31/2020__EPI_ISL_413523 spike protein (1-1147)(T874C_S1055C) Foldon construct
MFVFLVLLPLVSSQCVNLTTRTQLPPAYTNSFTRGVYYPDKVFRSSVLHSTQDLFLPFFSNVTWFHAIHVSGTNGTKRFDNPVLPFNDGVYFASTEKSNIIRGWIFGTTLDSKTQSLLIVNNATNVVIKVCEFQFCNDPFLGVYYHKNNKSWMESEFRVYSSANNCTFEYVSQPFLMDLEGKQGNFKNLREFVFKNIDGYFKIYSKHTPINLVRDLPQGFSALEPLVDLPIGINITRFQTLLALHRSYLTPGDSSSGWTAGAAAYYVGYLQPRTFLLKYNENGTITDAVDCALDPLSETKCTLKSFTVEKGIYQTSNFRVQPTESIVRFPNITNLCPFGEVFNATRFASVYAWNRKRISNCVADYSVLYNSASFSTFKCYGVSPTKLNDLCFTNVYADSFVIRGDEVRQIAPGQTGKIADYNYKLPDDFTGCVIAWNSNNLDSKVGGNYNYLYRLFRKSNLKPFERDISTEIYQAGSTPCNGVEGFNCYFPLQSYGFQPTNGVGYQPYRVVVLSFELLHAPATVCGPKKSTNLVKNKCVNFNFNGLTGTGVLTESNKKFLPFQQFGRDIADTTDAVRDPQTLEILDITPCSFGGVSVITPGTNTSNQVAVLYQDVNCTEVPVAIHADQLTPTWRVYSTGSNVFQTRAGCLIGAEHVNNSYECDIPIGAGICASYQTQTNSPRRARSVASQSIIAYTMSLGAENSVAYSNNSIAIPTNFTISVTTEILPVSMTKTSVDCTMYICGDSTECSNLLLQYGSFCTQLNRALTGIAVEQDKNTQEVFAQVKQIYKTPPIKDFGGFNFSQILPDPSKPSKRSFIEDLLFNKVTLADAGFIKQYGDCLGDIAARDLICAQKFNGLTVLPPLLTDEMIAQYCSALLAGTITSGWTFGAGAALQIPFAMQMAYRFNGIGVTQNVLYENQKLIANQFNSVIGKIQDSLSSTASALGKLQDVVNQNAQALNTLVKQLSSNFGAISSVLNDILSRLDKVEAEVQIDRLITGRLQSLQTYVTQQLIRAAEIRASANLAATKMSECVLGQSKRVDFCGKGYHLMSFPQCAPHGVVFLHVTYVPAQEKNFTTAPAICHDGKAHFPREGVFVSNGTHWFVTQRNFYEPQIITTDNTFVSGNCDVVIGIVNNTVYDPLQPELDSGGSGYIPEAPRDGQAYVRKDGEWVLLSTFL

SEQ ID NO: 10604 - protein, 1177 aa, Artificial Sequence
  SARS-CoV-2/Guangdong/GD2020087-P0008/2020__EPI_ISL_413863 spike protein (1-1147)(T874C_S1055C) Foldon construct
MFVFLVLLPLVSSQCVNLTTRTQLPPAYTNSFTRGVYYPDKVFRSSVLHSTQDLFLPFFSNVTWFHAIHVSGTNGTKRFDNPVLPFNDGVYFASTEKSNIIRGWIFGTTLDSKTQSLLIVNNATNVVIKVCEFQFCNDPFLGVYYHKNNKSWMESEFRVYSSANNCTFEYVSQPFLMDLEGKQGNFKNLREFVFKNIDGYFKIYSKHTPINLVRDLPQGFSALEPLVDLPIGINITRFQTLLALHRSYLTPGDSSSGWTAGAAAYYVGYLQPRTFLLKYNENGTITDAVDCALDPLSETKCTLKSFTVEKGIYQTSNFRVQPTESIVRFPNITNLCPFGEVFNATRFASVYAWNRKRISNCVADYSVLYNSASFSTFKCYGVSPTKLNDLCFTNVYADSFVIRGDEVREIAPGQTGKIADYNYKLPDDFTGCVIAWNSNNLDSKVGGNYNYLYRLFRKSNLKPFERDISTEIYQAGSTPCNGVEGFNCYFPLQSYGFQPTNGVGYQPYRVVVLSFELLHAPATVCGPKKSTNLVKNKCVNFNFNGLTGTGVLTESNKKFLPFQQFGRDIADTTDAVRDPQTLEILDITPCSFGGVSVITPGTNTSNQVAVLYQDVNCTEVPVAIHADQLTPTWRVYSTGSNVFQTRAGCLIGAEHVNNSYECDIPIGAGICASYQTQTNSPRRARSVASQSIIAYTMSLGAENSVAYSNNSIAIPTNFTISVTTEILPVSMTKTSVDCTMYICGDSTECSNLLLQYGSFCTQLNRALTGIAVEQDKNTQEVFAQVKQIYKTPPIKDFGGFNFSQILPDPSKPSKRSFIEDLLFNKVTLADAGFIKQYGDCLGDIAARDLICAQKFNGLTVLPPLLTDEMIAQYCSALLAGTITSGWTFGAGAALQIPFAMQMAYRFNGIGVTQNVLYENQKLIANQFNSAIGKIQDSLSSTASALGKLQDVVNQNAQALNTLVKQLSSNFGAISSVLNDILSRLDKVEAEVQIDRLITGRLQSLQTYVTQQLIRAAEIRASANLAATKMSECVLGQSKRVDFCGKGYHLMSFPQCAPHGVVFLHVTYVPAQEKNFTTAPAICHDGKAHFPREGVFVSNGTHWFVTQRNFYEPQIITTDNTFVSGNCDVVIGIVNNTVYDPLQPELDSGGSGYIPEAPRDGQAYVRKDGEWVLLSTFL

SEQ ID NO: 10605 - protein, 1177 aa, Artificial Sequence
  SARS-CoV-2/Sweden/01/2020__EPI_ISL_411951 spike protein (1-1147)(T874C_S1055C) Foldon construct
MFVFLVLLPLVSSQCVNLTTRTQLPPAYTNSFTRGVYYPDKVFRSSVLHSTQDLFLPFFSNVTWFHAIHVSGTNGTKRFDNPVLPFNDGVYFASTEKSNIIRGWIFGTTLDSKTQSLLIVNNATNVVIKVCEFQFCNDPFLGVYYHKNNKSWMESEFRVYSSANNCTFEYVSQPFLMDLEGKQGNFKNLREFVFKNIDGYFKIYSKHTPINLVRDLPQGFSALEPLVDLPIGINITRFQTLLALHRSYLTPGDSSSGWTAGAAAYYVGYLQPRTFLLKYNENGTITDAVDCALDPLSETKCTLKSFTVEKGIYQTSNFRVQPTESIVRFPNITNLCPFGEVFNATRFASVYAWNRKRISNCVADYSVLYNSASFSTFKCYGVSPTKLNDLCFTNVYADSFVIRGDEVRQIAPGQTGKIADYNYKLPDDFTGCVIAWNSNNLDSKVGGNYNYLYRLFRKSNLKPFERDISTEIYQAGSTPCNGVEGFNCYFPLQSYGFQPTNGVGYQPYRVVVLSFELLHAPATVCGPKKSTNLVKNKCVNFNFNGLTGTGVLTESNKKFLPFQQFGRDIADTTDAVRDPQTLEILDITPCSFGGVSVITPGTNTSNQVAVLYQDVNCTEVPVAIHADQLTPTWRVYSTGSNVFQTRAGCLIGAEHVNNSYECDIPIGAGICASYQTQTNSPRRARSVASQSIIAYTMSLGAENSVAYSNNSIAIPTNFTISVTTEILPVSMTKTSVDCTMYICGDSTECSNLLLQYGSFCTQLNRALTGIAVEQDKNTQEVFAQVKQIYKTPPIKDCGGFNFSQILPDPSKPSKRSFIEDLLFNKVTLADAGFIKQYGDCLGDIAARDLICAQKFNGLTVLPPLLTDEMIAQYCSALLAGTITSGWTFGAGAALQIPFAMQMAYRFNGIGVTQNVLYENQKLIANQFNSAIGKIQDSLSSTASALGKLQDVVNQNAQALNTLVKQLSSNFGAISSVLNDILSRLDKVEAEVQIDRLITGRLQSLQTYVTQQLIRAAEIRASANLAATKMSECVLGQSKRVDFCGKGYHLMSFPQCAPHGVVFLHVTYVPAQEKNFTTAPAICHDGKAHFPREGVFVSNGTHWFVTQRNFYEPQIITTDNTFVSGNCDVVIGIVNNTVYDPLQPELDSGGSGYIPEAPRDGQAYVRKDGEWVLLSTFL

SEQ ID NO: 10606 - protein, 1177 aa, Artificial Sequence
  SARS-CoV-2/Tianmen/HBCDC-HB-07/2020__EPI_ISL_412983 spike protein (1-1147)(T874C_S1055C) Foldon construct
MFVFLVLLPLVSSQCVNLTTRTQLPPAYTNSFTRGVYYPDKVFRSSVLHSTQDLFLPFFSNVTWFHAIHVSGTNGTKRFDNPVLPFNDGVYFASTEKSNIIRGWIFGTTLDSKTQSLLIVNNATNVVIKVCEFQFCNDPFLGVYYHKNNKSWMESEFRVYSSANNCTFEYVSQPFLMDLEGKQGNFKNLREFVFKNIDGYFKIYSKHTPINLVRDLPQGFSALEPLVDLPIGINITRFQTLLALHRSYLTPGDSSSGWTAGAAAYYVGYLQPRTFLLKYNENGTITDAVDCALDPLSETKCTLKSFTVEKGIYQTSNFRVQPTESIVRFPNITNLCPFGEVFNATRFASVYAWNRKRISNCVADYSVLYNSASFSTFKCYGVSPTKLNDLCFTNVYADSFVIRGDEVRQIAPGQTGKIADYNYKLPDDFTGCVIAWNSNNLDSKVGGNYNYLYRLFRKSNLKPFERDISTEIYQAGSTPCNGVEGFNCYFPLQSYGFQPTNGVGYQPYRVVVLSFELLHAPATVCGPKKSTNLVKNKCVNFNFNGLTGTGVLTESNKKFLPFQQFGRDIADTTDAVRDPQTLEILDITPCSFGGVSVITPGTNTSNQVAVLYQDLNCTEVPVAIHADQLTPTWRVYSTGSNVFQTRAGCLIGAEHVNNSYECDIPIGAGICASYQTQTNSPRRARSVASQSIIAYTMSLGAENSVAYSNNSIAIPTNFTISVTTEILPVSMTKTSVDCTMYICGDSTECSNLLLQYGSFCTQLNRALTGIAVEQDKNTQEVFAQVKQIYKTPPIKDFGGFNFSQILPDPSKPSKRSFIEDLLFNKVTLADAGFIKQYGDCLGDIAARDLICAQKFNGLTVLPPLLTDEMIAQYCSALLAGTITSGWTFGAGAALQIPFAMQMAYRFNGIGVTQNVLYENQKLIANQFNSAIGKIQDSLSSTASALGKLQDVVNQNAQALNTLVKQLSSNFGAISSVLNDILSRLDKVEAEVQIDRLITGRLQSLQTYVTQQLIRAAEIRASANLAATKMSECVLGQSKRVDFCGKGYHLMSFPQCAPHGVVFLHVTYVPAQEKNFTTAPAICHDGKAHFPREGVFVSNGTHWFVTQRNFYEPQIITTDNTFVSGNCDVVIGIVNNTVYDPLQPELDSGGSGYIPEAPRDGQAYVRKDGEWVLLSTFL

SEQ ID NO: 10607 - protein, 1177 aa, Artificial Sequence
  SARS-CoV-2/Hong Kong/case42_VM20002493/2020__EPI_ISL_414527 spike protein (1-1147)(T874C_S1055C) Foldon construct
MFVFLVLLPLVSSQCVNLTTRTQLPPAYTNSFTRGVYYPDKVFRSSVLHSTQDLFLPFFSNVTWFHAIHVSGTNGTKRFDNPVLPFNDGVYFASTEKSNIIRGWIFGTTLDSKTQSLLIVNNATNVVIKVCEFQFCNDPFLGVYYHKNNKSWMESEFRVYSSANNCTFEYVSQPFLMDLEGKQGNFKNLREFVFKNIDGYFKIYSKHTPINLVRDLPQGFSALEPLVDLPIGINITRFQTLLALHRSYLTPGDSSSGWTAGAAAYYVGYLQPRTFLLKYNENGTITDAVDCALDPLSETKCTLKSFTVEKGIYQTSNFRVQPTESIVRFPNITNLCPFGEVFNATRFASVYAWNRKRISNCVADYSVLYNSASFSTFKCYGVSPTKLNDLCFTNVYADSFVIRGDEVRQIAPGQTGKIADYNYKLPDDFTGCVIAWNSNNLDSKVGGNYNYLYRLFRKSNLKPFERDISTEIYQAGSTPCNGVEGFNCYFPLQSYGFQPTNGVGYQPYRVVVLSFELLHAPATVCGPKKSTNLVKNKCVNFNFNGLTGTGVLTESNKKFLPFQQFGRDIADTTDAVRDPQTLEILDITPCSFGGVSVITPGTNTSNQVAVLYQDVNCTEVPVAIHADQLTPTWRVYSTGSNVFQTRAGCLIGAEHVNNSYECDIPIGAGICASYQTQTNSPRRARSVASQSIIAYTMSLGAENSVAYSNNSIAIPTNFAISVTTEILPVSMTKTSVDCTMYICGDSTECSNLLLQYGSFCTQLNRALTGIAVEQDKNTQEVFAQVKQIYKTPPIKDFGGFNFSQILPDPSKPSKRSFIEDLLFNKVTLADAGFIKQYGDCLGDIAARDLICAQKFNGLTVLPPLLTDEMIAQYCSALLAGTITSGWTFGAGAALQIPFAMQMAYRFNGIGVTQNVLYENQKLIANQFNSAIGKIQDSLSSTASALGKLQDVVNQNAQALNTLVKQLSSNFGAISSVLNDILSRLDKVEAEVQIDRLITGRLQSLQTYVTQQLIRAAEIRASANLAATKMSECVLGQSKRVDFCGKGYHLMSFPQCAPHGVVFLHVTYVPAQEKNFTTAPAICHDGKAHFPREGVFVSNGTHWFVTQRNFYEPQIITTDNTFVSGNCDVVIGIVNNTVYDPLQPELDSGGSGYIPEAPRDGQAYVRKDGEWVLLSTFL

SEQ ID NO: 10608 - protein, 1177 aa, Artificial Sequence
  SARS-CoV-2/USA/CruiseA-23/2020__EPI_ISL_414482 spike protein (1-1147)(T874C_S1055C) Foldon construct
MFVFLVLLPLVSSQCVNLTTRTQLPPAYTNSFTRGVYYPDKVFRSSVLHSTQDLFLPFFSNVTWFHAIHVSGTNGTKRFDNPVLPFNDGVYFASTEKSNIIRGWIFGTTLDSKTQSLLIVNNATNVVIKVCEFQFCNDPFLGVYYHKNNKSWMESEFRVYSSANNCTFEYVSQPFLMDLEVKQGNFKNLREFVFKNIDGYFKIYSKHTPINLVRDLPQGFSALEPLVDLPIGINITRFQTLLALHRSYLTPGDSSSGWTAGAAAYYVGYLQPRTFLLKYNENGTITDAVDCALDPLSETKCTLKSFTVEKGIYQTSNFRVQPTESIVRFPNITNLCPFGEVFNATRFASVYAWNRKRISNCVADYSVLYNSASFSTFKCYGVSPTKLNDLCFTNVYADSFVIRGDEVRQIAPGQTGKIADYNYKLPDDFTGCVIAWNSNNLDSKVGGNYNYLYRLFRKSNLKPFERDISTEIYQAGSTPCNGVEGFNCYFPLQSYGFQPTNGVGYQPYRVVVLSFELLHAPATVCGPKKSTNLVKNKCVNFNFNGLTGTGVLTESNKKFLPFQQFGRDIADTTDAVRDPQTLEILDITPCSFGGVSVITPGTNTSNQVAVLYQDVNCTEVPVAIHADQLTPTWRVYSTGSNVFQTRAGCLIGAEHVNNSYECDIPIGAGICASYQTQTNSPRRARSVASQSIIAYTMSLGAENSVAYSNNSIAIPTNFTISVTTEILPVSMTKTSVDCTMYICGDSTECSNLLLQYGSFCTQLNRALTGIAVEQDKNTQEVFAQVKQIYKTPPIKDFGGFNFSQILPDPSKPSKRSFIEDLLFNKVTLADAGFIKQYGDCLGDIAARDLICAQKFNGLTVLPPLLTDEMIAQYCSALLAGTITSGWTFGAGAALQIPFAMQMAYRFNGIGVTQNVLYENQKLIANQFNSAIGKIQDSLSSTASALGKLQDVVNQNAQALNTLVKQLSSNFGAISSVLNDILSRLDKVEAEVQIDRLITGRLQSLQTYVTQQLIRAAEIRASANLAATKMSECVLGQSKRVDFCGKGYHLMSFPQCAPHGVVFLHVTYVPAQEKNFTTAPAICHDGKAHFPREGVFVSNGTHWFVTQRNFYEPQIITTDNTFVSGNCDVVIGIVNNTVYDPLQPELDSGGSGYIPEAPRDGQAYVRKDGEWVLLSTFL

SEQ ID NO: 10609 - protein, 1177 aa, Artificial Sequence
  SARS-CoV-2/Hong Kong/case85_VM20002868/2020__EPI_ISL_414519 spike protein (1-1147)(T874C_S1055C) Foldon construct
MFVFLVLVPLVSSQCVNLTTRTQLPPAYTNSFTRGVYYPDKVFRSSVLHSTQDLFLPFFSNVTWFHAIHVSGTNGTKRFDNPVLPFNDGVYFASTEKSNIIRGWIFGTTLDSKTQSLLIVNNATNVVIKVCEFQFCNDPFLGVYYHKNNKSWMESEFRVYSSANNCTFEYVSQPFLMDLEGKQGNFKNLREFVFKNIDGYFKIYSKHTPINLVRDLPQGFSALEPLVDLPIGINITRFQTLLALHRSYLTPGDSSSGWTAGAAAYYVGYLQPRTFLLKYNENGTITDAVDCALDPLSETKCTLKSFTVEKGIYQTSNFRVQPTESIVRFPNITNLCPFGEVFNATRFASVYAWNRKRISNCVADYSVLYNSASFSTFKCYGVSPTKLNDLCFTNVYADSFVIRGDEVRQIAPGQTGKIADYNYKLPDDFTGCVIAWNSNNLDSKVGGNYNYLYRLFRKSNLKPFERDISTEIYQAGSTPCNGVEGFNCYFPLQSYGFQPTNGVGYQPYRVVVLSFELLHAPATVCGPKKSTNLVKNKCVNFNFNGLTGTGVLTESNKKFLPFQQFGRDIADTTDAVRDPQTLEILDITPCSFGGVSVITPGTNTSNQVAVLYQDVNCTEVPVAIHADQLTPTWRVYSTGSNVFQTRAGCLIGAEHVNNSYECDIPIGAGICASYQTQTNSPRRARSVASQSIIAYTMSLGAENSVAYSNNSIAIPTNFTISVTTEILPVSMTKTSVDCTMYICGDSTECSNLLLQYGSFCTQLNRALTGIAVEQDKNTQEVFAQVKQIYKTPPIKDFGGFNFSQILPDPSKPSKRSFIEDLLFNKVTLADAGFIKQYGDCLGDIAARDLICAQKFNGLTVLPPLLTDEMIAQYCSALLAGTITSGWTFGAGAALQIPFAMQMAYRFNGIGVTQNVLYENQKLIANQFNSAIGKIQDSLSSTASALGKLQDVVNQNAQALNTLVKQLSSNFGAISSVLNDILSRLDKVEAEVQIDRLITGRLQSLQTYVTQQLIRAAEIRASANLAATKMSECVLGQSKRVDFCGKGYHLMSFPQCAPHGVVFLHVTYVPAQEKNFTTAPAICHDGKAHFPREGVFVSNGTHWFVTQRNFYEPQIITTDNTFVSGNCDVVIGIVNNTVYDPLQPELDSGGSGYIPEAPRDGQAYVRKDGEWVLLSTFL

SEQ ID NO: 10610 - protein, 1177 aa, Artificial Sequence; identical to SEQ ID NO: 10600
  SARS-CoV-2/England/200990660/2020__EPI_ISL_414523 spike protein (1-1147)(T874C_S1055C) Foldon construct

SEQ ID NO: 10611 - protein, 1177 aa, Artificial Sequence
  SARS-CoV-2/Australia/NSW09/2020__EPI_ISL_413595 spike protein (1-1147)(T874C_S1055C) Foldon construct
MFVFLVLLPLVSSQCVNLTTRTQLPPAYTNSFTRGVYYPDKVFRSSVLHSTQDLFLPFFSNVTWFHAIHVSGTNGTKRFDNPVLPFNDGVYFASTEKSNIIRGWIFGTTLDSKTQSLLIVNNATNVVIKVCEFQFCNDPFLGVYYHKNNKSWMESEFRVYSSANNCTFEYVSQPFLMDLEGKQGNFKNLREFVFKNIDGYFKIYSKHTPINLVRDLPQGFSALEPLVDLPIGINITRFQTLLALHRSYLTPGDSSSGWTAGAAAYYVGYLQPRTFLLKYNENGTITDAVDCALDPLSETKCTLKSFTVEKGIYQTSNFRVQPTESIVRFPNITNLCPFGEVFNATRFASVYAWNRKRISNCVADYSVLYNSASFSTFKCYGVSPTKLNDLCFTNVYADSFVIRGDEVRQIAPGQTGKIADYNYKLPDDFTGCVIAWNSNNLDSKVGGNYNYLYRLFRKSNLKPFERDISTEIYQAGSTPCNGVEGFNCYFPLQSYGFQPTNGVGYQPYRVVVLSFELLHAPATVCGPKKSTNLVKNKCVNFNFNGLTGTGVLTESNKKFLPFQQFGRDIADTTDAVRDPQTLEILDITPCSFGGVSVITPGTNTSNQVAVLYQDVNCTEVPVAIHADQLTPTWRVYSTGSNVFQTRAGCLIGAEHVNNSYECDIPIGAGICASYQTQTNSPRRARSVASQSIIAYTMSLGAENSVAYSNNSIAIPTNFTISVTTEILPVSMTKTSVDCTMYICGDSTECSNLLLQYGSFCTQLNRALTGIAVEQDKNTQEVFAQVKQIYKTPPIKDFGGFNFSQILPDPSKPSKRSFIEDLLFNKVTLADAGFIKQYGDCLGDIAARDLICAQKFNGLTVLPPLLTDEMIAQYCSALLAGTITSGWTFGAGAALQIPFAMQMAYRFNGIGVTQNVLYENQKLIANQFNSAIGKIQDSLSFTASALGKLQDVVNQNAQALNTLVKQLSSNFGAISSVLNDILSRLDKVEAEVQIDRLITGRLQSLQTYVTQQLIRAAEIRASANLAATKMSECVLGQSKRVDFCGKGYHLMSFPQCAPHGVVFLHVTYVPAQEKNFTTAPAICHDGKAHFPREGVFVSNGTHWFVTQRNFYEPQIITTDNTFVSGNCDVVIGIVNNTVYDPLQPELDSGGSGYIPEAPRDGQAYVRKDGEWVLLSTFL

SEQ ID NO: 10612 - protein, 1177 aa, Artificial Sequence; identical to SEQ ID NO: 10592
  SARS-CoV-2/Australia/NSW10/2020__EPI_ISL_413596 spike protein (1-1147)(T874C_S1055C) Foldon construct

SEQ ID NO: 10613 - protein, 1177 aa, Artificial Sequence
  SARS-CoV-2/Switzerland/1000477797/2020__EPI_ISL_413023 spike protein (1-1147)(T874C_S1055C) Foldon construct
MFVFLVLLPLVSSQCVNLTTRTQLPPAYTNSFTRGVYYPDKVFRSSVLHSTQDLFLPFFSNVTWFHAIHVSGTNGTKRFDNPVLPFNDGVYFASTEKSNIIRGWIFGTTLDSKTQSLLIVNNATNVVIKVCEFQFCNDPFLGVYYHKNNKSWMESEFRVYSSANNCTFEYVSQPFLMDLEGKQGNFKNLREFVFKNIDGYFNIYSKHTPINLVRDLPQGFSALEPLVDLPIGINITRFQTLLALHRSYLTPGDSSSGWTAGAAAYYVGYLQPRTFLLKYNENGTITDAVDCALDPLSETKCTLKSFTVEKGIYQTSNFRVQPTESIVRFPNITNLCPFGEVFNATRFASVYAWNRKRISNCVADYSVLYNSASFSTFKCYGVSPTKLNDLCFTNVYADSFVIRGDEVRQIAPGQTGKIADYNYKLPDDFTGCVIAWNSNNLDSKVGGNYNYLYRLFRKSNLKPFERDISTEIYQAGSTPCNGVEGFNCYFPLQSYGFQPTNGVGYQPYRVVVLSFELLHAPATVCGPKKSTNLVKNKCVNFNFNGLTGTGVLTESNKKFLPFQQFGRDIADTTDAVRDPQTLEILDITPCSFGGVSVITPGTNTSNQVAVLYQGVNCTEVPVAIHADQLTPTWRVYSTGSNVFQTRAGCLIGAEHVNNSYECDIPIGAGICASYQTQTNSPRRARSVASQSIIAYTMSLGAENSVAYSNNSIAIPTNFTISVTTEILPVSMTKTSVDCTMYICGDSTECSNLLLQYGSFCTQLNRALTGIAVEQDKNTQEVFAQVKQIYKTPPIKDFGGFNFSQILPDPSKPSKRSFIEDLLFNKVTLADAGFIKQYGDCLGDIAARDLICAQKFNGLTVLPPLLTDEMIAQYCSALLAGTITSGWTFGAGAALQIPFAMQMAYRFNGIGVTQNVLYENQKLIANQFNSAIGKIQDSLSSTASALGKLQDVVNQNAQALNTLVKQLSSNFGAISSVLNDILSRLDKVEAEVQIDRLITGRLQSLQTYVTQQLIRAAEIRASANLAATKMSECVLGQSKRVDFCGKGYHLMSFPQCAPHGVVFLHVTYVPAQEKNFTTAPAICHDGKAHFPREGVFVSNGTHWFVTQRNFYEPQIITTDNTFVSGNCDVVIGIVNNTVYDPLQPELDSGGSGYIPEAPRDGQAYVRKDGEWVLLSTFL

SEQ ID NO: 10614 - protein, 1177 aa, Artificial Sequence
  SARS-CoV-2/Belgium/BA-02291/2020__EPI_ISL_415159 spike protein (1-1147)(T874C_S1055C) Foldon construct
MFVFLVLLPLVSSQCVNLTTRTQLPPAYTNSFTRGVYYPDKVFRSSVLHSTQDLFLPFFSNVTWFHAIHVSGTNGTKRFDNPVLPFNDGVYFASTEKSNIIRGWIFGTTLDSKTQSLLIVNNATNVVIKVCEFQFCNDPFLGVYYHKNNKSWMESEFRVYSSANNCTFEYVSQPFLMDLEGKQGNFKNLREFVFKNIDGYFKIYSKHTPINLVRDLPQGFSALEPLVDLPIGINITRFQTLLALHRSYLTPGDSSSGWTAGAAAYYVGYLQPRTFLLKYNENGTITDAVDCALDPLSETKCTLKSFTVEKGIYQTSNFRVQPTESIVRFPNITNLCPFGEVFNATRFASVYAWNRKRISNCVADYSVLYNSASFSTFKCYGVSPTKLNDLCFTNVYADSFVIRGDEVRQIAPGQTGKIADYNYKLPDDFTGCVIAWNSNNLDSKVGGNYNYLYRLFRRSNLKPFERDISTEIYQAGSTPCNGVEGFNCYFPLQSYGFQPTNGVGYQPYRVVVLSFELLPAPATVCGPKKSTNLVKNKCVNFNFNGLTGTGVLTESNKKFLPFQQFGRDIADTTDAVRDPQTLEILDITPCSFGGVSVITPGTNTSNQVAVLYQGVNCTEVPVAIHADQLTPTWRVYSTGSNVFQTRAGCLIGAEHVNNSYECDIPIGAGICASYQTQTNSPRRARSVASQSIIAYTMSLGAENSVAYSNNSIAIPTNFTISVTTEILPVSMTKTSVDCTMYICGDSTECSNLLLQYGSFCTQLNRALTGIAVEQDKNTQEVFAQVKQIYKTPPIKDFGGFNFSQILPDPSKPSKRSFIEDLLFNKVTLADAGFIKQYGDCLGDIAARDLICAQKFNGLTVLPPLLTDEMIAQYCSALLAGTITSGWTFGAGAALQIPFAMQMAYRFNGIGVTQNVLYENQKLIANQFNSAIGKIQDSLSSAAPALGKLQDVVNQNAQALNTLVKQLSSNFGAISSVLNDILSRLDKVEAEVQIDRLITGRLQSLQTYVTQQLIRAAEIRASANLAATKMSECVLGQSKRVDFCGKGYHLMSFPQCAPHGVVFLHVTYVPAQEKNFTTAPAICHDGKAHFPREGVFVSNGTHWFVTQRNFYEPQIITTDNTFVSGNCDVVIGIVNNTVYDPLQPELDSGGSGYIPEAPRDGQAYVRKDGEWVLLSTFL

SEQ ID NO: 10615 - protein, 1177 aa, Artificial Sequence
  SARS-CoV-2/USA/WA8-UW5/2020__EPI_ISL_413486 spike protein (1-1147)(T874C_S1055C) Foldon construct
MFVFLVLLPLVSSQCVNLTTRTQLPPAYTNSFTRGVYYPDKVFRSSVLHSTQDLFLPFFSNVTWFHAIHVSGTNGTKRFDNPVLPFNDGVYFASTEKSNIIRGWIFGTTLDSKTQSLLIVNNATNVVIKVCEFQFCNDPFLGVYYHKNNKSWMESEFRVYSSANNCTFEYVSQPFLMDLEGKQGNFKNLREFVFKNIDGYFKIYSKHTPINLVRDLPQGFSALEPLVDLPIGINITRFQTLLALHRSYLTPGDSSSGWTAGAAAYYVGYLQPRTFLLKYNENGTITDAVDCALDPLSETKCTLKSFTVEKGIYQTSNFRVQPTESIVRFPNITNLCPFGEVFNATRFASVYAWNRKRISNCVADYSVLYNSASFSTFKCYGVSPTKLNDLCFTNVYADSFVIRGDEVRQIAPGQTGKIADYNYKLPDDFTGCVIAWNSNNLDSKVGGNYNYLYRLFRKSNLKPFERDISTEIYQAGSTPCNGVEGFNCYFPLQSYGFQPTNGVGYQPYRVVVLSFELLHAPATVCGPKKSTNLVKNKCVNFNFNGLTGTGVLTESNKKFLPFQQFGRDIADTTDAVRDPQTLEILDITPCSFGGVSVITPGTNTSNQVAVLYQDVNCTEVPVAIHADQLTPTWRVYSTGSNVFQTRAGCLIGAEYVNNSYECDIPIGAGICASYQTQTNSPRRARSVASQSIIAYTMSLGAENSVAYSNNSIAIPTNFTISVTTEILPVSMTKTSVDCTMYICGDSTECSNLLLQYGSFCTQLNRALTGIAVEQDKNTQEVFAQVKQIYKTPPIKDFGGFNFSQILPDPSKPSKRSFIEDLLFNKVTLADAGFIKQYGDCLGDIAARDLICAQKFNGLTVLPPLLTDEMIAQYCSALLAGTITSGWTFGAGAALQIPFAMQMAYRFNGIGVTQNVLYENQKLIANQFNSAIGKIQDSLSSTASALGKLQDVVNQNAQALNTLVKQLSSNFGAISSVLNDILSRLDKVEAEVQIDRLITGRLQSLQTYVTQQLIRAAEIRASANLAATKMSECVLGQSKRVDFCGKGYHLMSFPQCAPHGVVFLHVTYVPAQEKNFTTAPAICHDGKAHFPREGVFVSNGTHWFVTQRNFYEPQIITTDNTFVSGNCDVVIGIVNNTVYDPLQPELDSGGSGYIPEAPRDGQAYVRKDGEWVLLSTFL

SEQ ID NO: 10616 - protein, 1177 aa, Artificial Sequence
  SARS-CoV-2/England/20102000506/2020__EPI_ISL_415147 spike protein (1-1147)(T874C_S1055C) Foldon construct
MFVFLVLLPLVSSQCVNLTTRTQLPPAYTNSFTRGVYYPDKVFRSSVLHSTQDLFLPFFSNVTWFHAIHVSGTNGTKRFDNPVLPFNDGVYFASTEKSNIIRGWIFGTTLDSKTQSLLIVNNATNVVIKVCEFQFCNDPFLGVYYHKNNKSWMESEFRVYSSANNCTFEYVSQPFLMDLEGKQGNFKNLREFVFKNIDGYFKIYSKHTPINLVRDLPQGFSALEPLVDLPIGINITRFQTLLALHRSYLTPGDSSSGWTAGAAAYYVGYLQPRTFLLKYNENGTITDAVDCALDPLSETKCTLKSFTVEKGIYQTSNFRVQPTESIVRFPNITNLCPFGEVFNATRFASVYAWNRKRISNCVADYSVLYNSASFSTFKCYGVSPTKLNDLCFTNVYADSFVIRGDEVRQIAPGQTGKIADYNYKLPDDFTGCVIAWNSNNLDSKVGGNYNYLYRLFRKSNLKPFERDISTEIYQAGSTPCNGVEGFNCYFPLQSYGFQPTNGVGYQPYRVVVLSFELLHAPATVCGPKKSTNLVKNKCVNFNFNGLTGTGVLTESNKKFLPFQQFGRDIADTTDAVRDPQTLEILDITPCSFGGVSVITPGTNTSNQVAVLYQGVNCTEVPVAIHADQLTPTWRVYSTGSNVFQTRAGCLIGAEHVNNSYECDIPIGAGICASYQTQTNSPRRARSVASQSIIAYTMSLGAENSVAYSNNSIAIPTNFTISVTTEILPVSMTKTSVDCTMYICGDSTECSNLLLQYGSFCTQLNRALTGIAVEQDKNTQEVFAQVKQIYKTPPIKDFGGFNFSQILPDPSKPSKRSFIEDLLFNKVTLADAGFIKQYGYCLGDIAARDLICAQKFNGLTVLPPLLTDEMIAQYCSALLAGTITSGWTFGAGAALQIPFAMQMAYRFNGIGVTQNVLYENQKLIANQFNSAIGKIQDSLSSTASALGKLQDVVNQNAQALNTLVKQLSSNFGAISSVLNDILSRLDKVEAEVQIDRLITGRLQSLQTYVTQQLIRAAEIRASANLAATKMSECVLGQSKRVDFCGKGYHLMSFPQCAPHGVVFLHVTYVPAQEKNFTTAPAICHDGKAHFPREGVFVSNGTHWFVTQRNFYEPQIITTDNTFVSGNCDVVIGIVNNTVYDPLQPELDSGGSGYIPEAPRDGQAYVRKDGEWVLLSTFL

SEQ ID NO: 10617 - protein, 1177 aa, Artificial Sequence
  SARS-CoV-2/Belgium/VAG-03013/2020__EPI_ISL_415155 spike protein (1-1147)(T874C_S1055C) Foldon construct
MFVFLVLLPLVSSQCVNLTTRTQLPPAYTNSFTRGVYYPDKVFRSSVLHSTQDLFLPFFSNVTWFHAIHVSGTNGTKRFDNPVLPFNDGVYFASTEKSNIIRGWIFGTTLDSKTQSLLIVNNATNVVIKVCEFQFCNDPFLGVYYHKNNKSWMESEFRVYSSANNCTFEYVSQPFLMDLEGKQGNFKNLREFVFKNIDGYFKIYSKHTPINLVRDLPQGFSALEPLVDLPIGINITRFQTLLALHRSYLTPGDSSSGWTAGAAAYYVGYLQPRTFLLKYNENGTITDAVDCALDPLSETKCTLKSFTVEKGIYQTSNFRVQPTESIVRFPNITNLCPFGEVFNATRFASVYAWNRKRISNCVADYSVLYNSASFSTFKCYGVSPTKLNDLCFTNVYADSFVIRGDEVRQIAPGQTGKIADYNYKLPDDFTGCVIAWNSNNLDSKVGGNYNYLYRLFRKSNLKPFERDISTEIYQAGSTPCNGVEGFNCYFPLQSYGFQPTNGVGYQPYRVVVLSFELLHAPATVCGPKKSTNLVKNKCVNFNFNGLTGTGVLTESNKKFLPFQQFGRDIADTTDAVRDPQTLEILDITPCSFGGVSVITPGTNTSNQVAVLYQGVNCTEVPVAIHADQLTPTWRVYSTGSNVFQTRAGCLIGAEHVNNSYECDIPIGAGICASYQTQTNSPRRARSVASQSIIAYTMSLGAENSVAYSNNSIAIPTNFTISVTTEILPVSMTKTSVDCTMYICGDSTECSNLLLQYGSFCTQLNRALTGIAVEQDKNTQEVFAQVKQIYKTPPIKDFGGFNFSQILPDPSKPSKRSFIEDLLFNKVTLADAGFIKQYGDCLGDIAARDLICAQKFNGLTVLPPLLTDEMIAQYCSALLAGTITSGWTFGAGAALQIPFAMQMAYRFNGIGVTQNVLYENQKLIANQFNSAIGKIQDSLSSTATALGKLQDVVNQNAQALNTLVKQLSSNFGAISSVLNDILSRLDKVEAEVQIDRLITGRLQSLQTYVTQQLIRAAEIRASANLAATKMSECVLGQSKRVDFCGKGYHLMSFPQCAPHGVVFLHVTYVPAQEKNFTTAPAICHDGKAHFPREGVFVSNGTHWFVTQRNFYEPQIITTDNTFVSGNCDVVIGIVNNTVYDPLQPELDSGGSGYIPEAPRDGQAYVRKDGEWVLLSTFL

SEQ ID NO: 10618 - protein, 1177 aa, Artificial Sequence
  SARS-CoV-2/Belgium/BC-03016/2020__EPI_ISL_415157 spike protein (1-1147)(T874C_S1055C) Foldon construct
MFVFLVLLPLVSSQCVNLTTRTQLPPAYTNSFTRGVYYPDKVFRSSVLHSTQDLFLPFFSNVTWFHAIHVSGTNGTKRFDNPVLPFNDGVYFASTEKSNIIRGWIFGTTLDSKTQSLLIVNNATNVVIKVCEFQFCNDPFLGVYYHKNNKSWMESEFRVYSSANNCTFEYVSQPFLMDLEGKQGNFKNLREFVFKNIDGYFKIYSKHTPINLVRDLPQGFSALEPLVDLPIGINITRFQTLLALHRSYLTPGDSSSGWTAGAAAYYVGYLQPRTFLLKYNENGTITDAVDCALDPLSETKCTLKSFTVEKGIYQTSNFRVQPTESIVRFPNITNLCPFGEVFNATRFASVYAWNRKRISNCVADYSVLYNSASFSTFKCYGVSPTKLNDLCFTNVYADSFVIRGDEVRQIAPGQTGKIADYNYKLPDDFTGCVIAWNSNNLDSKVGGNYNYLYRLFRKSNLKPFERDISTEIYQAGSTPCNGVEGFNCYFPLQSYGFQPTNGVGYQPYRVVVLSFELLHAPATVCGPKKSTNLVKNKCVNFNFNGLTGTGVLTESNKKFLPFQQFGRDIADTTDAVRDPQTLEILDITPCSFGGVSVITPGTNTSNQVAVLYQGVNCTEVPVAIHADQLTPTWRVYSTGSNVFQTRAGCLIGAEHVNNSYECDIPIGAGICASYQTQTNSPRRARSVASQSIIAYTMSLGAENSVAYSNNSIAIPTNFTISVTTEILPVSMTKTSVDCTMYICGDSTECSNLLLQYGSFCTQLNRALTGIAVEQDKNTQEVFAQVKQIYKTPPIKDFGGFNFSQILPDPSKPSKRSFIEDLLFNKVTLADAGFIKQYGDCLGDIAARDLICAQKFNGLTVLPPLLTDEMIAQYCSALLAGTITSGWTFGAGAALQIPFAMQMAYRFNGIGVTQNVLYENQKLIANQFNSAIGKIQDSLSSTAPALGKLQDVVNQNAQALNTLVKQLSSNFGAISSVLNDILSRLDKVEAEVQIDRLITGRLQSLQTYVTQQLIRAAEIRASANLAATKMSECVLGQSKRVDFCGKGYHLMSFPQCAPHGVVFLHVTYVPAQEKNFTTAPAICHDGKAHFPREGVFVSNGTHWFVTQRNFYEPQIITTDNTFVSGNCDVVIGIVNNTVYDPLQPELDSGGSGYIPEAPRDGQAYVRKDGEWVLLSTFL

SEQ ID NO: 10619 - protein, 1177 aa, Artificial Sequence
  SARS-CoV-2/Germany/BavPat3/2020__EPI_ISL_414521 spike protein (1-1147)(T874C_S1055C) Foldon construct
MFVFLVLLPLVSSQCVNLTTRTQLPPAYTNSFTRGVYYPDKVFRSSVLHSTQDLFLPFFSNVTWFHAIHVSGTNGTKRFDNPVLPFNDGVYFASTEKSNIIRGWIFGTTLDSKTQSLLIVNNATNVVIKVCEFQFCNDPFLGVYYHKNNKSWMESEFRVYSSANNCTFEYVSQPFLMDLEGKQGNFKNLREFVFKNIDGYFKIYSKHTPINLVRDLPQGFSALEPLVDLPIGINITRFQTLLALHRSYLTPGDSSSGWTAGAAAYYVGYLQPRTFLLKYNENGTITDAVDCALDPLSETKCTLKSFTVEKGIYQTSNFRVQPTESIVRFPNITNLCPFGEVFNATRFASVYAWNRKRISNCVADYSVLYNSASFSTFKCYGVSPTKLNDLCFTNVYADSFVIRGDEVRQIAPGQTGKIADYNYKLPDDFTGCVIAWNSNNLDSKVGGNYNYLYRLFRKSNLKPFERDISTEIYQAGSTPCNGVEGFNCYFPLQSYGFQPTNGVGYQPYRVVVLSFELLHAPATVCGPKKSTNLVKNKCVNFNFNGLTGTGVLTESNKKFLPFQQFGRDIADTTDAVRDPQTLEILDITPCSFGGVSVITPGTNTSNQVAVLYQDVNCTEVPVAIHADQLTPTWRVYSTGSNVFQTRAGCLIGAEHVNNSYECDIPIGAGICASYQTQTNSPRRARSVASQSIIAYTMSLGAENSVAYSNNSIAIPTNFTISVTTEILPVSMTKTSVDCTMYICGDSTECSNLLLQYGSFCTQLNRALTGIAVEQDKNTQQVFAQVKQIYKTPPIKDFGGFNFSQILPDPSKPSKRSFIEDLLFNKVTLADAGFIKQYGDCLGDIAARDLICAQKFNGLTVLPPLLTDEMIAQYCSALLAGTITSGWTFGAGAALQIPFAMQMAYRFNGIGVTQNVLYENQKLIANQFNSAIGKIQDSLSSTASALGKLQDVVNQNAQALNTLVKQLSSNFGAISSVLNDILSRLDKVEAEVQIDRLITGRLQSLQTYVTQQLIRAAEIRASANLAATKMSECVLGQSKRVDFCGKGYHLMSFPQCAPHGVVFLHVTYVPAQEKNFTTAPAICHDGKAHFPREGVFVSNGTHWFVTQRNFYEPQIITTDNTFVSGNCDVVIGIVNNTVYDPLQPELDSGGSGYIPEAPRDGQAYVRKDGEWVLLSTFL

SEQ ID NO: 10620 - protein, 1177 aa, Artificial Sequence
  SARS-CoV-2/France/HF1805/2020__EPI_ISL_414628 spike protein (1-1147)(T874C_S1055C) Foldon construct
MFVFLVLLPLVSSQCVNLTTRTQLPPAYTNSFTRGVYYPDKVFRSSVLHSTQDLFLPFFSNVTWFHAIHVSGTNGTKRFDNPVLPFNDGVYFASTEKSNIIRGWIFGTTLDSKTQSLLIVNNATNVVIKVCEFQFCNDPFLGVYYHKNNKSWMESEFRVYSSANNCTFEYVSQPFLMDLEGKQGNFKNLREFVFKNIDGYFKIYSKHTPINLVRDLPQGFSALEPLVDLPIGINITRFQTLLALHRSYLTPGDSSSGWTAGAAAYYVGYLQPRTFLLKYNENGTITDAVDCALDPLSETKCTLKSFTVEKGIYQTSNFRVQPTESIVRFPNITNLCPFGEVFNATRFASVYAWNRKRISNCVADYSVLYNSASFSTFKCYGVSPTKLNDLCFTNVYADSFVIRGDEVRQIAPGQTGKIADYNYKLPDDFTGCVIAWNSNNLDSKVGGNYNYLYRLFRKSNLKPFERDISTEIYQAGSTPCNGVEGFNCYFPLQSYGFQPTNGVGYQPYRVVVLSFELLHAPATVCGPKKSTNLVKNKCVNFNFNGLTGTGVLTESNKKFLPFQQFGRDIADTTDAVRDPQTLEILDITPCSFGGVSVITPGTNTSNQVAVLYQGVNCTEVPVAIHADQLTPTWRVYSTGSNVFQTRAGCLIGAEHVNNSYECDIPIGAGICASYQTQTNSPRRARSVASQSIIAYTMSLGAENSVAYSNNSIAIPTNFTISVTTEILPVSMTKTSVDCTMYICGDSTECSNLLLQYGSFCTQLNRALTGIAVEQDKNTQEVFAQVKQIYKTPPIKDFGGFNFSQILPDPSKPSKRSFIEDLLFNKVTLADAGFIKQYGDCLGDIAARDLICAQKFNGLTVLPPLLTDEMIAQYCSALLAGTITSGWTFGAGAALQIPFAMQMAYRFNGIGVTQNVLYENQKLIANQFNSAIGKIQDSLSSTASALGKLQDVVNQNAQALNTLVKQLSSNFGAISSVLNDILSRLDKVEAEVQIDRLITGRLQSLQTYVTQQLIRAAEIRASANLAATKMSECVLGQSKRVDFCGKGYHLMSFPQCAPHGVVFLHVTYVPAQEKNFTTAPAICHDGKAHFPREGVFVSNGTHWFVTQRNFYEPQIITTDNTFVSGNCDVVIGVVNNTVYDPLQPELDSGGSGYIPEAPRDGQAYVRKDGEWVLLSTFL

SEQ ID NO: 10621 - protein, 1177 aa, Artificial Sequence
  SARS-CoV-2/Netherlands/ZuidHolland_9/2020__EPI_ISL_414445 spike protein (1-1147)(T874C_S1055C) Foldon construct
MFVFLVLLPLVSSQCVNLTTRTQLPPAYTNSFTRGVYYPDKVFRSSVLHSTQDLFLPFFSNVTWFHAIHVSGTNGTKRFDNPVLPFNDGVYFASTEKSNIIRGWIFGTTLDSKTQSLLIVNNATNVVIKVCEFQFCNDPFLGVYYHKNNKSWMESEFRVYSSANNCTFEYVSQPFLMDLEGKQGNFKNLREFVFKNIDGYFKIYSKHTPINLVRDLPQGFSALEPLVDLPIGINITRFQTLLALHRSYLTPGDSSSGWTAGAAAYYVGYLQPRTFLLKYNENGTITDAVDCALDPLSETKCTLKSFTVEKGIYQTSNFRVQPTESIVRFPNITNLCPFGEVFNATRFASVYAWNRKRISNCVADYSVLYNSASFSTFKCYGVSPTKLNDLCFTNVYADSFVIRGDEVRQIAPGQTGKIADYNYKLPDDFTGCVIAWNSNNLDSKVGGNYNYLYRLFRKSNLKPFERDISTEIYQAGSTPCNGVEGFNCYFPLQSYGFQPTNGVGYQPYRVVVLSFELLHAPATVCGPKKSTNLVKNKCVNFNFNGLTGTGVLTESNKKFLPFQQFGRDIADTTDAVRDPQTLEILDITPCSFGGVSVITPGTNTSNQVAVLYQGVNCTEVPVAIHADQLTPTWRVYSTGSNVFQTRAGCLIGAEHVNNSYECDIPIGAGICASYQTQTNSPRRARSVASQSIIAYTMSLGAENSVAYSNNSIAIPTNFTISVTTEILPVSMTKTSVDCTMYICGDSTECSNLLLQYGSFCTQLNRALTGIAVEQDKNTQEVFAQVKQIYKTPPIKDFGGFNFSQILPDPSKPSKRSFIEDLLFNKVTLADAGFIKQYGDCLGDIAARDLICVQKFNGLTVLPPLLTDEMIAQYCSALLAGTITSGWTFGAGAALQIPFAMQMAYRFNGIGVTQNVLYENQKLIANQFNSAIGKIQDSLSSTASALGKLQDVVNQNAQALNTLVKQLSSNFGAISSVLNDILSRLDKVEAEVQIDRLITGRLQSLQTYVTQQLIRAAEIRASANLAATKMSECVLGQSKRVDFCGKGYHLMSFPQCAPHGVVFLHVTYVPAQEKNFTTAPAICHDGKAHFPREGVFVSNGTHWFVTQRNFYEPQIITTDNTFVSGNCDVVIGIVNNTVYDPLQPELDSGGSGYIPEAPRDGQAYVRKDGEWVLLSTFL

SEQ ID NO: 10622 - protein, 1177 aa, Artificial Sequence
  SARS-CoV-2/Finland/FIN03032020A/2020__EPI_ISL_413602 spike protein (1-1147)(T874C_S1055C) Foldon construct
MFVFLVLLPLVSSQCVNLTTRTQLPPAYTNSFTRGVYYPDKVFRSSVLHSTQDLFLPFFSNVTWFHAIHVSGTNGTKRFDNPVLPFNDGVYFASTEKSNIIRGWIFGTTLDSKTQSLLIVNNATNVVIKVCEFQFCNDPFLGVYYHKNNKSWMESEFRVYSSANNCTFEYVSQPFLMDLEGKQGNFKNLREFVFKNIDGYFKIYSKHTPINLVRDLPQGFSALEPLVDLPIGINITRFQTLLALHRSYLTPGDSSSGWTAGAAAYYVGYLQPRTFLLKYNENGTITDAVDCALDPLSETKCTLKSFTVEKGIYQTSNFRVQPTESIVRFPNITNLCPFGEVFNATRFASVYAWNRKRISNCVADYSVLYNSASFSTFKCYGVSPTKLNDLCFTNVYADSFVIRGDEVRQIAPGQTGKIADYNYKLPDDFTGCVISWNSNNLDSKVGGNYNYLYRLFRKSNLKPFERDISTEIYQAGSTPCNGVEGFNCYFPLQSYGFQPTNGVGYQPYRVVVLSFELLHAPATVCGPKKSTNLVKNKCVNFNFNGLTGTGVLTESNKKFLPFQQFGRDIADTTDAVRDPQTLEILDITPCSFGGVSVITPGTNTSNQVAVLYQGVNCTEVPVAIHADQLTPTWRVYSTGSNVFQTRAGCLIGAEHVNNSYECDIPIGAGICASYQTQTNSPRRARSVASQSIIAYTMSLGAENSVAYSNNSIAIPTNFTISVTTEILPVSMTKTSVDCTMYICGDSTECSNLLLQYGSFCTQLNRALTGIAVEQDKNTQEVFAQVKQIYKTPPIKDFGGFNFSQILPDPSKPSKRSFIEDLLFNKVTLADAGFIKQYGDCLGDIAARDLICAQKFNGLTVLPPLLTDEMIAQYCSALLAGTITSGWTFGAGAALQIPFAMQMAYRFNGIGVTQNVLYENQKLIANQFNSAIGKIQDSLSSTASALGKLQDVVNQNAQALNTLVKQLSSNFGAISSVLNDILSRLDKVEAEVQIDRLITGRLQSLQTYVTQQLIRAAEIRASANLAATKMSECVLGQSKRVDFCGKGYHLMSFPQCAPHGVVFLHVTYVPAQEKNFTTAPAICHDGKAHFPREGVFVSNGTHWFVTQRNFYEPQIITTDNTFVSGNCDVVIGIVNNTVYDPLQPELDSGGSGYIPEAPRDGQAYVRKDGEWVLLSTFL

SEQ ID NO: 10623 - protein, 1177 aa, Artificial Sequence
  SARS-CoV-2/France/GE1977/2020__EPI_ISL_414632 spike protein (1-1147)(T874C_S1055C) Foldon construct
MFVFLVLLPLVSSQCVNLTTRTQLPPAYTNSFTRGVYYPDKVFRSSVLHSTQDLFLPFFSNVTWFHAIHVSGTNGTKRFDNPVLPFNDGVYFASTEKSNIIRGWIFGTTLDSKTQSLLIVNNATNVVIKVCEFQFCNDPFLGVYYHKNNKSWMESEFRVYSSANNCTFEYVSQPFLMDLEGKQGNFKNLREFVFKNIDGYFKIYSKHTPINLVRDLPQGFSALEPLVDLPIGINITRFQTLLALHRSYLTPGDSSSGWTAGAAAYYVGYLQPRTFLLKYNENGTITDAVDCALDPLSETKCTLKSFTVEKGIYQTSNFRVQPTESIVRFPNITNLCPFGEVFNATRFASVYAWNRKRISNCVADYSVLYNSASFSTFKCYGVSPTKLNDLCFTNVYADSFVIRGDEVRQIAPGQTGKIADYNYKLPDDFTGCVIAWNSNNLDSKVGGNYNYLYRLFRKSNLKPFERDISTEIYQAGSTPCNGVEGFNCYFPLQSYGFQPTNGVGYQPYRVVVLSFELLHAPATVCGPKKSTNLVKNKCVNFNFNGLTGTGVLTESNKKFLPFQQFGRDIADTTDAVRDPQTLEILDITPCSFGGVSVITPGTNTSNQVAVLYQGVNCTEVPVAIHADQLTPTWRVYSTGSNVFQTRAGCLIGAEHVNNSYECDIPIGAGICASYQTQTNSPRRARSVASQSIIAYTMSLGAENSVAYSNNSIAIPTNFTISVTTEILPVSMTKTSVDCTMYICGDSTECSNLLLQYGSFCTQLNRALTGIAVEQDKNTQEVFAQVKQIYKTPPIKDFGGFNFSQILPDPSKPSKRSFIEDLLFNKVTLADAGFIKQYGDCLGDIAARDLICAQKFNGLTVLPPLLTDEMIAQYCSALLAGTITSGWTFGAGAALQIPFAMQMAYRFNGIGVTQNVLYENQKLIANQFNSAIGKIQDSLFSTASALGKLQDVVNQNAQALNTLVKQLSSNFGAISSVLNDILSRLDKVEAEVQIDRLITGRLQSLQTYVTQQLIRAAEIRASANLAATKMSECVLGQSKRVDFCGKGYHLMSFPQCAPHGVVFLHVTYVPAQEKNFTTAPAICHDGKAHFPREGVFVSNGTHWFVTQRNFYEPQIITTDNTFVSGNCDVVIGIVNNTVYDPLQPELDSGGSGYIPEAPRDGQAYVRKDGEWVLLSTFL

SEQ ID NO: 10624 - protein, 1177 aa, Artificial Sequence
  SARS-CoV-2/Finland/FIN-313/2020__EPI_ISL_414641 spike protein (1-1147)(T874C_S1055C) Foldon construct
MFVFLVLLPLVSSQCVNLTTRTQLPPAYTNSFTRGVYYPDKVFRSSVLHSTQDLFLPFFSNVTWFHAIHVSGTNGTKRFDNPVLPFNDGVYFASTEKSNIIRGWIFGTTLDSKTQSLLIVNNATNVVIKVCEFQFCNDPFLGVYYHKNNKSWMESEFRVYSSANNCTFEYVSQPFLMDLEGKQGNFKNLREFVFKNIDGYFKIYSKHTPINLVRDLPQGFSALEPLVDLPIGINITRFKTLLALHRSYLTPGDSSSGWTAGAAAYYVGYLQPRTFLLKYNENGTITDAVDCALDPLSETKCTLKSFTVEKGIYQTSNFRVQPTESIVRFPNITNLCPFGEVFNATRFASVYAWNRKRISNCVADYSVLYNSASFSTFKCYGVSPTKLNDLCFTNVYADSFVIRGDEVRQIAPGQTGKIADYNYKLPDDFTGCVIAWNSNNLDSKVGGNYNYLYRLFRKSNLKPFERDISTEIYQAGSTPCNGVEGFNCYFPLQSYGFQPTNGVGYQPYRVVVLSFELLHAPATVCGPKKSTNLVKNKCVNFNFNGLTGTGVLTESNKKFLPFQQFGRDIADTTDAVRDPQTLEILDITPCSFGGVSVITPGTNTSNQVAVLYQGVNCTEVPVAIHADQLTPTWRVYSTGSNVFQTRAGCLIGAEHVNNSYECDIPIGAGICASYQTQTNSPRRARSVASQSIIAYTMSLGAENSVAYSNNSIAIPTNFTISVTTEILPVSMTKTSVDCTMYICGDSTECSNLLLQYGSFCTQLNRALTGIAVEQDKNTQEVFAQVKQIYKTPPIKDFGGFNFSQILPDPSKPSKRSFIEDLLFNKVTLADAGFIKQYGDCLGDIAARDLICAQKFNGLTVLPPLLTDEMIAQYCSALLAGTITSGWTFGAGAALQIPFAMQMAYRFNGIGVTQNVLYENQKLIANQFNSAIGKIQDSLSSTASALGKLQDVVNQNAQALNTLVKQLSSNFGAISSVLNDILSRLDKVEAEVQIDRLITGRLQSLQTYVTQQLIRAAEIRASANLAATKMSECVLGQSKRVDFCGKGYHLMSFPQCAPHGVVFLHVTYVPAQEKNFTTAPAICHDGKAHFPREGVFVSNGTHWFVTQRNFYEPQIITTDNTFVSGNCDVVIGIVNNTVYDPLQPELDSGGSGYIPEAPRDGQAYVRKDGEWVLLSTFL

SEQ ID NO: 10625 - protein, 1177 aa, Artificial Sequence
  SARS-CoV-2/Netherlands/ZuidHolland_2/2020__EPI_ISL_414556 spike protein (1-1147)(T874C_S1055C) Foldon construct
MFVFLVLLPLVSSQCVNLTTRTQLPPAYTNSFTRGVYYPDKVFRSSVLHSTQDLFLPFFSNVTWFHAIHVSGTNGTKRFDNPVLPFNDGVYFASTEKSNIIRGWIFGTTLDSKTQSLLIVNNATNVVIKVCEFQFCNDPFLGVYYHKNNKSWMESEFRVYSSANNCTFEYVSQPFLMDLEGKQGNFKNLREFVFKNIDGYFKIYSKHTPINLVRDLPQGFSALEPLVDLPIGINITRFQTLLALHRSYLTPGDSSSGWTAGAAAYYVGYLQPRTFLLKYNENGTITDAVDCALDPLSETKCTLKSFTVEKGIYQTSNFRVQPTESIVRFPNITNLCPFGEVFNATRFASVYAWNRKRISNCVADYSVLYNSASFSTFKCYGVSPTKLNDLCFTNVYADSFVIRGDEVRQIAPGQTGKIADYNYKLPDDFTGCVIAWNSNNLDSKVGGNYNYLYRLFRKSNLKPFERDISTEIYQAGSTPCNGVEGFNCYFPLQSYGFQPTNGVGYQPYRVVVLSFELLHAPATVCGPKKSTNLVKNKCVNFNFNGLTGTGVLTESNKKFLPFQQFGRDIADTTDAVRDPQTLEILDITPCSFGGVSVITPGTNTSNQVAVLYQGVNCTEVPVAIHADQLTPTWRVYSTGSNVFQTRAGCLIGAEHVNNSYECDIPIGAGICASYQTQTNSPRRARSVASQSIIAYTMSLGAENSVAYSNNSIAIPTNFTISVTTEILPVSMTKTSVDCTMYICGDSTECSNLLLQYGSFCTQLNRALTGIALEQDKNTQEVFAQVKQIYKTPPIKDFGGFNFSQILPDPSKPSKRSFIEDLLFNKVTLADAGFIKQYGDCLGDIAARDLICAQKFNGLTVLPPLLTDEMIAQYCSALLAGTITSGWTFGAGAALQIPFAMQMAYRFNGIGVTQNVLYENQKLIANQFNSAIGKIQDSLSSTASALGKLQDVVNQNAQALNTLVKQLSSNFGAISSVLNDILSRLDKVEAEVQIDRLITGRLQSLQTYVTQQLIRAAEIRASANLAATKMSECVLGQSKRVDFCGKGYHLMSFPQCAPHGVVFLHVTYVPAQEKNFTTAPAICHDGKAHFPREGVFVSNGTHWFVTQRNFYEPQIITTDNTFVSGNCDVVIGIVNNTVYDPLQPELDSGGSGYIPEAPRDGQAYVRKDGEWVLLSTFL

SEQ ID NO: 10626 - protein, 1177 aa, Artificial Sequence
  SARS-CoV-2/USA/WA-UW31/2020__EPI_ISL_414618 spike protein (1-1147)(T874C_S1055C) Foldon construct
MFVFLVLLPLVSSQCVNLTTRTQLPPAYTNSFTRGVYYPDKVFRSSVLHSTQDLFLPFFSNVTWFHAIHVSGTNGTKRFDNPVLPFNDGVYFASTEKSNIIRGWIFGTTLDSKTQSLLIVNNATNVVIKVCEFQFCNDPFLGVYYHKNNKSWMESEFRVYSSANNCTFEYVSQPFLMDLEGKQGNFKNLREFVFKNIDGYFKIYSKHTPINLVRDLPQGFSALEPLVDLPIGINITRFQTLLALHRSYLTPGDSSSGWTAGAAAYYVGYLQPRTFLLKYNENGTITDAVDCALDPLSETKCTLKSFTVEKGIYQTSNFRVQPTESIVRFPNITNLCPFGEVFNATRFASVYAWNRKRISNCVADYSVLYNSASFSTFKCYGVSPTKLNDLCFTNVYADSFVIRGDEVRQIAPGQTGKIADYNYKLPDDFTGCVIAWNSNNLDSKVGGNYNYLYRLFRKSNLKPFERDISTEIYQAGSTPCNGAEGFNCYFPLQSYGFQPTNGVGYQPYRVVVLSFELLHAPATVCGPKKSTNLVKNKCVNFNFNGLTGTGVLTESNKKFLPFQQFGRDIADTTDAVRDPQTLEILDITPCSFGGVSVITPGTNTSNQVAVLYQDVNCTEVPVAIHADQLTPTWRVYSTGSNVFQTRAGCLIGAEHVNNSYECDIPIGAGICASYQTQTNSPRRARSVASQSIIAYTMSLGAENSVAYSNNSIAIPTNFTISVTTEILPVSMTKTSVDCTMYICGDSTECSNLLLQYGSFCTQLNRALTGIAVEQDKNTQEVFAQVKQIYKTPPIKDFGGFNFSQILPDPSKPSKRSFIEDLLFNKVTLADAGFIKQYGDCLGDIAARDLICAQKFNGLTVLPPLLTDEMIAQYCSALLAGTITSGWTFGAGAALQIPFAMQMAYRFNGIGVTQNVLYENQKLIANQFNSAIGKIQDSLSSTASALGKLQDVVNQNAQALNTLVKQLSSNFGAISSVLNDILSRLDKVEAEVQIDRLITGRLQSLQTYVTQQLIRAAEIRASANLAATKMSECVLGQSKRVDFCGKGYHLMSFPQCAPHGVVFLHVTYVPAQEKNFTTAPAICHDGKAHFPREGVFVSNGTHWFVTQRNFYEPQIITTDNTFVSGNCDVVIGIVNNTVYDPLQPELDSGGSGYIPEAPRDGQAYVRKDGEWVLLSTFL

SEQ ID NO: 10627 - protein, 1177 aa, Artificial Sequence
  SARS-CoV-2/South Korea/SNU01/2020__EPI_ISL_411929 spike protein (1-1147)(T874C_S1055C) Foldon construct
MFVFLVLLPLVSSQCVNLTTRTQLPPAYTNSFTRGVYYPDKVFRSSVLHSTQDLFLPFFSNVTWFHAIHVSGTNGTKRFDNPVLPFNDGVYFASTEKSNIIRGWIFGTTLDSKTQSLLIVNNATNVVIKVCEFQFCNDPFLGVYYHKNNKSWMESEFRVYSSANNCTFEYVSQPFLMDLEGKQGNFKNLREFVFKNIDGYFKIYSKHTPINLVRDLPQGFWALEPLVDLPIGINITRFQTLLALHRSYLTPGDSSSGWTAGAAAYYVGYLQPRTFLLKYNENGTITDAVDCALDPLSETKCTLKSFTVEKGIYQTSNFRVQPTESIVRFPNITNLCPFGEVFNATRFASVYAWNRKRISNCVADYSVLYNSASFSTFKCYGVSPTKLNDLCFTNVYADSFVIRGDEVRQIAPGQTGKIADYNYKLPDDFTGCVIAWNSNNLDSKVGGNYNYLYRLFRKSNLKPFERDISTEIYQAGSTPCNGVEGFNCYFPLQSYGFQPTNGVGYQPYRVVVLSFELLHAPATVCGPKKSTNLVKNKCVNFNFNGLTGTGVLTESNKKFLPFQQFGRDIADTTDAVRDPQTLEILDITPCSFGGVSVITPGTNTSNQVAVLYQDVNCTEVPVAIHADQLTPTWRVYSTGSNVFQTRAGCLIGAEHVNNSYECDIPIGAGICASYQTQTNSPRRARSVASQSIIAYTMSLGAENSVAYSNNSIAIPTNFTISVTTEILPVSMTKTSVDCTMYICGDSTECSNLLLQYGSFCTQLNRALTGIAVEQDKNTQEVFAQVKQIYKTPPIKDFGGFNFSQILPDPSKPSKRSFIEDLLFNKVTLADAGFIKQYGDCLGDIAARDLICAQKFNGLTVLPPLLTDEMIAQYCSALLAGTITSGWTFGAGAALQIPFAMQMAYRFNGIGVTQNVLYENQKLIANQFNSAIGKIQDSLSSTASALGKLQDVVNQNAQALNTLVKQLSSNFGAISSVLNDILSRLDKVEAEVQIDRLITGRLQSLQTYVTQQLIRAAEIRASANLAATKMSECVLGQSKRVDFCGKGYHLMSFPQCAPHGVVFLHVTYVPAQEKNFTTAPAICHDGKAHFPREGVFVSNGTHWFVTQRNFYEPQIITTDNTFVSGNCDVVIGIVNNTVYDPLQPELDSGGSGYIPEAPRDGQAYVRKDGEWVLLSTFL

SEQ ID NO: 10628 - protein, 1177 aa, Artificial Sequence
  SARS-CoV-2/China/WF0004/2020__EPI_ISL_413694 spike protein (1-1147)(T874C_S1055C) Foldon construct
MFVFLVLLPLVSSQCVNLTTRTQLPPAYTNSFTRGVYYPDKVFRSSVLHSTQDLFLPFFSNVTWFHAIHVSGTNGTKRFDNPVLPFNDGVYFASTEKSNIIRGWIFGTTLDSKTQSLLIVNNATNVVIKVCEFQFCNDPFLGVYYHKNNKSWTESEFRVYSSANNCTFEYVSQPFLMDLEGKQGNFKNLREFVFKNIDGYFKIYSKHTPINLVRDLPQGFSALEPLVDLPIGINITRFQTLLALHRSYLTPGDSSSGWTAGAAAYYVGYLQPRTFLLKYNENGTITDAVDCALDPLSETKCTLKSFTVEKGIYQTSNFRVQPTESIVRFPNITNLCPFGEVFNATRFASVYAWNRKRISNCVADYSVLYNSASFSTFKCYGVSPTKLNDLCFTNVYADSFVIRGDEVRQIAPGQTGKIADYNYKLPDDFTGCVIAWNSNNLDSKVGGNYNYLYRLFRKSNLKPFERDISTEIYQAGSTPCNGVEGFNCYFPLQSYGFQPTNGVGYQPYRVVVLSFELLHAPATVCGPKKSTNLVKNKCVNFNFNGLTGTGVLTESNKKFLPFQQFGRDIADTTDAVRDPQTLEILDITPCSFGGVSVITPGTNTSNQVAVLYQDVNCTEVPVAIHADQLTPTWRVYSTGSNVFQTRAGCLIGAEHVNNSYECDIPIGAGICASYQTQTNSPRRARSVASQSIIAYTMSLGAENSVAYSNNSIAIPTNFTISVTTEILPVSMTKTSVDCTMYICGDSTECSNLLLQYGSFCTQLNRALTGIAVEQDKNTQEVFAQVKQIYKTPPIKDFGGFNFSQILPDPSKPSKRSFIEDLLFNKVTLADAGFIKQYGDCLGDIAARDLICAQKFNGLTVLPPLLTDEMIAQYCSALLAGTITSGWTFGAGAALQIPFAMQMAYRFNGIGVTQNVLYENQKLIANQFNSAIGKIQDSLSSTASALGKLQDVVNQNAQALNTLVKQLSSNFGAISSVLNDILSRLDKVEAEVQIDRLITGRLQSLQTYVTQQLIRAAEIRASANLAATKMSECVLGQSKRFDFCGKGYHLMSFPQCAPHGVVFLHVTYVPAQEKNFTTAPAICHDGKAHFPREGVFVSNGTHWFVTQRNFYEPQIITTDNTFVSGNCDVVIGIVNNTVYDPLQPELDSGGSGYIPEAPRDGQAYVRKDGEWVLLSTFL

SEQ ID NO: 10629 - protein, 1177 aa, Artificial Sequence
  SARS-CoV-2/China/WF0028/2020__EPI_ISL_413791 spike protein (1-1147)(T874C_S1055C) Foldon construct
MFVFLVLLPLVSSQCVNLTTRTQLPPAYTNSFTRGVYYPDKVFRSSVLHSTQDLFLPFFSNVTWFHAIHVSGTNGTKRFDNPVLPFNDGVYFASTEKSNIIRGWIFGTTLDSKTQSLLIVNNATNVVIKVCEFQFCNDPFLGVYYHKNNKSWMESEFRVYSSANNCTFEYVSQPFLMDLEGKQGNFKNLREFVFKNIDGYFKIYSKHTPINLVRDLPQGFSALEPLVDLPIGINITRFQTLLALHRSYLTPGDSSSGWTAGAAAYYVGYLQPRTFLLKYNENGTITDAVDCALDPLSETKCTLKSFTVEKGIYQTSNFRVQPTESIVRFPNITNLCPFGEVFNATRFASVYAWNRKRISNCVADYSVLYNSASFSTFKCYGVSPTKLNDLCFTNVYADSFVIRGDEVRQIAPGQTGKIADYNYKLPDDFTGCVIAWNSNNLDSKVGGNYNYLYRLFRKSNLKPFERDISTEIYQAGSTPCNGVEGFNCYFPLQSYGFQPTNGVGYQPYRVVVLSFELLHAPATVCGPKKSTNLVKNKCVNFNFNGLTGTGVLTESNKKFLPFQQFGRDIADTTDAVRDPQTLEILDITPCSFGGVSVITPGTNTSNQVAVLYQDVNCTEVPVAIHADQLTPTWRVYSTGSNVFQTRAGCLIGAEHVNNSYECDIPIGAGICASYQTQTNSPRRARSVASQSIIAYTMSLGAENSVAYSNNSIAIPTNFTISVTTEILPVSMTKTSVDCTMYICGDSTECSNLLLQYGSFCTQLNRALTGIAVEQDKNTQEVFAQVKQIYKTPPIKDFGGFNFSQILPDPSKPSKRSFIEDLLFNKVTLADAGFIKQYGDCLGDIAARDLICAQKFNGLTVLPPLLTDEMIAQYCSALLAGTITSGWTFGAGAALQIPFAMQMAYRFNGIGVTQNVLYENQKLIANQFNSAIGKIQDSLSSTASALGKLQDVVNQNAQALNTLVKQLSSNFGAISSVLNDILSRLDKVEAEVQIDRLITGRLQSLQTYVTQQLIRAAEIRASANLAATKMSECVLGQSKRVDFCGKGYHLMSFPQCAPHGVVFLHVTYVPAQEKNFTTAPAICHDGKAHFPREGVFVSNGTHWFVTQRNFYEPQIITTDNTFVSGNCDVVIGIVNNTVYDPLQPELESGGSGYIPEAPRDGQAYVRKDGEWVLLSTFL

SEQ ID NO: 10630 - protein, 1177 aa, Artificial Sequence
  SARS-CoV-2/2019-nCoV/USA-CruiseA-18/2020__MT159716.1 spike protein (1-1147)(T874C_S1055C) Foldon construct
MFVFLVLLPLVSSQCVNLTTRTQLPPAYTNSFTRGVYYPDKVFRSSVLHSTQDLFLPFFSNVTWFHAIHVSGTNGTKRFDNPVLPFNDGVYFASTEKSNIIRGWIFGTTLDSKTQSLLIVNNATNVVIKVCEFQFCNDPFLGVYYHKNNKSWMESELRVYSSANNCTFEYVSQPFLMDLEGKQGNFKNLREFVFKNIDGYFKIYSKHTPINLVRDLPQGFSALEPLVDLPIGINITRFQTLLALHRSYLTPGDSSSGWTAGAAAYYVGYLQPRTFLLKYNENGTITDAVDCALDPLSETKCTLKSFTVEKGIYQTSNFRVQPTESIVRFPNITNLCPFGEVFNATRFASVYAWNRKRISNCVADYSVLYNSASFSTFKCYGVSPTKLNDLCFTNVYADSFVIRGDEVRQIAPGQTGKIADYNYKLPDDFTGCVIAWNSNNLDSKVGGNYNYLYRLFRKSNLKPFERDISTEIYQAGSTPCNGVEGFNCYFPLQSYGFQPTNGVGYQPYRVVVLSFELLHAPATVCGPKKSTNLVKNKCVNFNFNGLTGTGVLTESNKKFLPFQQFGRDIADTTDAVRDPQTLEILDITPCSFGGVSVITPGTNTSNQVAVLYQDVNCTEVPVAIHADQLTPTWRVYSTGSNVFQTRAGCLIGAEHVNNSYECDIPIGAGICASYQTQTNSPRRARSVASQSIIAYTMSLGAENSVAYSNNSIAIPTNFTISVTTEILPVSMTKTSVDCTMYICGDSTECSNLLLQYGSFCTQLNRALTGIAVEQDKNTQEVFAQVKQIYKTPPIKDFGGFNFSQILPDPSKPSKRSFIEDLLFNKVTLADAGFIKQYGDCLGDIAARDLICAQKFNGLTVLPPLLTDEMIAQYCSALLAGTITSGWTFGAGAALQIPFAMQMAYRFNGIGVTQNVLYENQKLIANQFNSAIGKIQDSLSSTASALGKLQDVVNQNAQALNTLVKQLSSNFGAISSVLNDILSRLDKVEAEVQIDRLITGRLQSLQTYVTQQLIRAAEIRASANLAATKMSECVLGQSKRVDFCGKGYHLMSFPQCAPHGVVFLHVTYVPAQEKNFTTAPAICHDGKAHFPREGVFVSNGTHWFVTQRNFYEPQIITTDNTFVSGNCDVVIGIVNNTVYDPLQPELDSGGSGYIPEAPRDGQAYVRKDGEWVLLSTFL

SEQ ID NO: 10631 - protein, 1177 aa, Artificial Sequence
  SARS-CoV-2/SARS-CoV-2/Yunnan-01/human/2020/CHN__MT049951.1 spike protein (1-1147)(T874C_S1055C) Foldon construct
MFVFLVLLPLVSSQCVNLTTRTQLPPANTNSFTRGVYYPDKVFRSSVLHSTQDLFLPFFSNVTWFHAIHVSGTNGTKRFDNPVLPFNDGVYFASTEKSNIIRGWIFGTTLDSKTQSLLIVNNATNVVIKVCEFQFCNDPFLGVYYHKNNKSWMESEFRVYSSANNCTFEYVSQPFLMDLEGKQGNFKNLREFVFKNIDGYFKIYSKHTPINLVRDLPQGFSALEPLVDLPIGINITRFQTLLALHRSYLTPGDSSSGWTAGAAAYYVGYLQPRTFLLKYNENGTITDAVDCALDPLSETKCTLKSFTVEKGIYQTSNFRVQPTESIVRFPNITNLCPFGEVFNATRFASVYAWNRKRISNCVADYSVLYNSASFSTFKCYGVSPTKLNDLCFTNVYADSFVIRGDEVRQIAPGQTGKIADYNYKLPDDFTGCVIAWNSNNLDSKVGGNYNYLYRLFRKSNLKPFERDISTEIYQAGSTPCNGVEGFNCYFPLQSYGFQPTNGVGYQPYRVVVLSFELLHAPATVCGPKKSTNLVKNKCVNFNFNGLTGTGVLTESNKKFLPFQQFGRDIADTTDAVRDPQTLEILDITPCSFGGVSVITPGTNTSNQVAVLYQDVNCTEVPVAIHADQLTPTWRVYSTGSNVFQTRAGCLIGAEHVNNSYECDIPIGAGICASYQTQTNSPRRARSVASQSIIAYTMSLGAENSVAYSNNSIAIPTNFTISVTTEILPVSMTKTSVDCTMYICGDSTECSNLLLQYGSFCTQLNRALTGIAVEQDKNTQEVFAQVKQIYKTPPIKDFGGFNFSQILPDPSKPSKRSFIEDLLFNKVTLADAGFIKQYGDCLGDIAARDLICAQKFNGLTVLPPLLTDEMIAQYCSALLAGTITSGWTFGAGAALQIPFAMQMAYRFNGIGVTQNVLYENQKLIANQFNSAIGKIQDSLSSTASALGKLQDVVNQNAQALNTLVKQLSSNFGAISSVLNDILSRLDKVEAEVQIDRLITGRLQSLQTYVTQQLIRAAEIRASANLAATKMSECVLGQSKRVDFCGKGYHLMSFPQCAPHGVVFLHVTYVPAQEKNFTTAPAICHDGKAHFPREGVFVSNGTHWFVTQRNFYEPQIITTDNTFVSGNCDVVIGIVNNTVYDPLQPELDSGGSGYIPEAPRDGQAYVRKDGEWVLLSTFL

SEQ ID NO: 10632 - protein, 1177 aa, Artificial Sequence
  SARS-CoV-2/USA/WA-UW292/2020__EPI_ISL_418077 spike protein (1-1147)(T874C_S1055C) Foldon construct
MFVFLVLLPLVSSQCVNLTTRTQLPPAYTNSFTRGVYYPDKVFRSSVLHSTQDLFLPFFSNVTWFHAIHVSGTNGTKRFDNPVLPFNDGVYFASTEKSNIIRGWIFGTTLDSKTQSLLIVNNATNVVIKVCEFQFCNDPFLGVYYHKNNKSWMESEFRVYSSANNCTFEYVSQPFLMDLEGKQGNFKNLREFVFKNIDGYFKIYSKHTPINLVRDLPQGFSALEPLVDLPIGINITRFQTLLALHRSYLTPGDSSSGWTAGAAAYYVGYLQPRTFLLKYNENGTITDAVDCALDPLSETKCTLKSFTVEKGIYQTSNFRVQPTESIVRFPNITNLCPFGEVFNATRFASVYAWNRKRISNCVADYSVLYNSASFSTFKCYGVSPTKLNDLCFTNVYADSFVIRGDEVRQIAPGQTGKIADYNYKLPDDFTGCVIAWNSNNLDSKVGGNYNYLYRLFRKSNLKPFERDISTEIYQASSTPCNGVEGFNCYFPLQSYGFQPTNGVGYQPYRVVVLSFELLHAPATVCGPKKSTNLVKNKCVNFNFNGLTGTGVLTESNKKFLPFQQFGRDIADTTDAVRDPQTLEILDITPCSFGGVSVITPGTNTSNQVAVLYQDVNCTEVPVAIHADQLTPTWRVYSTGSNVFQTRAGCLIGAEHVNNSYECDIPIGAGICASYQTQTNSPRRARSVASQSIIAYTMSLGAENSVAYSNNSIAIPTNFTISVTTEILPVSMTKTSVDCTMYICGDSTECSNLLLQYGSFCTQLNRALTGIAVEQDKNTQEVFAQVKQIYKTPPIKDFGGFNFSQILPDPSKPSKRSFIEDLLFNKVTLADAGFIKQYGDCLGDIAARDLICAQKFNGLTVLPPLLTDEMIAQYCSALLAGTITSGWTFGAGAALQIPFAMQMAYRFNGIGVTQNVLYENQKLIANQFNSAIGKIQDSLSSTASALGKLQDVVNQNAQALNTLVKQLSSNFGAISSVLNDILSRLDKVEAEVQIDRLITGRLQSLQTYVTQQLIRAAEIRASANLAATKMSECVLGQSKRVDFCGKGYHLMSFPQCAPHGVVFLHVTYVPAQEKNFTTAPAICHDGKAHFPREGVFVSNGTHWFVTQRNFYEPQIITTDNTFVSGNCDVVIGIVNNTVYDPLQPELDSGGSGYIPEAPRDGQAYVRKDGEWVLLSTFL

SEQ ID NO: 10633 - protein, 1177 aa, Artificial Sequence
  SARS-CoV-2/Iceland/192/2020__EPI_ISL_417819 spike protein (1-1147)(T874C_S1055C) Foldon construct
MFVFFVLLPLVSSQCVNLTTRTQLPPAYTNSFTRGVYYPDKVFRSSVLHSTQDLFLPFFSNVTWFHAIHVSGTNGTKRFDNPVLPFNDGVYFASTEKSNIIRGWIFGTTLDSKTQSLLIVNNATNVVIKVCEFQFCNDPFLGVYYHKNNKSWMESEFRVYSSANNCTFEYVSQPFLMDLEGKQGNFKNLREFVFKNIDGYFKIYSKHTPINLVRDLPQGFSALEPLVDLPIGINITRFQTLLALHRSYLTPGDSSSGWTAGAAAYYVGYLQPRTFLLKYNENGTITDAVDCALDPLSETKCTLKSFTVEKGIYQTSNFRVQPTESIVRFPNITNLCPFGEVFNATRFASVYAWNRKRISNCVADYSVLYNSASFSTFKCYGVSPTKLNDLCFTNVYADSFVIRGDEVRQIAPGQTGKIADYNYKLPDDFTGCVIAWNSNNLDSKVGGNYNYLYRLFRKSNLKPFERDISTEIYQAGSTPCNGVEGFNCYFPLQSYGFQPTNGVGYQPYRVVVLSFELLHAPATVCGPKKSTNLVKNKCVNFNFNGLTGTGVLTESNKKFLPFQQFGRDIADTTDAVRDPQTLEILDITPCSFGGVSVITPGTNTSNQVAVLYQGVNCTEVPVAIHADQLTPTWRVYSTGSNVFQTRAGCLIGAEHVNNSYECDIPIGAGICASYQTQTNSPRRARSVASQSIIAYTMSLGAENSVAYSNNSIAIPTNFTISVTTEILPVSMTKTSVDCTMYICGDSTECSNLLLQYGSFCTQLNRALTGIAVEQDKNTQEVFAQVKQIYKTPPIKDFGGFNFSQILPDPSKPSKRSFIEDLLFNKVTLADAGFIKQYGDCLGDIAARDLICAQKFNGLTVLPPLLTDEMIAQYCSALLAGTITSGWTFGAGAALQIPFAMQMAYRFNGIGVTQNVLYENQKLIANQFNSAIGKIQDSLSSTASALGKLQDVVNQNAQALNTLVKQLSSNFGAISSVLNDILSRLDKVEAEVQIDRLITGRLQSLQTYVTQQLIRAAEIRASANLAATKMSECVLGQSKRVDFCGKGYHLMSFPQCAPHGVVFLHVTYVPAQEKNFTTAPAICHDGKAHFPREGVFVSNGTHWFVTQRNFYEPQIITTDNTFVSGNCDVVIGIVNNTVYDPLQPELDSGGSGYIPEAPRDGQAYVRKDGEWVLLSTFL

SEQ ID NO: 10634 - protein, 1177 aa, Artificial Sequence
  SARS-CoV-2/Belgium/ULG-6939/2020__EPI_ISL_417020 spike protein (1-1147)(T874C_S1055C) Foldon construct
MFVFLVLLPLVSSQCVNLTTRTQLPPAYTNSFTRGVYYPDKVFRSSVLHSTQDLFLPFFSNVTWFHAIHVSGTNGTKRFDNPVLPFNDGVYFASTEKSNIIRGWIFGTTLDSKTQSLLIVNNATNVVIKVCEFQFCNDPFLGVYYHKNNKSWMESEFRVYSSANNCTFEYVSQPFLMDLEGKQGNFKNLREFVFKNIDGYFKIYSKHTPINLVRDLPQGFSALEPLVDLPIGINITRFQTLLALHRSYLTPGDSSSGWTAGAAAYYVGYLQPRTFLLKYNENGTITDAVDCALDPLSETKCTLKSFTVEKGIYQTSNFRVQPTESIVRFPNITNLCPFGEVFNATRFASVYAWNRKRISNCVADYSVLYNSASFSTFKCYGVSPTKLNDLCFTNVYADSFVIRGDEVRQIAPGQTGKIADYNYKLPDDFTGCVIAWNSNNLDSKVGGNYNYLYRLFRKSNLKPFERDISTEIYQAGSTPCNGVEGFNCYFPLQSYGFQPTNGVGYQPYRVVVLSFELLHAPATVCGPKKSTNLVKNKCVNFNFNGLTGTGVLTESNKKFLPFQQFGRDIADTTDAVRDPQTLEILDITPCSFGGVSVITPGTNTSNQVAVLYQGVNCTEVPVAIHADQLTPTWRVYSTGSNVFQTRAGCLIGAEHVNNSYECDIPIGAGICASYQTQTNSPRRARSVASQSIIAYTMSLGAENSVVYSNNSIAIPTNFTISVTTEILPVSMTKTSVDCTMYICGDSTECSNLLLQYGSFCTQLNRALTGIAVEQDKNTQEVFAQVKQIYKTPPIKDFGGFNFSQILPDPSKPSKRSFIEDLLFNKVTLADAGFIKQYGDCLGDIAARDLICAQKFNGLTVLPPLLTDEMIAQYCSALLAGTITSGWTFGAGAALQIPFAMQMAYRFNGIGVTQNVLYENQKLIANQFNSAIGKIQDSLSSTASALGKLQDVVNQNAQALNTLVKQLSSNFGAISSVLNDILSRLDKVEAEVQIDRLITGRLQSLQTYVTQQLIRAAEIRASANLAATKMSECVLGQSKRVDFCGKGYHLMSFPQCAPHGVVFLHVTYVPAQEKNFTTAPAICHDGKAHFPREGVFVSNGTHWFVTQRNFYEPQIITTDNTFVSGNCDVVIGIVNNTVYDPLQPELDSGGSGYIPEAPRDGQAYVRKDGEWVLLSTFL

SEQ ID NO: 10635 - protein, 1177 aa, Artificial Sequence
  SARS-CoV-2/France/HF2496/2020__EPI_ISL_418231 spike protein (1-1147)(T874C_S1055C) Foldon construct
MFVFLVLLPLVSSQCVNLTTRTQLPPAYTNSFTRGVYYPDKVFRSSVLHSTQDLFLPFFSNVTWFHAIHVSGTNGTKRFDNPVLPFNDGVYFASTEKSNIIRGWIFGTTLDSKTQSLLIVNNATNVVIKVCEFQFCNDPFLGVYYHKNNKSWMESEFRVYSSANNCTFEYVSQPFLMDLEGKQGNFKNLREFVFKNIDGYFKIYSKHTPINLVRDLPQGFSALEPLVDLPIGINITRFQTLLALHRSYLTPGDSSSGWTAGAAAYYVGYLQPRTFLLKYNENGTITDAVDCALDPLSETKCTLKSFTVEKGIYQTSNFRVQPTESIVRFPNITNLCPFGEVFNATRFASVYAWNRKRISNCVADYSVLYNSASFSTFKCYGVSPTKLNDLCFTNVYADSFVIRGDEVRQIAPGQTGKIADYNYKLPDDFTGCVIAWNSNNLDSKVGGNYNYLYRLFRKSNLKPFERDISTEIYQAGSTPCNGVEGFNCYFPLQSYGFQPTNGVGYQPYRVVVLSFELLHAPATVCGPKKSTNLVKNKCVNFNFNGLTGTGVLTESNKKFLPFQQFGRDIADTTDAVRDPQTLEILDITPCSFGGVSVITPGTNTSNQVAVLYQGVNCTEVPVAIHADQLTPTWRVYSTGSNVFQTRAGCLIGAEHVNNSYECDIPIGAGICASYQTQTNSPRRARSVASQSIIAYTMSLGAENSVAYSNNSIAIPTNFTISVTTEILPVSMTKTSVDCTMYICGDSTECSNLLLQYGSFCTQLNRALTGIAVEQDKNTQEVFAQVKQIYKTPPIKDFGGFNFSQILPDPSKPSKRSFIEDLLFNKVTLADAGFIKQYGDCLGDIVARDLICAQKFNGLTVLPPLLTDEMIAQYCSALLAGTITSGWTFGAGAALQIPFAMQMAYRFNGIGVTQNVLYENQKLIANQFNSAIGKIQDSLSSTASALGKLQDVVNQNAQALNTLVKQLSSNFGAISSVLNDILSRLDKVEAEVQIDRLITGRLQSLQTYVTQQLIRAAEIRASANLAATKMSECVLGQSKRVDFCGKGYHLMSFPQCAPHGVVFLHVTYVPAQEKNFTTAPAICHDGKAHFPREGVFVSNGTHWFVTQRNFYEPQIITTDNTFVSGNCDVVIGIVNNTVYDPLQPELDSGGSGYIPEAPRDGQAYVRKDGEWVLLSTFL

SEQ ID NO: 10636 - protein, 1177 aa, Artificial Sequence
  SARS-CoV-2/USA/WA-UW291/2020__EPI_ISL_418076 spike protein (1-1147)(T874C_S1055C) Foldon construct
MFVFLVLLPLVSSQCVNLTTRTQLPPAYTNSFTRGVYYPDKVFRSSVLHSTQDLFLPFFSNVTWFHAIHVSGTNGTKRFDNPVLPFNDGVYFASTEKSNIIRGWIFGTTLDSKTQSLLIVNNATNVVIKVCEFQFCNDPFLGVYYHKNNKSWMESEFRVYSSANNCTFEYVSQPFLMDLEGKQGNFKNLREFVFKNIDGYFKIYSKHTPINLVRDLPQGFSALEPLVDLPIGINITRFQTLLALHRSYLTPGDSSSGWTAGAAAYYVGYLQPRTFLLKYNENGTITDAVDCALDPLSETKCTLKSFTVEKGIYQTSNFRVQPTESIVRFPNITNLCPFGEVFNATRFASVYAWNRKRISNCVADYSVLYNSASFSTFKCYGVSPTKLNDLCFTNVYADSFVIRGDEVRQIAPGQTGKIADYNYKLPDDFTGCVIAWNSNNLDSKVGGNYNYLYRLFRKSNLKPFERDISTEIYQAGSTPCNGVEGFNCYFPLQSYGFQPTNGVGYQPYRVVVLSFELLHAPATVCGPKKSTNLVKNKCVNFNFNGLTGTGVLTESNKKFLPFQQFGRDIADTTDAVRDPQTLEILDITPCSFGGVSVITPGTNTSNQVAVLYQGVNCTEVPVAIHADQLTPTWRVYSTGSNVFQTRAGCLIGAEHVNNSYECDIPIGAGICASYQTQTNSPRRARSVASQSIIAYTMSLGAENSVAYSNNSIAIPTNFTISVTTEILPVSMTKTSVDCTMYICGDSTECSNLLLQYGSFCTQLNRALTGIAVEQDKNTQEVFAQVKQIYKTPPIKDFGGFNFSQILPDPSKPSKRSFIEDLLFNKVTLADAGFIKQYGDCLGDIAARDLICAQKFNGLTVLPPLLTDEMIAQYCSALLAGTITSGWTFGAGAALQIPFAMQMAYRFNGIGVTQNVLYENQKLIANQFNSAIGKIQYSLSSTASALGKLQDVVNQNAQALNTLVKQLSSNFGAISSVLNDILSRLDKVEAEVQIDRLITGRLQSLQTYVTQQLIRAAEIRASANLAATKMSECVLGQSKRVDFCGKGYHLMSFPQCAPHGVVFLHVTYVPAQEKNFTTAPAICHDGKAHFPREGVFVSNGTHWFVTQRNFYEPQIITTDNTFVSGNCDVVIGIVNNTVYDPLQPELDSGGSGYIPEAPRDGQAYVRKDGEWVLLSTFL

SEQ ID NO: 10637 - protein, 1177 aa, Artificial Sequence; identical to SEQ ID NO: 10600
  SARS-CoV-2/Portugal/PT0034/2020__EPI_ISL_418019 spike protein (1-1147)(T874C_S1055C) Foldon construct

SEQ ID NO: 10638 - protein, 1177 aa, Artificial Sequence; identical to SEQ ID NO: 10592
  SARS-CoV-2/Iceland/202/2020__EPI_ISL_417750 spike protein (1-1147)(T874C_S1055C) Foldon construct

SEQ ID NO: 10639 - protein, 1177 aa, Artificial Sequence
  SARS-CoV-2/USA/WA-UW261/2020__EPI_ISL_418046 spike protein (1-1147)(T874C_S1055C) Foldon construct
MFVFLVLLPLVSSQCVNLTTRTQLPPAYTNSFTRGVYYPDKVFRSSVLHSTQDLFLPFFSNVTWFHAIHVSGTNGTKRFDNPVLPFNDGVYFASTEKSNIIRGWIFGTTLDSKTQSLLIVNNATNVVIKVCEFQFCNDPFLGVYYHKNNKSWMESEFRVYSSANNCTFEYVSQPFLMDLEGKQGNFKNLREFVFKNIDGYFKIYSKHTPINLVRDLPQGFSALEPLVDLPIGINITRFQTLLALHRSYLTPGDSSSGWTAGAAAYYVGYLQPRTFLLKYNENGTITDAVDCALDPLSETKCTLKSFTVEKGIYQTSNFRVQPTESIVRFPNITNLCPFGEVFNATRFTSVYAWNRKRISNCVADYSVLYNSASFSTFKCYGVSPTKLNDLCFTNVYADSFVIRGDEVRQIAPGQTGKIADYNYKLPDDFTGCVIAWNSNNLDSKVGGNYNYLYRLFRKSNLKPFERDISTEIYQAGSTPCNGVEGFNCYFPLQSYGFQPTNGVGYQPYRVVVLSFELLHAPATVCGPKKSTNLVKNKCVNFNFNGLTGTGVLTESNKKFLPFQQFGRDIADTTDAVRDPQTLEILDITPCSFGGVSVITPGTNTSNQVAVLYQDVNCTEVPVAIHADQLTPTWRVYSTGSNVFQTRAGCLIGAEHVNNSYECDIPIGAGICASYQTQTNSPRRARSVASQSIIAYTMSLGAENSVAYSNNSIAIPTNFTISVTTEILPVSMTKTSVDCTMYICGDSTECSNLLLQYGSFCTQLNRALTGIAVEQDKNTQEVFAQVKQIYKTPPIKDFGGFNFSQILPDPSKPSKRSFIEDLLFNKVTLADAGFIKQYGDCLGDIAARDLICAQKFNGLTVLPPLLTDEMIAQYCSALLAGTITSGWTFGAGAALQIPFAMQMAYRFNGIGVTQNVLYENQKLIANQFNSAIGKIQDSLSSTASALGKLQDVVNQNAQALNTLVKQLSSNFGAISSVLNDILSRLDKVEAEVQIDRLITGRLQSLQTYVTQQLIRAAEIRASANLAATKMSECVLGQSKRVDFCGKGYHLMSFPQCAPHGVVFLHVTYVPAQEKNFTTAPAICHDGKAHFPREGVFVSNGTHWFVTQRNFYEPQIITTDNTFVSGNCDVVIGIVNNTVYDPLQPELDSGGSGYIPEAPRDGQAYVRKDGEWVLLSTFL

SEQ ID NO: 10640 - protein, 1177 aa, Artificial Sequence
  SARS-CoV-2/Portugal/PT0035/2020__EPI_ISL_418020 spike protein (1-1147)(T874C_S1055C) Foldon construct
MFVFLVLLPLVSSQCVNLTTRTQLPPAYTNSFTRGVYYPDKVFRSSVLHSTQDLFLPFFSNVTWFHAIHVSGTNGTKRFDNPVLPFNDGVYFASTEKSNIIRGWIFGTTLDSKTQSLLIVNNATNVVIKVCEFQFCNDPFLGVYYHKNNKSWMESEFRVYSSANNCTFEYVSQPFLMDLEGKQGNFKNLREFVFKNIDGYFKIYSKHTPINLVRDLPQGFSALEPLVDLPIGINITRFQTLLALHRSYLTPGDSSSGWTAGAAAYYVGYLQPRTFLLKYNENGTITDAVDCALDPLSETKCTLKSFTVEKGIYQTSNFRVQPTESIVRFPNITNLCPFGEVFNATRFASVYAWNRKRISNCVADYSVLYNSASFSTFKCYGVSPTKLNDLCFTNVYADSFVIRGDEVRQIAPGQTGKIADYNYKLPDDFTGCVIAWNSNNLDSKVGGNYNYLYRLFRKSNLKPFERDISTEIYQAGSTPCNGVEGFNCYFPLQSYGFQPTNGVGYQPYRVVVLSFELLHAPATVCGPKKSTNLVKNKCVNFNFNGLTGTGVLTESNKKFLPFQQFGRDIADTTDAVRDPQTLEILDITPCSFGGVSVITPGTNTSNQVAVLYQDVNCTEVPVAIHADQLTPTWRVYSTGSNVFQTRAGCLIGAEHVNNSYECDIPIGAGICASYQTQTNSPRRARSVASQSIIAYTMSLGAENSVAYSNNSIAIPTNFTISVTTEILPVSMTKTSVDCTMYICGDSTECSNLLLQYGSFCTQLNRALTGIAVEQDKNTQEVFAQVKQIYKTPPIKDFGGFNFSQILPDPSKPSKRSFIEDLLFNKVTLADAGFIKQYGDCLGDISARDLICAQKFNGLTVLPPLLTDEMIAQYCSALLAGTITSGWTFGAGAALQIPFAMQMAYRFNGIGVTQNVLYENQKLIANQFNSAIGKIQDSLSSTASALGKLQDVVNQNAQALNTLVKQLSSNFGAISSVLNDILSRLDKVEAEVQIDRLITGRLQSLQTYVTQQLIRAAEIRASANLAATKMSECVLGQSKRVDFCGKGYHLMSFPQCAPHGVVFLHVTYVPAQEKNFTTAPAICHDGKAHFPREGVFVSNGTHWFVTQRNFYEPQIITTDNTFVSGNCDVVIGIVNNTVYDPLQPELDSGGSGYIPEAPRDGQAYVRKDGEWVLLSTFL

SEQ ID NO: 10641 - protein, 1177 aa, Artificial Sequence
  SARS-CoV-2/USA/NY-NYUMC7/2020__EPI_ISL_418192 spike protein (1-1147)(T874C_S1055C) Foldon construct
MFVFLVLLPLVSSQCVNLTTRTQLPPAYTNSFTRGVYYPDKVFRSSVLHSTQDLFLPFFSNVTWFHAIHVSGTNGTKRFDNPVLPFNDGVYFASTEKSNIIRGWIFGTTLDSKTQSLLIVNNATNVVIKVCEFQFCNDPFLGVYHHKNNKSWMESEFRVYSSANNCTFEYVSQPFLMDLEGKQGNFKNLREFVFKNIDGYFKIYSKHTPINLVRDLPQGFSALEPLVDLPIGINITRFQTLLALHRSYLTPGDSSSGWTAGAAAYYVGYLQPRTFLLKYNENGTITDAVDCALDPLSETKCTLKSFTVEKGIYQTSNFRVQPTESIVRFPNITNLCPFGEVFNATRFASVYAWNRKRISNCVADYSVLYNSASFSTFKCYGVSPTKLNDLCFTNVYADSFVIRGDEVRQIAPGQTGKIADYNYKLPDDFTGCVIAWNSNNLDSKVGGNYNYLYRLFRKSNLKPFERDISTEIYQAGSTPCNGVEGFNCYFPLQSYGFQPTNGVGYQPYRVVVLSFELLHAPATVCGPKKSTNLVKNKCVNFNFNGLTGTGVLTESNKKFLPFQQFGRDIADTTDAVRDPQTLEILDITPCSFGGVSVITPGTNTSNQVAVLYQGVNCTEVPVAIHADQLTPTWRVYSTGSNVFQTRAGCLIGAEHVNNSYECDIPIGAGICASYQTQTNSPRRARSVASQSIIAYTMSLGAENSVAYSNNSIAIPTNFTISVTTEILPVSMTKTSVDCTMYICGDSTECSNLLLQYGSFCTQLNRALTGIAVEQDKNTQEVFAQVKQIYKTPPIKDFGGFNFSQILPDPSKPSKRSFIEDLLFNKVTLADAGFIKQYGDCLGDIAARDLICAQKFNGLTVLPPLLTDEMIAQYCSALLAGTITSGWTFGAGAALQIPFAMQMAYRFNGIGVTQNVLYENQKLIANQFNSAIGKIQDSLSSTASALGKLQDVVNQNAQALNTLVKQLSSNFGAISSVLNDILSRLDKVEAEVQIDRLITGRLQSLQTYVTQQLIRAAEIRASANLAATKMSECVLGQSKRVDFCGKGYHLMSFPQCAPHGVVFLHVTYVPAQEKNFTTAPAICHDGKAHFPREGVFVSNGTHWFVTQRNFYEPQIITTDNTFVSGNCDVVIGIVNNTVYDPLQPELDSGGSGYIPEAPRDGQAYVRKDGEWVLLSTFL

SEQ ID NO: 10642 - protein, 1177 aa, Artificial Sequence
  SARS-CoV-2/Iceland/189/2020__EPI_ISL_417709 spike protein (1-1147)(T874C_S1055C) Foldon construct
MFVFLVLLPLVSSQCVNLTTRTQLPPAYTNSFTRGVYYPDKVFRSSVLHSTQDLFLPFFSNVTWFHAIHVSGTNGTKRFDNPVLPFNDGVYFASTEKSNIIRGWIFGTTLDSKTQSLLIVNNATNVVIKVCEFQFCNDPFLGVYYHKNNKSWMESEFRVYSSANNCTFEYVSQPFLMDLEGKQGNFKNLREFVFKNIDGYFKIYSKHTPINLVRDLPQGFSALEPLVDLPIGINITRFQTLLALHRSYLTPGDSSSGWTAGAAAYYVGYLQPRTFLLKYNENGTITDAVDCALDPLSETKCTLKSFTVEKGIYQTSNFRVQPTESIVRFPNITNLCPFGEVFNATRFASVYAWNRKRISNCVADYSVLYNSASFSTFKCYGVSPTKLNDLCFTNVYADSFVIRGDEVRQIAPGQTGKIADYNYKLPDDFTGCVIAWNSNNLDSKVGGNYNYLYRLFRKSNLKPFERDISTEIYQAGSTPCNGVEGFNCYFPLQSYGFQPTNGVGYQPYRVVVLSFELLHAPATVCGPKKSTNLVKNKCVNFNFNGLTGTGVLTESNKKFLPFQQFGRDIADTTDAVRDPQTLEILDITPCSFGGVSVITPGTNTSNQVAVLYQGVNCTEVPVAIHADQLTPTWRVYSTGSNVFQTRAGCLIGAEHVNNSYECDIPIGAGICASYQTQTNSPRRARSVASQSIIAYTMSLGAENSVAYSNNSIAIPTNFTISVTTEILPVSMTKTSVDCTMYICGDSTECSNLLLQYGSFCTQLNRALTGIAVEQDKNTQEVFAQVKQIYKTPPIKDFGGFNFSQILPDPSKPSKRSFIEDLLFNKVTLADAGFTKQYGDCLGDIAARDLICAQKFNGLTVLPPLLTDEMIAQYCSALLAGTITSGWTFGAGAALQIPFAMQMAYRFNGIGVTQNVLYENQKLIANQFNSAIGKIQDSLSSTASALGKLQDVVNQNAQALNTLVKQLSSNFGAISSVLNDILSRLDKVEAEVQIDRLITGRLQSLQTYVTQQLIRAAEIRASANLAATKMSECVLGQSKRVDFCGKGYHLMSFPQCAPHGVVFLHVTYVPAQEKNFTTAPAICHDGKAHFPREGVFVSNGTHWFVTQRNFYEPQIITTDNTFVSGNCDVVIGIVNNTVYDPLQPELDSGGSGYIPEAPRDGQAYVRKDGEWVLLSTFL

SEQ ID NO: 10643 - protein, 1177 aa, Artificial Sequence
  SARS-CoV-2/Australia/NSW56/2020__EPI_ISL_417408 spike protein (1-1147)(T874C_S1055C) Foldon construct
MFVFLVLLPLVSSQCVNLTTRTQLPPAYTNSFTRGVYYPDKVFRSSVLHSTQDLFLPFFSNVTWFHAIHVSGTNGTKRFDNPVLPFNDGVYFASTEKSNIIRGWIFGTTLDSKTQSLLIVNNATNVVIKVCEFQFCNDPFLGVYYHKNNKSWMESEFRVYSSANNCTFEYVSQPFLMDLEGKQGNFKNLREFVFKNIDGYFKIYSKHTPINLVRDLPQGFSALEPLVDLPIGINITRFQTLLALHRSYLTPGDSSSGWTAGAAAYYVGYLQPRTFLLKYNENGTITDAVDCALDPLSETKCTLKSFTVEKGIYQTSNFRVQPTESIVRFPNITNLCPFGEVFNATRFASVYAWNRKRISNCVADYSVLYNSASFSTFKCYGVSPTKLNDLCFTNVYADSFVIRGDEVRQIAPGQTGKIADYNYKLPDDFTGCVIAWNSNNLDSKVGGNYNYLYRLFRKSNLKPFERDISTEIYQAGSTPCNGVEGFNCYFPLQSYGFQPTNGVGYQPYRVVVLSFELLHAPATVCGPKKSTNLVKNKCVNFNFNGLTGTGVLTESNKKFLPFQQFGRDIADTTDAVRDPQTLEILDITPCSFGGVSVITPGTNTSNQVAVLYQDVNCTEVPVAIHADQLTPTWRVYSTGSNVFQTRAGCLIGAEHVNNSYECDIPIGAGICASYQTQTNSPRRARSVASQSIIAYTMSLGAENSVAYSNNSIAIPTNFTISVTTEILPVSMTKTSVDCTMYICGDSTECSNLLLQYGSFCTQLNRALTGIAVEQDKNTQEVFAQVKQIYKTPPIKDFGGFNFSQILPDSSKPSKRSFIEDLLFNKVTLADAGFIKQYGDCLGDIAARDLICAQKFNGLTVLPPLLTDEMIAQYCSALLAGTITSGWTFGAGAALQIPFAMQMAYRFNGIGVTQNVLYENQKLIANQFNSAIGKIQDSLSSTASALGKLQDVVNQNAQALNTLVKQLSSNFGAISSVLNDILSRLDKVEAEVQIDRLITGRLQSLQTYVTQQLIRAAEIRASANLAATKMSECVLGQSKRVDFCGKGYHLMSFPQCAPHGVVFLHVTYVPAQEKNFTTAPAICHDGKAHFPREGVFVSNGTHWFVTQRNFYEPQIITTDNTFVSGNCDVVIGIVNNTVYDPLQPELDSGGSGYIPEAPRDGQAYVRKDGEWVLLSTFL

SEQ ID NO: 10644 - protein, 1177 aa, Artificial Sequence
  SARS-CoV-2/Iceland/280/2020__EPI_ISL_417608 spike protein (1-1147)(T874C_S1055C) Foldon construct
MFVFLVLLPLVSSQCVNLTTRTQLPPAYTNSFTRGVYYPDKVFRSSVLHSTQDLFLPFFSNVTWFHAIHVSGTNGTKRFDNPVLPFNDGVYFASTEKSNIIRGWIFGTTLDSKTQSLLIVNNATNVVIKVCEFQFCNDPFLGVYYHKNNKSWMESEFRVYSSANNCTFEYVSQPFLMDLEGKQGNFKNLREFVFKNIDGYFKIYSKHTPINLVRDLPQGFSALEPLVDLPIGINITRFQTLLALHRSYLTPGDSSSGWTAGAAAYYVGYLQPRTFLLKYNENGTITDAVDCALDPLSETKCTLKSFTVEKGIYQTSNFRVQPTESIVRFPNITNLCPFGEVFNATRFASVYAWNRKRISNCVADYSVLYNSASFSTFKCYGVSPTKLNDLCFTNVYADSFVIRGDEVRQIAPGQTGKIADYNYKLPDDFTGCVIAWNSNNLDSKVGGNYNYLYRLFRKSNLKPFERDISTEIYQAGSTPCNGVEGFNCYFPLQSYGFQPTNGVGYQPYRVVVLSFELLHAPATVCGPKKSTNLVKNKCVNFNFNGLTGTGVLTESNKKFLPFQQFGRDIADTTDAVRDPQTLEILDITPCSFGGVSVITPGTNTSNQVAVLYQGVNCTEVPVAIHADQLTPTWRVYSTGSNVFQTRAGCLIGAEHVNNSYECDIPIGAGICASYHTQTNSPRRARSVASQSIIAYTMSLGAENSVAYSNNSIAIPTNFTISVTTEILPVSMTKTSVDCTMYICGDSTECSNLLLQYGSFCTQLNRALTGIAVEQDKNTQEVFAQVKQIYKTPPIKDFGGFNFSQILPDPSKPSKRSFIEDLLFNKVTLADAGFIKQYGDCLGDIAARDLICAQKFNGLTVLPPLLTDEMIAQYCSALLAGTITSGWTFGAGAALQIPFAMQMAYRFNGIGVTQNVLYENQKLIANQFNSAIGKIQDSLSSTASALGKLQDVVNQNAQALNTLVKQLSSNFGAISSVLNDILSRLDKVEAEVQIDRLITGRLQSLQTYVTQQLIRAAEIRASANLAATKMSECVLGQSKRVDFCGKGYHLMSFPQCAPHGVVFLHVTYVPAQEKNFTTAPAICHDGKAHFPREGVFVSNGTHWFVTQRNFYEPQIITTDNTFVSGNCDVVIGIVNNTVYDPLQPELDSGGSGYIPEAPRDGQAYVRKDGEWVLLSTFL

SEQ ID NO: 10645 - protein, 1177 aa, Artificial Sequence; identical to SEQ ID NO: 10600
  SARS-CoV-2/Iceland/247/2020__EPI_ISL_417575 spike protein (1-1147)(T874C_S1055C) Foldon construct

SEQ ID NO: 10646 - protein, 1177 aa, Artificial Sequence
  SARS-CoV-2/Iceland/238/2020__EPI_ISL_417566 spike protein (1-1147)(T874C_S1055C) Foldon construct
MFVFLVLLPLVSSQCVNLTTRTQLPPAYTNSFTRGVYYPDKVFRSSVLHSTQDLFLPFFSNVTWFHAIHVSGTNGTKRFDNPVLPFNDGVYFASTEKSNIIRGWIFGTTLDSKTQSLLIVNNATNVVIKVCEFQFCNDPFLGVYYHKNNKSWMESEFRVYSSANNCTFEYVSQPFLMDLEGKQGNFKNLREFVFKNIDGYFKIYSKHTPINLVRDLPQGFSALEPLVDLPIGINITRFQTLLALHRSYLTPGDSSSGWTAGAAAYYVGYLQPRTFLLKYNENGTITDAVDCALDPLSETKCTLKSFTVEKGIYQTSNFRVQPTESIVRFPNITNLCPFGEVFNATRFASVYAWNRKRISNCVADYSVLYNSASFSTFKCYGVSPTKLNDLCFTNVYADSFVIRGDEVRQIAPGQTGKIADYNYKLPDDFTGCVIAWNSNNLDSKVGGNYNYLYRLFRKSNLKPFERDISTEIYQAGSTPCNGVEGFNCYFPLQSYGFQPTNGVGYQPYRVVVLSFELLHAPATVCGPKKSTNLVKNKCVNFNFNGLTGTGVLTESNKKFLPFQQFGRDIADTTDAVRDPQTLEILDITPCSFGGVSVITPGTNTSNQVAVLYQGVNCTEVPVAIHADQLTPTWRVYSTGSNVFQTRAGCLIGAEHVNNSYECDIPIGAGICASYQTQTNSPRRARSVASQSIIAYTMSLGAENSVAYSNNSIAIPTNFTISVTTEILPVSMTKTSVDCTMYICGDSTECSNLLLQYGSFCTQLNRALTGIAVEQDKNTQEVFAQVKQIYKTPPIKDFGGFNFSQILPDPSKPSKRSFIEDLLFNKVTLADVGFIKQYGDCLGDIAARDLICAQKFNGLTVLPPLLTDEMIAQYCSALLAGTITSGWTFGAGAALQIPFAMQMAYRFNGIGVTQNVLYENQKLIANQFNSAIGKIQDSLSSTASALGKLQDVVNQNAQALNTLVKQLSSNFGAISSVLNDILSRLDKVEAEVQIDRLITGRLQSLQTYVTQQLIRAAEIRASANLAATKMSECVLGQSKRVDFCGKGYHLMSFPQCAPHGVVFLHVTYVPAQEKNFTTAPAICHDGKAHFPREGVFVSNGTHWFVTQRNFYEPQIITTDNTFVSGNCDVVIGIVNNTVYDPLQPELDSGGSGYIPEAPRDGQAYVRKDGEWVLLSTFL

SEQ ID NO: 10647 - protein, 1177 aa, Artificial Sequence
  SARS-CoV-2/Greece/16/2020__EPI_ISL_418265 spike protein (1-1147)(T874C_S1055C) Foldon construct
MFVFLVLLPLVSSQCVNLTTRTQLPPAYTNSFTRGVYYPDKVFRSSVLHSTQDLFLPFFSNVTWFHAIHVSGTNGTKRFDNPVLPFNDGVYFASTEKSNIIRGWIFGTTLDSKTQSLLIVNNATNVVIKVCEFQFCNDPFLGVYYHKNNKSWMESEFRVYSSANNCTFEYVSQPFLMDLEGKQGNFKNLREFVFKNVDGYFKIYSKHTPINLVRDLPQGFSALEPLVDLPIGINITRFQTLLALHRSYLTPGDSSSGWTAGAAAYYVGYLQPRTFLLKYNENGTITDAVDCALDPLSETKCTLKSFTVEKGIYQTSNFRVQPTESIVRFPNITNLCPFGEVFNATRFASVYAWNRKRISNCVADYSVLYNSASFSTFKCYGVSPTKLNDLCFTNVYADSFVIRGDEVRQIAPGQTGKIADYNYKLPDDFTGCVIAWNSNNLDSKVGGNYNYLYRLFRKSNLKPFERDISTEIYQAGSTPCNGVEGFNCYFPLQSYGFQPTNGVGYQPYRVVVLSFELLHAPATVCGPKKSTNLVKNKCVNFNFNGLTGTGVLTESNKKFLPFQQFGRDIADTTDAVRDPQTLEILDITPCSFGGVSVITPGTNTSNQVAVLYQDVNCTEVPVAIHADQLTPTWRVYSTGSNVFQTRAGCLIGAEHVNNSYECDIPIGAGICASYQTQTNSPRRARSVASQSIIAYTMSLGAENSVAYSNNSIAIPTNFTISVTTEILPVSMTKTSVDCTMYICGDSTECSNLLLQYGSFCTQLNRALTGIAVEQDKNTQEVFAQVKQIYKTPPIKDFGGFNFSQILPDPSKPSKRSFIEDLLFNKVTLADAGFIKQYGDCLGDIAARDLICAQKFNGLTVLPPLLTDEMIAQYCSALLAGTITSGWTFGAGAALQIPFAMQMAYRFNGIGVTQNVLYENQKLIANQFNSAIGKIQDSLSSTASALGKLQDVVNQNAQALNTLVKQLSSNFGAISSVLNDILSRLDKVEAEVQIDRLITGRLQSLQTYVTQQLIRAAEIRASANLAATKMSECVLGQSKRVDFCGKGYHLMSFPQCAPHGVVFLHVTYVPAQEKNFTTAPAICHDGKAHFPREGVFVSNGTHWFVTQRNFYEPQIITTDNTFVSGNCDVVIGIVNNTVYDPLQPELDSGGSGYIPEAPRDGQAYVRKDGEWVLLSTFL

SEQ ID NO: 10648 - protein, 1177 aa, Artificial Sequence
  SARS-CoV-2/Iceland/319/2020__EPI_ISL_417648 spike protein (1-1147)(T874C_S1055C) Foldon construct
MFVFLVLLPLVSSQCVNLTTRTQLPPAYTNSFTRGVYYPDKVFRSSVLHSTQDLFLPFFSNVTWFHAIHVSGTNGTKRFDNPVLPFNDGVYFASTEKSNIIRGWIFGTTLDSKTQSLLIVNNATNVVIKVCEFQFCNDPFLGVYYHKNNKSWMESEFRVYSSANNCTFEYVSQPFLIDLEGKQGNFKNLREFVFKNIDGYFKIYSKHTPINLVRDLPQGFSALEPLVDLPIGINITRFQTLLALHRSYLTPGDSSSGWTAGAAAYYVGYLQPRTFLLKYNENGTITDAVDCALDPLSETKCTLKSFTVEKGIYQTSNFRVQPTESIVRFPNITNLCPFGEVFNATRFASVYAWNRKRISNCVADYSVLYNSASFSTFKCYGVSPTKLNDLCFTNVYADSFVIRGDEVRQIAPGQTGKIADYNYKLPDDFTGCVIAWNSNNLDSKVGGNYNYLYRLFRKSNLKPFERDISTEIYQAGSTPCNGVEGFNCYFPLQSYGFQPTNGVGYQPYRVVVLSFELLHAPATVCGPKKSTNLVKNKCVNFNFNGLTGTGVLTESNKKFLPFQQFGRDIADTTDAVRDPQTLEILDITPCSFGGVSVITPGTNTSNQVAVLYQGVNCTEVPVAIHADQLTPTWRVYSTGSNVFQTRAGCLIGAEHVNNSYECDIPIGAGICASYQTQTNSPRRARSVASQSIIAYTMSLGAENSVAYSNNSIAIPTNFTISVTTEILPVSMTKTSVDCTMYICGDSTECSNLLLQYGSFCTQLNRALTGIAVEQDKNTQEVFAQVKQIYKTPPIKDFGGFNFSQILPDPSKPSKRSFIEDLLFNKVTLADAGFIKQYGDCLGDIAARDLICAQKFNGLTVLPPLLTDEMIAQYCSALLAGTITSGWTFGAGAALQIPFAMQMAYRFNGIGVTQNVLYENQKLIANQFNSAIGKIQDSLSSTASALGKLQDVVNQNAQALNTLVKQLSSNFGAISSVLNDILSRLDKVEAEVQIDRLITGRLQSLQTYVTQQLIRAAEIRASANLAATKMSECVLGQSKRVDFCGKGYHLMSFPQCAPHGVVFLHVTYVPAQEKNFTTAPAICHDGKAHFPREGVFVSNGTHWFVTQRNFYEPQIITTDNTFVSGNCDVVIGIVNNTVYDPLQPELDSGGSGYIPEAPRDGQAYVRKDGEWVLLSTFL

SEQ ID NO: 10649 - protein, 1177 aa, Artificial Sequence
  SARS-CoV-2/Congo/94/2020__EPI_ISL_417947 spike protein (1-1147)(T874C_S1055C) Foldon construct
MFVFLVLLPLVSSQCVNLTTRTQLPPAYTNSFTRGVYYPDKVFRSSVLHSTQDLFLPFFSNVTWFHAIHVSGTNGTKRFDNPVLPFNDGVYFASTEKSNIIRGWIFGTTLDSKTQSLLIVNNATNVVIKVCEFQFCNDPFLGVYYHKNNKSWMESEFRVYSSANNCTFEYVSQPFLMDLEGKQGNFKNLREFVFKNIDGYFKIYSKHTPINLVRDLPQGFSALEPLVDLPIGINITRFQTLLALHRSYLTPGDSSSGWTAGAAAYYVGYLQPRTFLLKYNENGTITDAVDCALDPLSETKCTLKSFTVEKGIYQTSNFRVQPTESIVRFPNITNLCPFGEVFNATRFASVYAWNRKRISNCVADYSVLYNSASFSTFKCYGVSPTKLNDLCFTNVYADSFVIRGDEVRQIAPGQTGKIADYNYKLPDDFTGCVIAWNSNNLDSKVGGNYNYLYRLFRKSNLKPFERDISTEIYQAGSTPCNGVEGFNCYFPLQSYGFQPTNGVGYQPYRVVVLSFELLHAPATVCGPKKSTNLVKNKCVNFNFNGLTGTGVLTESNKKFLPFQQFGRDIADTTDAVRDPQTLEILDITPCSFGGVSVITPGTNTSNQVAVLYQGVNCTEVPVAIHADQLTPTWRVYSTGSNVFQTRAGCLIGAEHVNNSYECDIPIGAGICASYQTQTNSPRRARSVASQSIIAYTMSLGAENSVAYSNNSIAIPTNFTISVTTEILPVSMTKTSVDCTMYICGDSTECSNLLLQYGSFCTQLNRALTGIAVEQDKNTQEVFAQVKQIYKTPPIKDFGGFNFSQILPDPSKPSKRSFIEDILFNKVTLADAGFIKQYGDCLGDIAARDLICAQKFNGLTVLPPLLTDEMIAQYCSALLAGTITSGWTFGAGAALQIPFAMQMAYRFNGIGVTQNVLYENQKLIANQFNSAIGKIQDSLSSTASALGKLQDVVNQNAQALNTLVKQLSSNFGAISSVLNDILSRLDKVEAEVQIDRLITGRLQSLQTYVTQQLIRAAEIRASANLAATKMSECVLGQSKRVDFCGKGYHLMSFPQCAPHGVVFLHVTYVPAQEKNFTTAPAICHDGKAHFPREGVFVSNGTHWFVTQRNFYEPQIITTDNTFVSGNCDVVIGIVNNTVYDPLQPELDSGGSGYIPEAPRDGQAYVRKDGEWVLLSTFL

SEQ ID NO: 10650 - protein, 1177 aa, Artificial Sequence
  SARS-CoV-2/Congo/158/2020__EPI_ISL_417950 spike protein (1-1147)(T874C_S1055C) Foldon construct
MFVFLVLLPLVSSQCVNLTTRTQLPPAYTNSFTRGVYYPDKVFRSSVLHSTQDLFLPFFSNVTWFHAIHVSGTNGTKRFDNPVLPFNDGVYFASTEKSNIIRGWIFGTTLDSKTQSLLIVNNATNVVIKVCEFQFCNDPFLGVYYHKNNKSWMESEFRVYSSANNCTFEYVSQPFLMDLEGKQGNFKNLREFVFKNIDGYFKIYSKHTPINLVRDLPQGFSALEPLVDLPIGINITRFQTLLALHRSYLTPGDSSSGWTAGAAAYYVGYLQPRTFLLKYNENGTITDAVDCALDPLSETKCTLKSFTVEKGIYQTSNFRVQPTESIVRFPNITNLCPFGEVFNATRFASVYAWNRKRISNCVADYSVLYNSASFSTFKCYGVSPTKLNDLCFTNVYADSFVIRGDEVRQIAPGQTGKIADYNYKLPDDFTGCVIAWNSNNLDSKVGGNYNYLYRLFRKSNLKPFERDISTEIYQAGSTPCNGVEGFNCYFPLQSYGFQPTNGVGYQPYRVVVLSFELLHAPATVCGPKKSTNLVKNKCVNFNFNGLTGTGVLTESNKKFLPFQQFGRDIADTTDAVRDPQTLEILDITPCSFGGVSVITPGTNTSNQVAVLYQDVNCTEVPVAIHADQLTPTWRVYSTGSNVFQTRAGCLIGAEHVNNSYECDIPIGAGICASYQTQTNSPRRARSVASQSIIAYTMSLGAENSVAYSNNSIAIPTNFTISVTTEILPVSMTKTSVDCTMYICGDSTECSNLLLQYGSFCTQLNRALTGIAVEQDKNTQEVFAQVKQIYKTPPIKDFGGFNFSQILPDPSKPSKRSFIEDLLFNKVTLADAGFIKQYGDCLGDIAARDLICAQKFNGLTVLPPLLTDEMIAQYCSALLAGTITSGWTFGAGAALQIPFAMQMAYRFNGIGVTQNVLYENQKLIANQFNSAIGKIQDSLSSTASALGKLQDVVNQNAQALNTLVKQLSSNFGAISSVLNDILSRLDKVEAEVQIDRLITGRLQSLQTYVTQQLIRAAEIRASANLAATKMSECVLGQSKRVDFCGKGYHLMSFPQCAPHGVVFLHVTYVPAQEKNFTTAPAICHDGKAHFPREGVFVSNGTHWFVTQRNFYEPQIITTDNTFLSGNCDVVIGIVNNTVYDPLQPELDSGGSGYIPEAPRDGQAYVRKDGEWVLLSTFL

SEQ ID NO: 10651 - protein, 1177 aa, Artificial Sequence
  SARS-CoV-2/USA/UT-00034/2020__EPI_ISL_417977 spike protein (1-1147)(T874C_S1055C) Foldon construct
MFVFLVLLPLVSSQCVNLTTRTQLPPAYTNSFTRGVYYPDKVFRSSVLHSTQDLFLPFFSNVTWFHAIHVSGTNGTKRFDNPVLPFNDGVYFASTEKSNIIRGWIFGTTLDSKTQSLLIVNNATNVVIKVCEFQFCNDPFLGVYYYKNNKSWMESEFRVYSSANNCTFEYVSQPFLMDLEGKQGNFKNLREFVFKNIDGYFKIYSKHTPINLVRDLPQGFSALEPLVDLPIGINITRFQTLLALHRSYLTPGDSSSGWTAGAAAYYVGYLQPRTFLLKYNENGTITDAVDCALDPLSETKCTLKSFTVEKGIYQTSNFRVQPTESIVRFPNITNLCPFGEVFNATRFASVYAWNRKRISNCVADYSVLYNSASFSTFKCYGVSPTKLNDLCFTNVYADSFVIRGDEVRQIAPGQTGKIADYNYKLPDDFTGCVIAWNSNNLDSKVGGNYNYLYRLFRKSNLKPFERDISTEIYQAGSTPCNGVEGFNCYFPLQSYGFQPTNGVGYQPYRVVVLSFELLHAPATVCGPKKSTNLVKNKCVNFNFNGLTGTGVLTESNKKFLPFQQFGRDIADTTDAVRDPQTLEILDITPCSFGGVSVITPGTNTSNQVAVLYQGVNCTEVPVAIHADQLTPTWRVYSTGSNVFQTRAGCLIGAEHVNNSYECDIPIGAGICASYQTQTNSPRRARSVASQSIIAYTMSLGAENSVAYSNNSIAIPTNFTISVTTEILPVSMTKTSVDCTMYICGDSTECSNLLLQYGSFCTQLNRALTGIAVEQDKNTQEVFAQVKQIYKTPPIKDFGGFNFSQILPDPSKPSKRSFIEDLLFNKVTLADAGFIKQYGDCLGDIAARDLICAQKFNGLTVLPPLLTDEMIAQYCSALLAGTITSGWTFGAGAALQIPFAMQMAYRFNGIGVTQNVLYENQKLIANQFNSAIGKIQDSLSSTASALGKLQDVVNQNAQALNTLVKQLSSNFGAISSVLNDILSRLDKVEAEVQIDRLITGRLQSLQTYVTQQLIRAAEIRASANLAATKMSECVLGQSKRVDFCGKGYHLMSFPQCAPHGVVFLHVTYVPAQEKNFTTAPAICHDGKAHFPREGVFVSNGTHWFVTQRNFYEPQIITTDNTFVSGNCDVVIGIVNNTVYDPLQPELDSGGSGYIPEAPRDGQAYVRKDGEWVLLSTFL

SEQ ID NO: 10652 - protein, 1177 aa, Artificial Sequence
  SARS-CoV-2/USA/UT-00033/2020__EPI_ISL_417976 spike protein (1-1147)(T874C_S1055C) Foldon construct
MFVFLVLLPLVSSQCVNLTTRTQLPPAYTNSFTRGVYYPDKVFRSSVLHSTQDLFLPFFSNVTWFHAIHVSGTNGTKRFDNPVLPFNDGVYFASTEKSNIIRGWIFGTTLDSKTQSLLIVNNATNVVIKVCEFQFCNDPFLGVYYHKNNKSWMESEFRVYSSANNCTFEYVSQPFLMDLEGKQGNFKNLREFVFKNIDGYFKIYSKHTPINLVRDLPQGFSALEPLVDLPIGINITRFQTLLALHRSYLTPGDSSSGLTAGAAAYYVGYLQPRTFLLKYNENGTITDAVDCALDPLSETKCTLKSFTVEKGIYQTSNFRVQPTESIVRFPNITNLCPFGEVFNATRFASVYAWNRKRISNCVADYSVLYNSASFSTFKCYGVSPTKLNDLCFTNVYADSFVIRGDEVRQIAPGQTGKIADYNYKLPDDFTGCVIAWNSNNLDSKVGGNYNYLYRLFRKSNLKPFERDISTEIYQAGSTPCNGVEGFNCYFPLQSYGFQPTNGVGYQPYRVVVLSFELLHAPATVCGPKKSTNLVKNKCVNFNFNGLTGTGVLTESNKKFLPFQQFGRDIADTTDAVRDPQTLEILDITPCSFGGVSVITPGTNTSNQVAVLYQGVNCTEVPVAIHADQLTPTWRVYSTGSNVFQTRAGCLIGAEHVNNSYECDIPIGAGICASYQTQTNSPRRARSVASQSIIAYTMSLGAENSVAYSNNSIAIPTNFTISVTTEILPVSMTKTSVDCTMYICGDSTECSNLLLQYGSFCTQLNRALTGIAVEQDKNTQEVFAQVKQIYKTPPIKDFGGFNFSQILPDPSKPSKRSFIEDLLFNKVTLADAGFIKQYGDCLGDIAARDLICAQKFNGLTVLPPLLTDEMIAQYCSALLAGTITSGWTFGAGAALQIPFAMQMAYRFNGIGVTQNVLYENQKLIANQFNSAIGKIQDSLSSTASALGKLQDVVNQNAQALNTLVKQLSSNFGAISSVLNDILSRLDKVEAEVQIDRLITGRLQSLQTYVTQQLIRAAEIRASANLAATKMSECVLGQSKRVDFCGKGYHLMSFPQCAPHGVVFLHVTYVPAQEKNFTTAPAICHDGKAHFPREGVFVSNGTHWFVTQRNFYEPQIITTDNTFVSGNCDVVIGIVNNTVYDPLQPELDSGGSGYIPEAPRDGQAYVRKDGEWVLLSTFL

SEQ ID NO: 10653 - protein, 1177 aa, Artificial Sequence
  SARS-CoV-2/USA/WI-13/2020__EPI_ISL_417516 spike protein (1-1147)(T874C_S1055C) Foldon construct
MFVFLVLLPLVSSQCVNLTTRTQLPPAYTNSFTRGVYYPDKVFRSSVLHSTQDLFLPFFSNVTWFHAIHVSGTNGTKRFDNPVLPFNDGVYFASTEKSNIIRGWIFGTTLDSKTQSLLIVNNATNVVIKVCEFQFCNDPFLGVYYHKNNKSWMESEFRVYSSANNCTFEYVSQPFLMDLEGKQGNFKNLREFVFKNIDGYFKIYSKHTPINLVRDLPQGFSALEPLVDLPIGINITRFQTLLALHRSYLTPGDSSSGWTAGAAAYYVGYLQPRTFLLKYNENGTITDAVDCALDPLSETKCTLKSFTVEKGIYQTSNFRVLPTESIVRFPNITNLCPFGEVFNATRFASVYAWNRKRISNCVADYSVLYNSASFSTFKCYGVSPTKLNDLCFTNVYADSFVIRGDEVRQIAPGQTGKIADYNYKLPDDFTGCVIAWNSNNLDSKVGGNYNYLYRLFRKSNLKPFERDISTEIYQAGSTPCNGVEGFNCYFPLQSYGFQPTNGVGYQPYRVVVLSFELLHAPATVCGPKKSTNLVKNKCVNFNFNGLTGTGVLTESNKKFLPFQQFGRDIADTTDAVRDPQTLEILDITPCSFGGVSVITPGTNTSNQVAVLYQGVNCTEVPVAIHADQLTPTWRVYSTGSNVFQTRAGCLIGAEHVNNSYECDIPIGAGICASYQTQTNSPRRARSVASQSIIAYTMSLGAENSVAYSNNSIAIPTNFTISVTTEILPVSMTKTSVDCTMYICGDSTECSNLLLQYGSFCTQLNRALTGIAVEQDKNTQEVFAQVKQIYKTPPIKDFGGFNFSQILPDPSKPSKRSFIEDLLFNKVTLADAGFIKQYGDCLGDIAARDLICAQKFNGLTVLPPLLTDEMIAQYCSALLAGTITSGWTFGAGAALQIPFAMQMAYRFNGIGVTQNVLYENQKLIANQFNSAIGKIQDSLSSTASALGKLQDVVNQNAQALNTLVKQLSSNFGAISSVLNDILSRLDKVEAEVQIDRLITGRLQSLQTYVTQQLIRAAEIRASANLAATKMSECVLGQSKRVDFCGKGYHLMSFPQCAPHGVVFLHVTYVPAQEKNFTTAPAICHDGKAHFPREGVFVSNGTHWFVTQRNFYEPQIITTDNTFVSGNCDVVIGIVNNTVYDPLQPELDSGGSGYIPEAPRDGQAYVRKDGEWVLLSTFL

SEQ ID NO: 10654 - protein, 1176 aa, Artificial Sequence
  SARS-CoV-2/India/1-27/2020__EPI_ISL_413522 spike protein (1-1146)(T873C_S1054C) Foldon construct
MFVFLVLLPLVSSQCVNLTTRTQLPPAYTNSFTRGVYYPDKVFRSSVLHSTQDLFLPFFSNVTWFHAIHVSGTNGTKRFDNPVLPFNDGVYFASTEKSNIIRGWIFGTTLDSKTQSLLIVNNATNVVIKVCEFQFCNDPFLGVYHKNNKSWMESEFRVYSSANNCTFEYVSQPFLMDLEGKQGNFKNLREFVFKNIDGYFKIYSKHTPINLVRDLPQGFSALEPLVDLPIGINITRFQTLLALHRSYLTPGDSSSGWTAGAAAYYVGYLQPRTFLLKYNENGTITDAVDCALDPLSETKCTLKSFTVEKGIYQTSNFRVQPTESIVRFPNITNLCPFGEVFNATRFASVYAWNRKRISNCVADYSVLYNSASFSTFKCYGVSPTKLNDLCFTNVYADSFVIRGDEVIQIAPGQTGKIADYNYKLPDDFTGCVIAWNSNNLDSKVGGNYNYLYRLFRKSNLKPFERDISTEIYQAGSTPCNGVEGFNCYFPLQSYGFQPTNGVGYQPYRVVVLSFELLHAPATVCGPKKSTNLVKNKCVNFNFNGLTGTGVLTESNKKFLPFQQFGRDIADTTDAVRDPQTLEILDITPCSFGGVSVITPGTNTSNQVAVLYQDVNCTEVPVAIHADQLTPTWRVYSTGSNVFQTRAGCLIGAEHVNNSYECDIPIGAGICASYQTQTNSPRRARSVASQSIIAYTMSLGAENSVAYSNNSIAIPTNFTISVTTEILPVSMTKTSVDCTMYICGDSTECSNLLLQYGSFCTQLNRALTGIAVEQDKNTQEVFAQVKQIYKTPPIKDFGGFNFSQILPDPSKPSKRSFIEDLLFNKVTLADAGFIKQYGDCLGDIAARDLICAQKFNGLTVLPPLLTDEMIAQYCSALLAGTITSGWTFGAGAALQIPFAMQMAYRFNGIGVTQNVLYENQKLIANQFNSAIGKIQDSLSSTASALGKLQDVVNQNAQALNTLVKQLSSNFGAISSVLNDILSRLDKVEAEVQIDRLITGRLQSLQTYVTQQLIRAAEIRASANLAATKMSECVLGQSKRVDFCGKGYHLMSFPQCAPHGVVFLHVTYVPAQEKNFTTAPAICHDGKAHFPREGVFVSNGTHWFVTQRNFYEPQIITTDNTFVSGNCDVVIGIVNNTVYDPLQPELDSGGSGYIPEAPRDGQAYVRKDGEWVLLSTFL

SEQ ID NO: 10655 - protein, 1171 aa, Artificial Sequence
  SARS-CoV-2/pangolin/Guangxi/P4L/2017__EPI_ISL_410538 spike protein (1-1141)(T868C_S1049C) Foldon construct
MFVFLFVLPLVSSQCVNLTTRTGIPPGYTNSSTRGVYYPDKVFRSSILHLTQDLFLPFFSNVTWFNTINYQGGFKKFDNPVLPFNDGVYFASTEKSNIIRGWIFGTTLDARTQSLLIVNNATNVVIKVCEFQFCTDPFLGVYYHNNNKTWVENEFRVYSSANNCTFEYISQPFLMDLEGKQGNFKNLREFVFKNVDGYFKIYSKHTPIDLVRDLPRGFAALEPLVDLPIGINITRFQTLLALHRSYLTPGNLESGWTTGAAAYYVGYLQQRTFLLSYNQNGTITDAVDCSLDPLSETKCTLKSLTVEKGIYQTSNFRVQPTISIVRFPNITNLCPFGEVFNASKFASVYAWNRKRISNCVADYSVLYNSTSFSTFKCYGVSPTKLNDLCFTNVYADSFVVKGDEVRQIAPGQTGVIADYNYKLPDDFTGCVIAWNSVKQDALTGGNYGYLYRLFRKSKLKPFERDISTEIYQAGSTPCNGQVGLNCYYPLERYGFHPTTGVNYQPFRVVVLSFELLNGPATVCGPKLSTTLVKDKCVNFNFNGLTGTGVLTTSKKQFLPFQQFGRDISDTTDAVRDPQTLEILDITPCSFGGVSVITPGTNTSNQVAVLYQDVNCTEVPMAIHAEQLTPAWRVYSAGANVFQTRAGCLVGAEHVNNSYECDIPVGAGICASYHSMSSLRSVNQRSIIAYTMSLGAENSVAYSNNSIAIPTNFTISVTTEILPVSMTKTSVDCTMYICGDSIECSNLLLQYGSFCTQLNRALTGIAVEQDKNTQEVFAQVKQIYKTPPIKDFGGFNFSQILPDPSKPSKRSFIEDLLFNKVTLADAGFIKQYGDCLGDIAARDLICAQKFNGLTVLPPLLTDEMIAQYCSALLAGTITSGWTFGAGAALQIPFAMQMAYRFNGIGVTQNVLYENQKLIANQFNSAIGKIQDSLSSTASALGKLQDVVNQNAQALNTLVKQLSSNFGAISSVLNDILSRLDKVEAEVQIDRLITGRLQSLQTYVTQQLIRAAEIRASANLAATKMSECVLGQSKRVDFCGKGYHLMSFPQCAPHGVVFLHVTYVPAQEKNFTTAPAICHEGKAHFPREGVFVSNGTHWFITQRNFYEPQIITTDNTFVSGSCDVVIGIVNNTVYDPLQPELDSGGSGYIPEAPRDGQAYVRKDGEWVLLSTFL

SEQ ID NO: 10656 - protein, 1171 aa, Artificial Sequence
  SARS-CoV-2/pangolin/Guangxi/P5L/2017__EPI_ISL_410540 spike protein (1-1141)(T868C_S1049C) Foldon construct
MFVFLFVLPLVSSQCVNLTTRTGIPPGYTNSSTRGVYYPDKVFRSSILHLTQDLFLPFFSNVTWFNTINYQGGFKKFDNPVLPFNDGVYFASTEKSNIIRGWIFGTTLDARTQSLLIVNNATNVVIKVCEFQFCTDPFLGVYYHNNNKTWVENEFRVYSSANNCTFEYISQPFLMDLEGKQGNFKNLREFVFKNVDGYFKIYSKHTPIDLVRDLPRGFAALEPLVDLPIGINITRFQTLLALHRSYLTPGKLESGWTTGAAAYYVGYLQQRTFLLSYNQNGTITDAVDCSLDPLSETKCTLKSLTVEKGIYQTSNFRVQPTISIVRFPNITNLCPFGEVFNASKFASVYAWNRKRISNCVADYSVLYNSTSFSTFKCYGVSPTKLNDLCFTNVYADSFVVKGDEVRQIAPGQTGVIADYNYKLPDDFTGCVIAWNSVKQDALTGGNYGYLYRLFRKSKLKPFERDISTEIYQAGSTPCNGQVGLNCYYPLERYGFHPTTGVNYQPFRVVVLSFELLNGPATVCGPKLSTTLVKDKCVNFNFNGLTGTGVLTTSKKQFLPFQQFGRDISDTTDAVRDPQTLEILDITPCSFGGVSVITPGTNTSNQVAVLYQDVNCTEVPMAIHAEQLTPAWRVYSAGANVFQTRAGCLVGAEHVNNSYECDIPVGAGICASYHSMSSFRSVNQRSIIAYTMSLGAENSVAYSNNSIAIPTNFTISVTTEILPVSMTKTSVDCTMYICGDSIECSNLLLQYGSFCTQLNRALTGIAVEQDKNTQEVFAQVKQIYKTPPIKDFGGFNFSQILPDPSKPSKRSFIEDLLFNKVTLADAGFIKQYGDCLGDIAARDLICAQKFNGLTVLPPLLTDEMIAQYCSALLAGTITSGWTFGAGAALQIPFAMQMAYRFNGIGVTQNVLYENQKLIANQFNSAIGKIQDSLSSTASALGKLQDVVNQNAQALNTLVKQLSSNFGAISSVLNDILSRLDKVEAEVQIDRLITGRLQSLQTYVTQQLIRAAEIRASANLAATKMSECVLGQSKRVDFCGKGYHLMSFPQCAPHGVVFLHVTYVPAQEKNFTTAPAICHEGKAHFPREGVFVSNGTHWFITQRNFYEPQIITTDNTFVSGSCDVVIGIVNNTVYDPLQPELDSGGSGYIPEAPRDGQAYVRKDGEWVLLSTFL

SEQ ID NO: 10657 - protein, 1171 aa, Artificial Sequence
  SARS-CoV-2/pangolin/Guangxi/P5E/2017__EPI_ISL_410541 spike protein (1-1141)(T868C_S1049C) Foldon construct
MFVFLFVLPLVSSQCVNLTTRTGIPPGYTNSSTRGVYYPDKVFRSSILHLTQDLFLPFFSNVTWFNTITYQGGSKKFDNPVLPFNDGVYFASTEKSNIIRGWIFGTTLDARTQSLLIVNNATNVVIKVCEFQFCTDPFLGVYYHNNNKTWVENEFRVYSSANNCTFEYISQPFLMDLEGKQGNFKNLREFVFKNVDGYFKIYSKHTPIDLVRDLPRGFAALEPLVDLPIGINITRFQTLLALHRSYLTPGKLESGWTTGAAAYYVGYLQQRTFLLSYNQNGTITDAVDCSLDPLSETKCTLKSLTVEKGIYQTSNFRVQPTISIVRFPNITNLCPFGEVFNASKFASVYAWNRKRISNCVADYSVLYNSTSFSTFKCYGVSPTKLNDLCFTNVYADSFVVKGDEVRQIAPGQTGVIADYNYKLPDDFTGCVIAWNSVKQDALTGDNYGYLYRLFRKSKLKPFERDISTEIYQAGSTPCNGQVGLNCYYPLERYGFHPTTGVNYQPFRVVVLSFELLNGPATVCGPKLSTTLVKDKCVNFNFNGLTGTGVLTTSKKQFLPFQQFGRDISDTTDAVRDPQTLEILDITPCSFGGVSVITPGTNTSNQVAVLYQDVNCTEVPMAIHAEQLTPAWRVYSAGANVFQTRAGCLVGAEHVNNSYECDIPVGAGICASYHSMSSFRSVNQRSIIAYTMSLGAENSVAYSNNSIAIPTNFTISVTTEILPVSMTKTSVDCTMYICGDSIECSNLLLQYGSFCTQLNRALTGIAVEQDKNTQEVFAQVKQIYKTPPIKDFGGFNFSQILPDPSKPSKRSFIEDLLFNKVTLADAGFIKQYGDCLGDIAARDLICAQKFNGLTVLPPLLTDEMIAQYCSALLAGTITSGWTFGAGAALQIPFAMQMAYRFNGIGVTQNVLYENQKLIANQFNSAIGKIQDSLSSTASALGKLQDVVNQNAQALNTLVKQLSSNFGAISSVLNDILSRLDKVEAEVQIDRLITGRLQSLQTYVTQQLIRAAEIRASANLAATKMSECVLGQSKRVDFCGKGYHLMSFPQCAPHGVVFLHVTYVPAQEKNFTTAPAICHEGKAHFPREGVFVSNGTHWFITQRNFYEPQIITTDNTFVSGSCDVVIGIVNNTVYDPLQPELDSGGSGYIPEAPRDGQAYVRKDGEWVLLSTFL

SEQ ID NO: 10658 - protein, 1169 aa, Artificial Sequence
  SARS-CoV-2/pangolin/Guangxi/P1E/2017__EPI_ISL_410539 spike protein (1-1139)(T866C_S1047C) Foldon construct
MFVFLFVLPLVSSQCVNLTTRTGIQPGYTNSSTRGVYYPDKVFRSSILHLTQDLFLPFFSNVTWFNTINYQGGFKKFDNPVLPFNDGVYFASTEKSNIIRGWIFGTTLDARTQSLLIVNNATNVVIKVCEFQFCTDPFLGVYYHNNNKTWVENEFRVYSSANNCTFEYISQPFLMDLEGKQGNFKNLREFVFKNVDGYFKIYSKHTPIDLVRDLPRGFAALEPLVDLPIGINITRFQTLLALHRSYLTPGKLESGWTTGAAAYYVGYLQQRTFLLSYNQNGTITDAVDCSLDPLSETKCTLKSLTVEKGIYQTSNFRVQPTISIVRFPNITNLCPFGEVFNASKFASVYAWNRKRISNCVADYSVLYNSTSFSTFKCYGVSPTKLNDLCFTNVYADSFVVKGDEVRQIAPGQTGVIADYNYKLPDDFTGCVIAWNSVKQDALTGGNYLYRLFRKSKLKPFERDISTEIYQAGSTPCNGQVGLNCYYPLERYGFHPTTGVNYQPFRVVVLSFELLNGPATVCGPKLSTTLVKDKCVNFNFNGLTGTGVLTTSKKQFLPFQQFGRDISDTTDAVRDPQTLEILDITPCSFGGVSVITPGTNTSNQVAVLYQDVNCTEVPMAIHAEQLTPAWRVYSAGANVFQTRAGCLVGAEHVNNSYECDIPVGAGICASYHSMSSLRSVNQRSIIAYTMSLGAENSVAYSNNSIAIPTNFTISVTTEILPVSMTKTSVDCTMYICGDSIECSNLLLQYGSFCTQLNRALTGIAVEQDKNTQEVFAQVKQIYKTPPIKDFGGFNFSQILPDPSKPSKRSFIEDLLFNKVTLADAGFIKQYGDCLGDIAARDLICAQKFNGLTVLPPLLTDEMIAQYCSALLAGTITSGWTFGAGAALQIPFAMQMAYRFNGIGVTQNVLYENQKLIANQFNSAIGKIQDSLSSTASALGKLQDVVNQNAQALNTLVKQLSSNFGAISSVLNDILSRLDKVEAEVQIDRLITGRLQSLQTYVTQQLIRAAEIRASANLAATKMSECVLGQSKRVDFCGKGYHLMSFPQCAPHGVVFLHVTYVPAQEKNFTTAPAICHEGKAHFPREGVFVSNGTHWFITQRNFYEPQIITTDNTFVSGSCDVVIGIVNNTVYDPLQPELDSGGSGYIPEAPRDGQAYVRKDGEWVLLSTFL

SEQ ID NO: 10659 - protein, 1301 aa, Artificial Sequence
  SARS-CoV-2/Wuhan/WIV05/2019__EPI_ISL_402128 spike protein (1-1147) WhcAg construct
MFVFLVLLPLVSSQCVNLTTRTQLPPAYTNSFTRGVYYPDKVFRSSVLHSTQDLFLPFFSNVTWFHAIHVSGTNGTKRFDNPVLPFNDGVYFASTEKSNIIRGWIFGTTLDSKTQSLLIVNNATNVVIKVCEFQFCNDPFLGVYYHKNNKSWMESEFRVYSSANNCTFEYVSQPFLMDLEGKQGNFKNLREFVFKNIDGYFKIYSKHTPINLVRDLPQGFSALEPLVDLPIGINITRFQTLLALHRSYLTPGDSSSGWTAGAAAYYVGYLQPRTFLLKYNENGTITDAVDCALDPLSETKCTLKSFTVEKGIYQTSNFRVQPTESIVRFPNITNLCPFGEVFNATRFASVYAWNRKRISNCVADYSVLYNSASFSTFKCYGVSPTKLNDLCFTNVYADSFVIRGDEVRQIAPGQTGKIADYNYKLPDDFTGCVIAWNSNNLDSKVGGNYNYLYRLFRKSNLKPFERDISTEIYQAGSTPCNGVEGFNCYFPLQSYGFQPTNGVGYQPYRVVVLSFELLHAPATVCGPKKSTNLVKNKCVNFNFNGLTGTGVLTESNKKFLPFQQFGRDIADTTDAVRDPQTLEILDITPCSFGGVSVITPGTNTSNQVAVLYQDVNCTEVPVAIHADQLTPTWRVYSTGSNVFQTRAGCLIGAEHVNNSYECDIPIGAGICASYQTQTNSPRRARSVASQSIIAYTMSLGAENSVAYSNNSIAIPTNFTISVTTEILPVSMTKTSVDCTMYICGDSTECSNLLLQYGSFCTQLNRALTGIAVEQDKNTQEVFAQVKQIYKTPPIKDFGGFNFSQILPDPSKPSKRSFIEDLLFNKVTLADAGFIKQYGDCLGDIAARDLICAQKFNGLTVLPPLLTDEMIAQYTSALLAGTITSGWTFGAGAALQIPFAMQMAYRFNGIGVTQNVLYENQKLIANQFNSAIGKIQDSLSSTASALGKLQDVVNQNAQALNTLVKQLSSNFGAISSVLNDILSRLDKVEAEVQIDRLITGRLQSLQTYVTQQLIRAAEIRASANLAATKMSECVLGQSKRVDFCGKGYHLMSFPQSAPHGVVFLHVTYVPAQEKNFTTAPAICHDGKAHFPREGVFVSNGTHWFVTQRNFYEPQIITTDNTFVSGNCDVVIGIVNNTVYDPLQPELDSGGGGSDIDPYKEFGSSYQLLNFLPLDFFPDLNALVDTATALYEEELTGREHCSPHHTAIRQALVCWDELTKLIAWMSSNITSEQVRTIIVNHVNDTWGLKVRQSLWFHLSCLTFGQHTVQEFLVSFGVWIRTPAPYRPPNAPILSTLPEHTVIC

SEQ ID NO: 10660 - protein, 1297 aa, Artificial Sequence
  SARS-CoV-2/bat/Yunnan/RaTG13/2013__EPI_ISL_402131 spike protein (1-1143) WhcAg construct
MFVFLVLLPLVSSQCVNLTTRTQLPPAYTNSSTRGVYYPDKVFRSSVLHLTQDLFLPFFSNVTWFHAIHVSGTNGIKRFDNPVLPFNDGVYFASTEKSNIIRGWIFGTTLDSKTQSLLIVNNATNVVIKVCEFQFCNDPFLGVYYHKNNKSWMESEFRVYSSANNCTFEYVSQPFLMDLEGKQGNFKNLREFVFKNIDGYFKIYSKHTPINLVRDLPPGFSALEPLVDLPIGINITRFQTLLALHRSYLTPGDSSSGWTAGAAAYYVGYLQPRTFLLKYNENGTITDAVDCALDPLSETKCTLKSFTVEKGIYQTSNFRVQPTDSIVRFPNITNLCPFGEVFNATTFASVYAWNRKRISNCVADYSVLYNSTSFSTFKCYGVSPTKLNDLCFTNVYADSFVITGDEVRQIAPGQTGKIADYNYKLPDDFTGCVIAWNSKHIDAKEGGNFNYLYRLFRKANLKPFERDISTEIYQAGSKPCNGQTGLNCYYPLYRYGFYPTDGVGHQPYRVVVLSFELLNAPATVCGPKKSTNLVKNKCVNFNFNGLTGTGVLTESNKKFLPFQQFGRDIADTTDAVRDPQTLEILDITPCSFGGVSVITPGTNASNQVAVLYQDVNCTEVPVAIHADQLTPTWRVYSTGSNVFQTRAGCLIGAEHVNNSYECDIPIGAGICASYQTQTNSRSVASQSIIAYTMSLGAENSVAYSNNSIAIPTNFTISVTTEILPVSMTKTSVDCTMYICGDSTECSNLLLQYGSFCTQLNRALTGIAVEQDKNTQEVFAQVKQIYKTPPIKDFGGFNFSQILPDPSKPSKRSFIEDLLFNKVTLADAGFIKQYGDCLGDIAARDLICAQKFNGLTVLPPLLTDEMIAQYTSALLAGTITSGWTFGAGAALQIPFAMQMAYRFNGIGVTQNVLYENQKLIANQFNSAIGKIQDSLSSTASALGKLQDVVNQNAQALNTLVKQLSSNFGAISSVLNDILSRLDKVEAEVQIDRLITGRLQSLQTYVTQQLIRAAEIRASANLAATKMSECVLGQSKRVDFCGKGYHLMSFPQSAPHGVVFLHVTYVPAQEKNFTTAPAICHDGKAHFPREGVFVSNGTHWFVTQRNFYEPQIITTDNTFVSGSCDVVIGIVNNTVYDPLQPELDSGGGGSDIDPYKEFGSSYQLLNFLPLDFFPDLNALVDTATALYEEELTGREHCSPHHTAIRQALVCWDELTKLIAWMSSNITSEQVRTIIVNHVNDTWGLKVRQSLWFHLSCLTFGQHTVQEFLVSFGVWIRTPAPYRPPNAPILSTLPEHTVIC

SEQ ID NO: 10661 - protein, 1301 aa, Artificial Sequence
  SARS-CoV-2/Wuhan/HBCDC-HB-01/2019__EPI_ISL_402132 spike protein (1-1147) WhcAg construct
MFVFLVLLPLVSSQCVNLTTRTQLPPAYTNSITRGVYYPDKVFRSSVLHSTQDLFLPFFSNVTWFHAIHVSGTNGTKRFDNPVLPFNDGVYFASTEKSNIIRGWIFGTTLDSKTQSLLIVNNATNVVIKVCEFQFCNDPFLGVYYHKNNKSWMESEFRVYSSANNCTFEYVSQPFLMDLEGKQGNFKNLREFVFKNIDGYFKIYSKHTPINLVRDLPQGFSALEPLVDLPIGINITRFQTLLALHRSYLTPGDSSSGWTAGAAAYYVGYLQPRTFLLKYNENGTITDAVDCALDPLSETKCTLKSFTVEKGIYQTSNFRVQPTESIVRFPNITNLCPFGEVFNATRFASVYAWNRKRISNCVADYSVLYNSASFSTFKCYGVSPTKLNDLCFTNVYADSFVIRGDEVRQIAPGQTGKIADYNYKLPDDFTGCVIAWNSNNLDSKVGGNYNYLYRLFRKSNLKPFERDISTEIYQAGSTPCNGVEGFNCYFPLQSYGFQPTNGVGYQPYRVVVLSFELLHAPATVCGPKKSTNLVKNKCVNFNFNGLTGTGVLTESNKKFLPFQQFGRDIADTTDAVRDPQTLEILDITPCSFGGVSVITPGTNTSNQVAVLYQDVNCTEVPVAIHADQLTPTWRVYSTGSNVFQTRAGCLIGAEHVNNSYECDIPIGAGICASYQTQTNSPRRARSVASQSIIAYTMSLGAENSVAYSNNSIAIPTNFTISVTTEILPVSMTKTSVDCTMYICGDSTECSNLLLQYGSFCTQLNRALTGIAVEQDKNTQEVFAQVKQIYKTPPIKDFGGFNFSQILPDPSKPSKRSFIEDLLFNKVTLADAGFIKQYGDCLGDIAARDLICAQKFNGLTVLPPLLTDEMIAQYTSALLAGTITSGWTFGAGAALQIPFAMQMAYRFNGIGVTQNVLYENQKLIANQFNSAIGKIQDSLSSTASALGKLQDVVNQNAQALNTLVKQLSSNFGAISSVLNDILSRLDKVEAEVQIDRLITGRLQSLQTYVTQQLIRAAEIRASANLAATKMSECVLGQSKRVDFCGKGYHLMSFPQSAPHGVVFLHVTYVPAQEKNFTTAPAICHDGKAHFPREGVFVSNGTHWFVTQRNFYEPQIITTDNTFVSGNCDVVIGIVNNTVYDPLQPELDSGGGGSDIDPYKEFGSSYQLLNFLPLDFFPDLNALVDTATALYEEELTGREHCSPHHTAIRQALVCWDELTKLIAWMSSNITSEQVRTIIVNHVNDTWGLKVRQSLWFHLSCLTFGQHTVQEFLVSFGVWIRTPAPYRPPNAPILSTLPEHTVIC

SEQ ID NO: 10662 - protein, 1301 aa, Artificial Sequence
  SARS-CoV-2/Guangdong/20SF028/2020__EPI_ISL_403936 spike protein (1-1147) WhcAg construct
MFVFLVLLPLVSSQCVNLTTRTQLPPAYTNSFTRGVYYPDKVFRSSVLYSTQDLFLPFFSNVTWFHAIHVSGTNGTKRFDNPVLPFNDGVYFASTEKSNIIRGWIFGTTLDSKTQSLLIVNNATNVVIKVCEFQFCNDPFLGVYYHKNNKSWMESEFRVYSSANNCTFEYVSQPFLMDLEGKQGNFKNLREFVFKNIDGYFKIYSKHTPINLVRDLPQGFSALEPLVDLPIGINITRFQTLLALHRSYLTPGDSSSGWTAGAAAYYVGYLQPRTFLLKYNENGTITDAVDCALDPLSETKCTLKSFTVEKGIYQTSNFRVQPTESIVRFPNITNLCPFGEVFNATRFASVYAWNRKRISNCVADYSVLYNSASFSTFKCYGVSPTKLNDLCFTNVYADSFVIRGDEVRQIAPGQTGKIADYNYKLPDDFTGCVIAWNSNNLDSKVGGNYNYLYRLFRKSNLKPFERDISTEIYQAGSTPCNGVEGFNCYFPLQSYGFQPTNGVGYQPYRVVVLSFELLHAPATVCGPKKSTNLVKNKCVNFNFNGLTGTGVLTESNKKFLPFQQFGRDIADTTDAVRDPQTLEILDITPCSFGGVSVITPGTNTSNQVAVLYQDVNCTEVPVAIHADQLTPTWRVYSTGSNVFQTRAGCLIGAEHVNNSYECDIPIGAGICASYQTQTNSPRRARSVASQSIIAYTMSLGAENSVAYSNNSIAIPTNFTISVTTEILPVSMTKTSVDCTMYICGDSTECSNLLLQYGSFCTQLNRALTGIAVEQDKNTQEVFAQVKQIYKTPPIKDFGGFNFSQILPDPSKPSKRSFIEDLLFNKVTLADAGFIKQYGDCLGDIAARDLICAQKFNGLTVLPPLLTDEMIAQYTSALLAGTITSGWTFGAGAALQIPFAMQMAYRFNGIGVTQNVLYENQKLIANQFNSAIGKIQDSLSSTASALGKLQDVVNQNAQALNTLVKQLSSNFGAISSVLNDILSRLDKVEAEVQIDRLITGRLQSLQTYVTQQLIRAAEIRASANLAATKMSECVLGQSKRVDFCGKGYHLMSFPQSAPHGVVFLHVTYVPAQEKNFTTAPAICHDGKAHFPREGVFVSNGTHWFVTQRNFYEPQIITTDNTFVSGNCDVVIGIVNNTVYDPLQPELDSGGGGSDIDPYKEFGSSYQLLNFLPLDFFPDLNALVDTATALYEEELTGREHCSPHHTAIRQALVCWDELTKLIAWMSSNITSEQVRTIIVNHVNDTWGLKVRQSLWFHLSCLTFGQHTVQEFLVSFGVWIRTPAPYRPPNAPILSTLPEHTVIC

SEQ ID NO: 10663 - protein, 1301 aa, Artificial Sequence
  SARS-CoV-2/Shenzhen/SZTH-001/2020__EPI_ISL_406592 spike protein (1-1147) WhcAg construct
MFVFLVLLPLVSSQCVNLTTRTQLPPAYTNSFTRGVYYPDKVFRSSVLHSTQDLFLPFFSNVTWFHAIHVSGTNGTKRFDNPVLPFNDGVYFASTEKSNIIRGWIFGTTLDSKTQSLLIVNNATNVVIKVCEFQFCNDPFLGVYYHKNNKSWMESEFRVYSSANNCTFEYVSQPFLMDLEGKQGNFKNLREFVFKNIDGYFKIYSKHTPINLVRDLPQGFSALEPLVDLPIGINITRFQTLLALHRSYLTPGDSSSGWTAGAAAYYVGYLQPRTFLLKYNENGTITDAVDCALDPLSETKCTLKSFTVEKGIYQTSNFRVQPTESIVRFPNITNLCPFGEVFNATRFASVYAWNRKRISNCVADYSVLYNSASFSTFKCYGVSPTKLNDLCFTNVYADSFVIRGDEVRQIAPGQTGKIADYNYKLPDDFTGCVIAWNSNNLDSKVGGNYNYLYRLFRKSNLKPFERDISTEIYQAGSTPCNGVEGFNCYFPLQSYGFQPTNGVGYQPYRVVVLSFELLHAPATVCGPKKSTNLVKNKCVNFNFNGLTGTGVLTESNKKFLPFQQFGRDIADTTDAVRDPQTLEILDITPCSFGGVSVITPGTNTSNQVAVLYQDVNCTEVPVAIHADQLTPTWRVYSTGSNVFQTRAGCLIGAEHVNNSYECDIPIGAGICASYQTQTNSPRRARSVASQSIIAYTMSLGAENSVAYSNNSIAIPTNFTISVTTEILPVSMTKTSVDCTMYICGDSTECSNLLLQYGSFCTQLNRALTGIAVEQDKNTQEVFAQVKQIYKTPPIKDFGGFNFSQILPDPSKPSKRSFIEDLLFNKVTLADAGFIKQYGDCLGDIAARDLICAQKFNGLTVLPPLLTDEMIAQYTSALLAGTITSGWTFGAGAALQIPFAMQMAYRFNGIGVTQNVLYENQKLIANQFNSAIGKIQDSLSSTASALGKLQDVVNQNAQALNTLVKQLSSNFGAISSVLNDILSRLDKVEAEVQIDRLITGRLQSLQTYVTQQLIRAAEIRASANLAATKMSECVLGQSKRVDFCGKGYHLMSFPQSAPHGVVFLHVTYVPAQEKNFTTAPAICHDGKAHFPREGVFVSNGTHWFVTQRNFYEPQIITTDNTFVSGNCDVLIGIVNNTVYDPLQPELDSGGGGSDIDPYKEFGSSYQLLNFLPLDFFPDLNALVDTATALYEEELTGREHCSPHHTAIRQALVCWDELTKLIAWMSSNITSEQVRTIIVNHVNDTWGLKVRQSLWFHLSCLTFGQHTVQEFLVSFGVWIRTPAPYRPPNAPILSTLPEHTVIC

SEQ ID NO: 10664 - protein, 1301 aa, Artificial Sequence
  SARS-CoV-2/Shenzhen/SZTH-004/2020__EPI_ISL_406595 spike protein (1-1147) WhcAg construct
MFVFLVLLPLVSSQCVNLTTRTQLPPAYTNSFTRGVYYPDKVFRSSVLHSTQDLFLPFFSNVTWFHAIHVSGTNGTKRFDNPVLPFNDGVYFASTEKSNIIRGWIFGTTLDSKTQSLLIVNNATNVVIKVCEFQFCNDPFLGVYYHKNNKSWMESEFRVYSSANNCTFEYVSQPFLMDLEGKQGNFKNLREFVFKNIDGYFKIYSKHTPINLVRDLPQGFSALEPLVDLPIGINITRFQTLLALHRSYLTPGDSSSGWTAGAAAYYVGYLQPRTFLLKYNENGTITDAVDCALDPLSETKCTLKSFTVEKGIYQTSNFRVQPTESIVRFPNITNLCPFGEVFNATRFASVYAWDRKRISNCVAYYSVLYNSASFSTFKCYGVSPTKLNDLCFTNVYADSFVIRGDEVRQIAPGQTGKIADYNYKLPDDFTGCVIAWNSNNLDSKVGGNYNYLYRLFRKSNLKPFERDISTEIYQAGSTPCNGVEGFNCYFPLQSYGFQPTNGVGYQPYRVVVLSFELLHAPATVCGPKKSTNLVKNKCVNFNFNGLTGTGVLTESNKKFLPFQQFGRDIADTTDAVRDPQTLEILDITPCSFGGVSVITPGTNTSNQVAVLYQDVNCTEVPVAIHADQLTPTWRVYSTGSNVFQTRAGCLIGAEHVNNSYECDIPIGAGICASYQTQTNSPRRARSVASQSIIAYTMSLGAENSVAYSNNSIAIPTNFTISVTTEILPVSMTKTSVDCTMYICGDSTECSNLLLQYGSFCTQLNRALTGIAVEQDKNTQEVFAQVKQIYKTPPIKDFGGFNFSQILPDPSKPSKRSFIEDLLFNKVTLADAGFIKQYGDCLGDIAARDLICAQKFNGLTVLPPLLTDEMIAQYTSALLAGTITSGWTFGAGAALQIPFAMQMAYRFNGIGVTQNVLYENQKLIANQFNSAIGKIQDSLSSTASALGKLQDVVNQNAQALNTLVKQLSSNFGAISSVLNDILSRLDKVEAEVQIDRLITGRLQSLQTYVTQQLIRAAEIRASANLAATKMSECVLGQSKRVDFCGKGYHLMSFPQSAPHGVVFLHVTYVPAQEKNFTTAPAICHDGKAHFPREGVFVSNGTHWFVTQRNFYEPQIITTDNTFVSGNCDVVIGIVNNTVYDPLQPELDSGGGGSDIDPYKEFGSSYQLLNFLPLDFFPDLNALVDTATALYEEELTGREHCSPHHTAIRQALVCWDELTKLIAWMSSNITSEQVRTIIVNHVNDTWGLKVRQSLWFHLSCLTFGQHTVQEFLVSFGVWIRTPAPYRPPNAPILSTLPEHTVIC

SEQ ID NO: 10665 - protein, 1301 aa, Artificial Sequence
  SARS-CoV-2/France/IDF0372/2020__EPI_ISL_406596 spike protein (1-1147) WhcAg construct
MFVFLVLLPLVSSQCVNLTTRTQLPPAYTNSFTRGVYYPDKVFRSSVLHSTQDLFLPFFSNVTWFHAIHVSGTNGTKRFDNPVLPFNDGVYFASTEKSNIIRGWIFGTTLDSKTQSLLIVNNATNVVIKVCEFQFCNDPFLGVYYHKNNKSWMESEFRVYSSANNCTFEYVSQPFLMDLEGKQGNFKNLREFVFKNIDGYFKIYSKHTPINLVRDLPQGFSALEPLVDLPIGINITRFQTLLALHRSYLTPGDSSSGWTAGAAAYYVGYLQPRTFLLKYNENGTITDAVDCALDPLSETKCTLKSFTVEKGIYQTSNFRVQPTESIVRFPNITNLCPFGEVFNATRFASVYAWNRKRISNCVADYSFLYNSASFSTFKCYGVSPTKLNDLCFTNVYADSFVIRGDEVRQIAPGQTGKIADYNYKLPDDFTGCVIAWNSNNLDSKVGGNYNYLYRLFRKSNLKPFERDISTEIYQAGSTPCNGVEGFNCYFPLQSYGFQPTNGVGYQPYRVVVLSFELLHAPATVCGPKKSTNLVKNKCVNFNFNGLTGTGVLTESNKKFLPFQQFGRDIADTTDAVRDPQTLEILDITPCSFGGVSVITPGTNTSNQVAVLYQDVNCTEVPVAIHADQLTPTWRVYSTGSNVFQTRAGCLIGAEHVNNSYECDIPIGAGICASYQTQTNSPRRARSVASQSIIAYTMSLGAENSVAYSNNSIAIPTNFTISVTTEILPVSMTKTSVDCTMYICGDSTECSNLLLQYGSFCTQLNRALTGIAVEQDKNTQEVFAQVKQIYKTPPIKDFGGFNFSQILPDPSKPSKRSFIEDLLFNKVTLADAGFIKQYGDCLGDIAARDLICAQKFNGLTVLPPLLTDEMIAQYTSALLAGTITSGWTFGAGAALQIPFAMQMAYRFNGIGVTQNVLYENQKLIANQFNSAIGKIQDSLSSTASALGKLQDVVNQNAQALNTLVKQLSSNFGAISSVLNDILSRLDKVEAEVQIDRLITGRLQSLQTYVTQQLIRAAEIRASANLAATKMSECVLGQSKRVDFCGKGYHLMSFPQSAPHGVVFLHVTYVPAQEKNFTTAPAICHDGKAHFPREGVFVSNGTHWFVTQRNFYEPQIITTDNTFVSGNCDVVIGIVNNTVYDPLQPELDSGGGGSDIDPYKEFGSSYQLLNFLPLDFFPDLNALVDTATALYEEELTGREHCSPHHTAIRQALVCWDELTKLIAWMSSNITSEQVRTIIVNHVNDTWGLKVRQSLWFHLSCLTFGQHTVQEFLVSFGVWIRTPAPYRPPNAPILSTLPEHTVIC

SEQ ID NO: 10666 - protein, 1301 aa, Artificial Sequence
  SARS-CoV-2/Australia/VIC01/2020__EPI_ISL_406844 spike protein (1-1147) WhcAg construct
MFVFLVLLPLVSSQCVNLTTRTQLPPAYTNSFTRGVYYPDKVFRSSVLHSTQDLFLPFFSNVTWFHAIHVSGTNGTKRFDNPVLPFNDGVYFASTEKSNIIRGWIFGTTLDSKTQSLLIVNNATNVVIKVCEFQFCNDPFLGVYYHKNNKSWMESEFRVYSSANNCTFEYVSQPFLMDLEGKQGNFKNLREFVFKNIDGYFKIYSKHTPINLVRDLPQGFSALEPLVDLPIGINITRFQTLLALHRRYLTPGDSSSGWTAGAAAYYVGYLQPRTFLLKYNENGTITDAVDCALDPLSETKCTLKSFTVEKGIYQTSNFRVQPTESIVRFPNITNLCPFGEVFNATRFASVYAWNRKRISNCVADYSVLYNSASFSTFKCYGVSPTKLNDLCFTNVYADSFVIRGDEVRQIAPGQTGKIADYNYKLPDDFTGCVIAWNSNNLDSKVGGNYNYLYRLFRKSNLKPFERDISTEIYQAGSTPCNGVEGFNCYFPLQSYGFQPTNGVGYQPYRVVVLSFELLHAPATVCGPKKSTNLVKNKCVNFNFNGLTGTGVLTESNKKFLPFQQFGRDIADTTDAVRDPQTLEILDITPCSFGGVSVITPGTNTSNQVAVLYQDVNCTEVPVAIHADQLTPTWRVYSTGSNVFQTRAGCLIGAEHVNNSYECDIPIGAGICASYQTQTNSPRRARSVASQSIIAYTMSLGAENSVAYSNNSIAIPTNFTISVTTEILPVSMTKTSVDCTMYICGDSTECSNLLLQYGSFCTQLNRALTGIAVEQDKNTQEVFAQVKQIYKTPPIKDFGGFNFSQILPDPSKPSKRSFIEDLLFNKVTLADAGFIKQYGDCLGDIAARDLICAQKFNGLTVLPPLLTDEMIAQYTSALLAGTITSGWTFGAGAALQIPFAMQMAYRFNGIGVTQNVLYENQKLIANQFNSAIGKIQDSLSSTASALGKLQDVVNQNAQALNTLVKQLSSNFGAISSVLNDILSRLDKVEAEVQIDRLITGRLQSLQTYVTQQLIRAAEIRASANLAATKMSECVLGQSKRVDFCGKGYHLMSFPQSAPHGVVFLHVTYVPAQEKNFTTAPAICHDGKAHFPREGVFVSNGTHWFVTQRNFYEPQIITTDNTFVSGNCDVVIGIVNNTVYDPLQPELDSGGGGSDIDPYKEFGSSYQLLNFLPLDFFPDLNALVDTATALYEEELTGREHCSPHHTAIRQALVCWDELTKLIAWMSSNITSEQVRTIIVNHVNDTWGLKVRQSLWFHLSCLTFGQHTVQEFLVSFGVWIRTPAPYRPPNAPILSTLPEHTVIC

SEQ ID NO: 10667 - protein, 1301 aa, Artificial Sequence
  SARS-CoV-2/Germany/BavPat1/2020__EPI_ISL_406862 spike protein (1-1147) WhcAg construct
MFVFLVLLPLVSSQCVNLTTRTQLPPAYTNSFTRGVYYPDKVFRSSVLHSTQDLFLPFFSNVTWFHAIHVSGTNGTKRFDNPVLPFNDGVYFASTEKSNIIRGWIFGTTLDSKTQSLLIVNNATNVVIKVCEFQFCNDPFLGVYYHKNNKSWMESEFRVYSSANNCTFEYVSQPFLMDLEGKQGNFKNLREFVFKNIDGYFKIYSKHTPINLVRDLPQGFSALEPLVDLPIGINITRFQTLLALHRSYLTPGDSSSGWTAGAAAYYVGYLQPRTFLLKYNENGTITDAVDCALDPLSETKCTLKSFTVEKGIYQTSNFRVQPTESIVRFPNITNLCPFGEVFNATRFASVYAWNRKRISNCVADYSVLYNSASFSTFKCYGVSPTKLNDLCFTNVYADSFVIRGDEVRQIAPGQTGKIADYNYKLPDDFTGCVIAWNSNNLDSKVGGNYNYLYRLFRKSNLKPFERDISTEIYQAGSTPCNGVEGFNCYFPLQSYGFQPTNGVGYQPYRVVVLSFELLHAPATVCGPKKSTNLVKNKCVNFNFNGLTGTGVLTESNKKFLPFQQFGRDIADTTDAVRDPQTLEILDITPCSFGGVSVITPGTNTSNQVAVLYQGVNCTEVPVAIHADQLTPTWRVYSTGSNVFQTRAGCLIGAEHVNNSYECDIPIGAGICASYQTQTNSPRRARSVASQSIIAYTMSLGAENSVAYSNNSIAIPTNFTISVTTEILPVSMTKTSVDCTMYICGDSTECSNLLLQYGSFCTQLNRALTGIAVEQDKNTQEVFAQVKQIYKTPPIKDFGGFNFSQILPDPSKPSKRSFIEDLLFNKVTLADAGFIKQYGDCLGDIAARDLICAQKFNGLTVLPPLLTDEMIAQYTSALLAGTITSGWTFGAGAALQIPFAMQMAYRFNGIGVTQNVLYENQKLIANQFNSAIGKIQDSLSSTASALGKLQDVVNQNAQALNTLVKQLSSNFGAISSVLNDILSRLDKVEAEVQIDRLITGRLQSLQTYVTQQLIRAAEIRASANLAATKMSECVLGQSKRVDFCGKGYHLMSFPQSAPHGVVFLHVTYVPAQEKNFTTAPAICHDGKAHFPREGVFVSNGTHWFVTQRNFYEPQIITTDNTFVSGNCDVVIGIVNNTVYDPLQPELDSGGGGSDIDPYKEFGSSYQLLNFLPLDFFPDLNALVDTATALYEEELTGREHCSPHHTAIRQALVCWDELTKLIAWMSSNITSEQVRTIIVNHVNDTWGLKVRQSLWFHLSCLTFGQHTVQEFLVSFGVWIRTPAPYRPPNAPILSTLPEHTVIC

SEQ ID NO: 10668 - protein, 1301 aa, Artificial Sequence
  SARS-CoV-2/Wuhan/HBCDC-HB-02/2020__EPI_ISL_412978 spike protein (1-1147) WhcAg construct
MFVFLVLLPLVSSQCVNLTTRTQLPPAYTNSFTRGVYYPDKVFRSSVLHSTQDLFLPFFSNVTWFHAIHVSGTNGTKRFDNPVLPFNDGVYFASTEKSNIIRGWIFGTTLDSKTQSLLIVNNATNVVIKVCEFQFCNDPFLGVYYHKNNKSWMESEFRVYSSANNCTFEYVSQPFLMDLEGKQGNFKNLREFVFKNIDGYFKIYSKHTPINLVRDLPQGFSALEPLVDLPIGINITRFQTLLALHRSYLTPGDSSSGWTAGAAAYYVGYLQPRTFLLKYNENGTITDAVDCALDPLSETKCTLKSFTVEKGIYQTSNFRVQPTESIVRFPNITNLCPFGEVFNATRFASVYAWNRKRISNCVADYSVLYNSASFSTFKCYGVSPTKLNDLCFTNVYADSFVIRGDEVRQIAPGQTGKIADYNYKLPDDFTGCVIAWNSNNLDSKVGGNYNYLYRLFRKSNLKPFERDISTEIYQAGSTPCNGVEGFNCYFPLQSYGFQPTNGVGYQPYRVVVLSFELLHAPATVCGPKKSTNLVKNKCVNFNFNGLTGTGVLTESNKKFLPFQQFGRDIADTTDAVRDPQTLEILDITPCSFGGVSVITPGTNTSNQVAVLYQDVNCTEVPVAIHADQLTPTWRVYSTGSNVFQTRAGCLIGAEHVNNSYECDIPIGAGICASYQTQTNSPRRARSVASQSIIAYTMSLGAENSVAYSNNSIAIPTNFTISVTTEILPVSMTKTSVDCTMYICGDSTECSNFLLQYGSFCTQLNRALTGIAVEQDKNTQEVFAQVKQIYKTPPIKDFGGFNFSQILPDPSKPSKRSFIEDLLFNKVTLADAGFIKQYGDCLGDIAARDLICAQKFNGLTVLPPLLTDEMIAQYTSALLAGTITSGWTFGAGAALQIPFAMQMAYRFNGIGVTQNVLYENQKLIANQFNSAIGKIQDSLSSTASALGKLQDVVNQNAQALNTLVKQLSSNFGAISSVLNDILSRLDKVEAEVQIDRLITGRLQSLQTYVTQQLIRAAEIRASANLAATKMSECVLGQSKRVDFCGKGYHLMSFPQSAPHGVVFLHVTYVPAQEKNFTTAPAICHDGKAHFPREGVFVSNGTHWFVTQRNFYEPQIITTDNTFVSGNCDVVIGIVNNTVYDPLQPELDSGGGGSDIDPYKEFGSSYQLLNFLPLDFFPDLNALVDTATALYEEELTGREHCSPHHTAIRQALVCWDELTKLIAWMSSNITSEQVRTIIVNHVNDTWGLKVRQSLWFHLSCLTFGQHTVQEFLVSFGVWIRTPAPYRPPNAPILSTLPEHTVIC

SEQ ID NO: 10669 - protein, 1301 aa, Artificial Sequence
  SARS-CoV-2/Australia/QLD02/2020__EPI_ISL_407896 spike protein (1-1147) WhcAg construct
MFVFLVLLPLVSSQCVNLTTRTQLPPAYTNSFTRGVYYPDKVFRSSVLHSTQDLFLPFFSNVTWFHAIHVSGTNGTKRFDNPVLPFNDGVYFASTEKSNIIRGWIFGTTLDSKTQSLLIVNNATNVVIKVCEFQFCNDPFLGVYYHKNNKSWMESEFRVYSSANNCTFEYVSQPFLMDLEGKQGNFKNLREFVFKNIDGYFKIYSKHTPINLVRDLPQGFSALEPLVDLPIGINITRFQTLLALHRSYLTPGDSSSGWTAGAAAYYVGYLQPRTFLLKYNENGTITDAVDCALDPLSETKCTLKSFTVEKGIYQTSNFRVQPTESIVRFPNITNLCPFGEVFNATRFASVYAWNRKRISNCVADYSVLYNSASFSTFKCYGVSPTKLNDLCFTNVYADSFVIRGDEVRQIAPGQTGKIADYNYKLPDDFTGCVIAWNSNNLDSKVGGNYNYLYRLFRKSNLKPFERDISTEIYQAGSTPCNGVEGFNCYFPLQSYGFQPTNGVGYQPYRVVVLSFELLHAPATVCGPKKSTNLVKNKCVNFNFNGLTGTGVLTESNKKFLPFQQFGRDIADTTDAVRDPQTLEILDITPCSFGGVSVITPGTNTSNQVAVLYQDVNCTEVPVAIHADQLTPTWRVYSTGSNVFQTRAGCLIGAEHVNNSYECDIPIGAGICASYQTQTNSPRRARSVASQSIIAYTMSLGAENSVAYSNNSIAIPTNFTISVTTEILPVSMTKTSVDCTMYICGDSTECSNLLLQYGSFCTQLNRALTGIAVEQDKNTQEVFAQVKQIYKTPPIKDFGGFNFSQILPDPSKPSKRSFIEDLLFNKVTLADAGFIKQYGDCLGDIAARDLICAQKFNGLTVLPPLLTDEMIAQYTSALLAGTITSGWTFGAGAALQIPFAMQMAYRFNGIGVTQNVLYENQKLIANQFNSAIGKIQDSLSSTASALGKLQDVVNQNAQALNTLVKQLSSNFGAISSVLNDILSRLDKVEAEVQIDRLITGRLQSLQTYVTQQLIRAAEIRASANLAATKMSECVLGQSKRVDFCGKGYHLMSFPQSAPHGVVFLHVTYVPAQEKNFTTAPAICHDGKAHFPREGVFVSNGTHWFVTQRNFYEPQIITTDNTFVSGNCDVVIGIVNNTVYDPLQLELDSGGGGSDIDPYKEFGSSYQLLNFLPLDFFPDLNALVDTATALYEEELTGREHCSPHHTAIRQALVCWDELTKLIAWMSSNITSEQVRTIIVNHVNDTWGLKVRQSLWFHLSCLTFGQHTVQEFLVSFGVWIRTPAPYRPPNAPILSTLPEHTVIC

SEQ ID NO: 10670 - protein, 1301 aa, Artificial Sequence
  SARS-CoV-2/India/1-31/2020__EPI_ISL_413523 spike protein (1-1147) WhcAg construct
MFVFLVLLPLVSSQCVNLTTRTQLPPAYTNSFTRGVYYPDKVFRSSVLHSTQDLFLPFFSNVTWFHAIHVSGTNGTKRFDNPVLPFNDGVYFASTEKSNIIRGWIFGTTLDSKTQSLLIVNNATNVVIKVCEFQFCNDPFLGVYYHKNNKSWMESEFRVYSSANNCTFEYVSQPFLMDLEGKQGNFKNLREFVFKNIDGYFKIYSKHTPINLVRDLPQGFSALEPLVDLPIGINITRFQTLLALHRSYLTPGDSSSGWTAGAAAYYVGYLQPRTFLLKYNENGTITDAVDCALDPLSETKCTLKSFTVEKGIYQTSNFRVQPTESIVRFPNITNLCPFGEVFNATRFASVYAWNRKRISNCVADYSVLYNSASFSTFKCYGVSPTKLNDLCFTNVYADSFVIRGDEVRQIAPGQTGKIADYNYKLPDDFTGCVIAWNSNNLDSKVGGNYNYLYRLFRKSNLKPFERDISTEIYQAGSTPCNGVEGFNCYFPLQSYGFQPTNGVGYQPYRVVVLSFELLHAPATVCGPKKSTNLVKNKCVNFNFNGLTGTGVLTESNKKFLPFQQFGRDIADTTDAVRDPQTLEILDITPCSFGGVSVITPGTNTSNQVAVLYQDVNCTEVPVAIHADQLTPTWRVYSTGSNVFQTRAGCLIGAEHVNNSYECDIPIGAGICASYQTQTNSPRRARSVASQSIIAYTMSLGAENSVAYSNNSIAIPTNFTISVTTEILPVSMTKTSVDCTMYICGDSTECSNLLLQYGSFCTQLNRALTGIAVEQDKNTQEVFAQVKQIYKTPPIKDFGGFNFSQILPDPSKPSKRSFIEDLLFNKVTLADAGFIKQYGDCLGDIAARDLICAQKFNGLTVLPPLLTDEMIAQYTSALLAGTITSGWTFGAGAALQIPFAMQMAYRFNGIGVTQNVLYENQKLIANQFNSVIGKIQDSLSSTASALGKLQDVVNQNAQALNTLVKQLSSNFGAISSVLNDILSRLDKVEAEVQIDRLITGRLQSLQTYVTQQLIRAAEIRASANLAATKMSECVLGQSKRVDFCGKGYHLMSFPQSAPHGVVFLHVTYVPAQEKNFTTAPAICHDGKAHFPREGVFVSNGTHWFVTQRNFYEPQIITTDNTFVSGNCDVVIGIVNNTVYDPLQPELDSGGGGSDIDPYKEFGSSYQLLNFLPLDFFPDLNALVDTATALYEEELTGREHCSPHHTAIRQALVCWDELTKLIAWMSSNITSEQVRTIIVNHVNDTWGLKVRQSLWFHLSCLTFGQHTVQEFLVSFGVWIRTPAPYRPPNAPILSTLPEHTVIC

SEQ ID NO: 10671 - protein, 1301 aa, Artificial Sequence
  SARS-CoV-2/Guangdong/GD2020087-P0008/2020__EPI_ISL_413863 spike protein (1-1147) WhcAg construct
MFVFLVLLPLVSSQCVNLTTRTQLPPAYTNSFTRGVYYPDKVFRSSVLHSTQDLFLPFFSNVTWFHAIHVSGTNGTKRFDNPVLPFNDGVYFASTEKSNIIRGWIFGTTLDSKTQSLLIVNNATNVVIKVCEFQFCNDPFLGVYYHKNNKSWMESEFRVYSSANNCTFEYVSQPFLMDLEGKQGNFKNLREFVFKNIDGYFKIYSKHTPINLVRDLPQGFSALEPLVDLPIGINITRFQTLLALHRSYLTPGDSSSGWTAGAAAYYVGYLQPRTFLLKYNENGTITDAVDCALDPLSETKCTLKSFTVEKGIYQTSNFRVQPTESIVRFPNITNLCPFGEVFNATRFASVYAWNRKRISNCVADYSVLYNSASFSTFKCYGVSPTKLNDLCFTNVYADSFVIRGDEVREIAPGQTGKIADYNYKLPDDFTGCVIAWNSNNLDSKVGGNYNYLYRLFRKSNLKPFERDISTEIYQAGSTPCNGVEGFNCYFPLQSYGFQPTNGVGYQPYRVVVLSFELLHAPATVCGPKKSTNLVKNKCVNFNFNGLTGTGVLTESNKKFLPFQQFGRDIADTTDAVRDPQTLEILDITPCSFGGVSVITPGTNTSNQVAVLYQDVNCTEVPVAIHADQLTPTWRVYSTGSNVFQTRAGCLIGAEHVNNSYECDIPIGAGICASYQTQTNSPRRARSVASQSIIAYTMSLGAENSVAYSNNSIAIPTNFTISVTTEILPVSMTKTSVDCTMYICGDSTECSNLLLQYGSFCTQLNRALTGIAVEQDKNTQEVFAQVKQIYKTPPIKDFGGFNFSQILPDPSKPSKRSFIEDLLFNKVTLADAGFIKQYGDCLGDIAARDLICAQKFNGLTVLPPLLTDEMIAQYTSALLAGTITSGWTFGAGAALQIPFAMQMAYRFNGIGVTQNVLYENQKLIANQFNSAIGKIQDSLSSTASALGKLQDVVNQNAQALNTLVKQLSSNFGAISSVLNDILSRLDKVEAEVQIDRLITGRLQSLQTYVTQQLIRAAEIRASANLAATKMSECVLGQSKRVDFCGKGYHLMSFPQSAPHGVVFLHVTYVPAQEKNFTTAPAICHDGKAHFPREGVFVSNGTHWFVTQRNFYEPQIITTDNTFVSGNCDVVIGIVNNTVYDPLQPELDSGGGGSDIDPYKEFGSSYQLLNFLPLDFFPDLNALVDTATALYEEELTGREHCSPHHTAIRQALVCWDELTKLIAWMSSNITSEQVRTIIVNHVNDTWGLKVRQSLWFHLSCLTFGQHTVQEFLVSFGVWIRTPAPYRPPNAPILSTLPEHTVIC

SEQ ID NO: 10672 - protein, 1301 aa, Artificial Sequence
  SARS-CoV-2/Sweden/01/2020__EPI_ISL_411951 spike protein (1-1147) WhcAg construct
MFVFLVLLPLVSSQCVNLTTRTQLPPAYTNSFTRGVYYPDKVFRSSVLHSTQDLFLPFFSNVTWFHAIHVSGTNGTKRFDNPVLPFNDGVYFASTEKSNIIRGWIFGTTLDSKTQSLLIVNNATNVVIKVCEFQFCNDPFLGVYYHKNNKSWMESEFRVYSSANNCTFEYVSQPFLMDLEGKQGNFKNLREFVFKNIDGYFKIYSKHTPINLVRDLPQGFSALEPLVDLPIGINITRFQTLLALHRSYLTPGDSSSGWTAGAAAYYVGYLQPRTFLLKYNENGTITDAVDCALDPLSETKCTLKSFTVEKGIYQTSNFRVQPTESIVRFPNITNLCPFGEVFNATRFASVYAWNRKRISNCVADYSVLYNSASFSTFKCYGVSPTKLNDLCFTNVYADSFVIRGDEVRQIAPGQTGKIADYNYKLPDDFTGCVIAWNSNNLDSKVGGNYNYLYRLFRKSNLKPFERDISTEIYQAGSTPCNGVEGFNCYFPLQSYGFQPTNGVGYQPYRVVVLSFELLHAPATVCGPKKSTNLVKNKCVNFNFNGLTGTGVLTESNKKFLPFQQFGRDIADTTDAVRDPQTLEILDITPCSFGGVSVITPGTNTSNQVAVLYQDVNCTEVPVAIHADQLTPTWRVYSTGSNVFQTRAGCLIGAEHVNNSYECDIPIGAGICASYQTQTNSPRRARSVASQSIIAYTMSLGAENSVAYSNNSIAIPTNFTISVTTEILPVSMTKTSVDCTMYICGDSTECSNLLLQYGSFCTQLNRALTGIAVEQDKNTQEVFAQVKQIYKTPPIKDCGGFNFSQILPDPSKPSKRSFIEDLLFNKVTLADAGFIKQYGDCLGDIAARDLICAQKFNGLTVLPPLLTDEMIAQYTSALLAGTITSGWTFGAGAALQIPFAMQMAYRFNGIGVTQNVLYENQKLIANQFNSAIGKIQDSLSSTASALGKLQDVVNQNAQALNTLVKQLSSNFGAISSVLNDILSRLDKVEAEVQIDRLITGRLQSLQTYVTQQLIRAAEIRASANLAATKMSECVLGQSKRVDFCGKGYHLMSFPQSAPHGVVFLHVTYVPAQEKNFTTAPAICHDGKAHFPREGVFVSNGTHWFVTQRNFYEPQIITTDNTFVSGNCDVVIGIVNNTVYDPLQPELDSGGGGSDIDPYKEFGSSYQLLNFLPLDFFPDLNALVDTATALYEEELTGREHCSPHHTAIRQALVCWDELTKLIAWMSSNITSEQVRTIIVNHVNDTWGLKVRQSLWFHLSCLTFGQHTVQEFLVSFGVWIRTPAPYRPPNAPILSTLPEHTVIC

SEQ ID NO: 10673 - protein, 1301 aa, Artificial Sequence
  SARS-CoV-2/Tianmen/HBCDC-HB-07/2020__EPI_ISL_412983 spike protein (1-1147) WhcAg construct
MFVFLVLLPLVSSQCVNLTTRTQLPPAYTNSFTRGVYYPDKVFRSSVLHSTQDLFLPFFSNVTWFHAIHVSGTNGTKRFDNPVLPFNDGVYFASTEKSNIIRGWIFGTTLDSKTQSLLIVNNATNVVIKVCEFQFCNDPFLGVYYHKNNKSWMESEFRVYSSANNCTFEYVSQPFLMDLEGKQGNFKNLREFVFKNIDGYFKIYSKHTPINLVRDLPQGFSALEPLVDLPIGINITRFQTLLALHRSYLTPGDSSSGWTAGAAAYYVGYLQPRTFLLKYNENGTITDAVDCALDPLSETKCTLKSFTVEKGIYQTSNFRVQPTESIVRFPNITNLCPFGEVFNATRFASVYAWNRKRISNCVADYSVLYNSASFSTFKCYGVSPTKLNDLCFTNVYADSFVIRGDEVRQIAPGQTGKIADYNYKLPDDFTGCVIAWNSNNLDSKVGGNYNYLYRLFRKSNLKPFERDISTEIYQAGSTPCNGVEGFNCYFPLQSYGFQPTNGVGYQPYRVVVLSFELLHAPATVCGPKKSTNLVKNKCVNFNFNGLTGTGVLTESNKKFLPFQQFGRDIADTTDAVRDPQTLEILDITPCSFGGVSVITPGTNTSNQVAVLYQDLNCTEVPVAIHADQLTPTWRVYSTGSNVFQTRAGCLIGAEHVNNSYECDIPIGAGICASYQTQTNSPRRARSVASQSIIAYTMSLGAENSVAYSNNSIAIPTNFTISVTTEILPVSMTKTSVDCTMYICGDSTECSNLLLQYGSFCTQLNRALTGIAVEQDKNTQEVFAQVKQIYKTPPIKDFGGFNFSQILPDPSKPSKRSFIEDLLFNKVTLADAGFIKQYGDCLGDIAARDLICAQKFNGLTVLPPLLTDEMIAQYTSALLAGTITSGWTFGAGAALQIPFAMQMAYRFNGIGVTQNVLYENQKLIANQFNSAIGKIQDSLSSTASALGKLQDVVNQNAQALNTLVKQLSSNFGAISSVLNDILSRLDKVEAEVQIDRLITGRLQSLQTYVTQQLIRAAEIRASANLAATKMSECVLGQSKRVDFCGKGYHLMSFPQSAPHGVVFLHVTYVPAQEKNFTTAPAICHDGKAHFPREGVFVSNGTHWFVTQRNFYEPQIITTDNTFVSGNCDVVIGIVNNTVYDPLQPELDSGGGGSDIDPYKEFGSSYQLLNFLPLDFFPDLNALVDTATALYEEELTGREHCSPHHTAIRQALVCWDELTKLIAWMSSNITSEQVRTIIVNHVNDTWGLKVRQSLWFHLSCLTFGQHTVQEFLVSFGVWIRTPAPYRPPNAPILSTLPEHTVIC

SEQ ID NO: 10674 - protein, 1301 aa, Artificial Sequence
  SARS-CoV-2/Hong Kong/case42_VM20002493/2020__EPI_ISL_414527 spike protein (1-1147) WhcAg construct
MFVFLVLLPLVSSQCVNLTTRTQLPPAYTNSFTRGVYYPDKVFRSSVLHSTQDLFLPFFSNVTWFHAIHVSGTNGTKRFDNPVLPFNDGVYFASTEKSNIIRGWIFGTTLDSKTQSLLIVNNATNVVIKVCEFQFCNDPFLGVYYHKNNKSWMESEFRVYSSANNCTFEYVSQPFLMDLEGKQGNFKNLREFVFKNIDGYFKIYSKHTPINLVRDLPQGFSALEPLVDLPIGINITRFQTLLALHRSYLTPGDSSSGWTAGAAAYYVGYLQPRTFLLKYNENGTITDAVDCALDPLSETKCTLKSFTVEKGIYQTSNFRVQPTESIVRFPNITNLCPFGEVFNATRFASVYAWNRKRISNCVADYSVLYNSASFSTFKCYGVSPTKLNDLCFTNVYADSFVIRGDEVRQIAPGQTGKIADYNYKLPDDFTGCVIAWNSNNLDSKVGGNYNYLYRLFRKSNLKPFERDISTEIYQAGSTPCNGVEGFNCYFPLQSYGFQPTNGVGYQPYRVVVLSFELLHAPATVCGPKKSTNLVKNKCVNFNFNGLTGTGVLTESNKKFLPFQQFGRDIADTTDAVRDPQTLEILDITPCSFGGVSVITPGTNTSNQVAVLYQDVNCTEVPVAIHADQLTPTWRVYSTGSNVFQTRAGCLIGAEHVNNSYECDIPIGAGICASYQTQTNSPRRARSVASQSIIAYTMSLGAENSVAYSNNSIAIPTNFAISVTTEILPVSMTKTSVDCTMYICGDSTECSNLLLQYGSFCTQLNRALTGIAVEQDKNTQEVFAQVKQIYKTPPIKDFGGFNFSQILPDPSKPSKRSFIEDLLFNKVTLADAGFIKQYGDCLGDIAARDLICAQKFNGLTVLPPLLTDEMIAQYTSALLAGTITSGWTFGAGAALQIPFAMQMAYRFNGIGVTQNVLYENQKLIANQFNSAIGKIQDSLSSTASALGKLQDVVNQNAQALNTLVKQLSSNFGAISSVLNDILSRLDKVEAEVQIDRLITGRLQSLQTYVTQQLIRAAEIRASANLAATKMSECVLGQSKRVDFCGKGYHLMSFPQSAPHGVVFLHVTYVPAQEKNFTTAPAICHDGKAHFPREGVFVSNGTHWFVTQRNFYEPQIITTDNTFVSGNCDVVIGIVNNTVYDPLQPELDSGGGGSDIDPYKEFGSSYQLLNFLPLDFFPDLNALVDTATALYEEELTGREHCSPHHTAIRQALVCWDELTKLIAWMSSNITSEQVRTIIVNHVNDTWGLKVRQSLWFHLSCLTFGQHTVQEFLVSFGVWIRTPAPYRPPNAPILSTLPEHTVIC

SEQ ID NO: 10675 - protein, 1301 aa, Artificial Sequence
  SARS-CoV-2/USA/CruiseA-23/2020__EPI_ISL_414482 spike protein (1-1147) WhcAg construct
MFVFLVLLPLVSSQCVNLTTRTQLPPAYTNSFTRGVYYPDKVFRSSVLHSTQDLFLPFFSNVTWFHAIHVSGTNGTKRFDNPVLPFNDGVYFASTEKSNIIRGWIFGTTLDSKTQSLLIVNNATNVVIKVCEFQFCNDPFLGVYYHKNNKSWMESEFRVYSSANNCTFEYVSQPFLMDLEVKQGNFKNLREFVFKNIDGYFKIYSKHTPINLVRDLPQGFSALEPLVDLPIGINITRFQTLLALHRSYLTPGDSSSGWTAGAAAYYVGYLQPRTFLLKYNENGTITDAVDCALDPLSETKCTLKSFTVEKGIYQTSNFRVQPTESIVRFPNITNLCPFGEVFNATRFASVYAWNRKRISNCVADYSVLYNSASFSTFKCYGVSPTKLNDLCFTNVYADSFVIRGDEVRQIAPGQTGKIADYNYKLPDDFTGCVIAWNSNNLDSKVGGNYNYLYRLFRKSNLKPFERDISTEIYQAGSTPCNGVEGFNCYFPLQSYGFQPTNGVGYQPYRVVVLSFELLHAPATVCGPKKSTNLVKNKCVNFNFNGLTGTGVLTESNKKFLPFQQFGRDIADTTDAVRDPQTLEILDITPCSFGGVSVITPGTNTSNQVAVLYQDVNCTEVPVAIHADQLTPTWRVYSTGSNVFQTRAGCLIGAEHVNNSYECDIPIGAGICASYQTQTNSPRRARSVASQSIIAYTMSLGAENSVAYSNNSIAIPTNFTISVTTEILPVSMTKTSVDCTMYICGDSTECSNLLLQYGSFCTQLNRALTGIAVEQDKNTQEVFAQVKQIYKTPPIKDFGGFNFSQILPDPSKPSKRSFIEDLLFNKVTLADAGFIKQYGDCLGDIAARDLICAQKFNGLTVLPPLLTDEMIAQYTSALLAGTITSGWTFGAGAALQIPFAMQMAYRFNGIGVTQNVLYENQKLIANQFNSAIGKIQDSLSSTASALGKLQDVVNQNAQALNTLVKQLSSNFGAISSVLNDILSRLDKVEAEVQIDRLITGRLQSLQTYVTQQLIRAAEIRASANLAATKMSECVLGQSKRVDFCGKGYHLMSFPQSAPHGVVFLHVTYVPAQEKNFTTAPAICHDGKAHFPREGVFVSNGTHWFVTQRNFYEPQIITTDNTFVSGNCDVVIGIVNNTVYDPLQPELDSGGGGSDIDPYKEFGSSYQLLNFLPLDFFPDLNALVDTATALYEEELTGREHCSPHHTAIRQALVCWDELTKLIAWMSSNITSEQVRTIIVNHVNDTWGLKVRQSLWFHLSCLTFGQHTVQEFLVSFGVWIRTPAPYRPPNAPILSTLPEHTVIC

SEQ ID NO: 10676 - protein, 1301 aa, Artificial Sequence
  SARS-CoV-2/Hong Kong/case85_VM20002868/2020__EPI_ISL_414519 spike protein (1-1147) WhcAg construct
MFVFLVLVPLVSSQCVNLTTRTQLPPAYTNSFTRGVYYPDKVFRSSVLHSTQDLFLPFFSNVTWFHAIHVSGTNGTKRFDNPVLPFNDGVYFASTEKSNIIRGWIFGTTLDSKTQSLLIVNNATNVVIKVCEFQFCNDPFLGVYYHKNNKSWMESEFRVYSSANNCTFEYVSQPFLMDLEGKQGNFKNLREFVFKNIDGYFKIYSKHTPINLVRDLPQGFSALEPLVDLPIGINITRFQTLLALHRSYLTPGDSSSGWTAGAAAYYVGYLQPRTFLLKYNENGTITDAVDCALDPLSETKCTLKSFTVEKGIYQTSNFRVQPTESIVRFPNITNLCPFGEVFNATRFASVYAWNRKRISNCVADYSVLYNSASFSTFKCYGVSPTKLNDLCFTNVYADSFVIRGDEVRQIAPGQTGKIADYNYKLPDDFTGCVIAWNSNNLDSKVGGNYNYLYRLFRKSNLKPFERDISTEIYQAGSTPCNGVEGFNCYFPLQSYGFQPTNGVGYQPYRVVVLSFELLHAPATVCGPKKSTNLVKNKCVNFNFNGLTGTGVLTESNKKFLPFQQFGRDIADTTDAVRDPQTLEILDITPCSFGGVSVITPGTNTSNQVAVLYQDVNCTEVPVAIHADQLTPTWRVYSTGSNVFQTRAGCLIGAEHVNNSYECDIPIGAGICASYQTQTNSPRRARSVASQSIIAYTMSLGAENSVAYSNNSIAIPTNFTISVTTEILPVSMTKTSVDCTMYICGDSTECSNLLLQYGSFCTQLNRALTGIAVEQDKNTQEVFAQVKQIYKTPPIKDFGGFNFSQILPDPSKPSKRSFIEDLLFNKVTLADAGFIKQYGDCLGDIAARDLICAQKFNGLTVLPPLLTDEMIAQYTSALLAGTITSGWTFGAGAALQIPFAMQMAYRFNGIGVTQNVLYENQKLIANQFNSAIGKIQDSLSSTASALGKLQDVVNQNAQALNTLVKQLSSNFGAISSVLNDILSRLDKVEAEVQIDRLITGRLQSLQTYVTQQLIRAAEIRASANLAATKMSECVLGQSKRVDFCGKGYHLMSFPQSAPHGVVFLHVTYVPAQEKNFTTAPAICHDGKAHFPREGVFVSNGTHWFVTQRNFYEPQIITTDNTFVSGNCDVVIGIVNNTVYDPLQPELDSGGGGSDIDPYKEFGSSYQLLNFLPLDFFPDLNALVDTATALYEEELTGREHCSPHHTAIRQALVCWDELTKLIAWMSSNITSEQVRTIIVNHVNDTWGLKVRQSLWFHLSCLTFGQHTVQEFLVSFGVWIRTPAPYRPPNAPILSTLPEHTVIC

SEQ ID NO: 10677 - protein, 1301 aa, Artificial Sequence; identical to SEQ ID NO: 10667
  SARS-CoV-2/England/200990660/2020__EPI_ISL_414523 spike protein (1-1147) WhcAg construct

SEQ ID NO: 10678 - protein, 1301 aa, Artificial Sequence
  SARS-CoV-2/Australia/NSW09/2020__EPI_ISL_413595 spike protein (1-1147) WhcAg construct
MFVFLVLLPLVSSQCVNLTTRTQLPPAYTNSFTRGVYYPDKVFRSSVLHSTQDLFLPFFSNVTWFHAIHVSGTNGTKRFDNPVLPFNDGVYFASTEKSNIIRGWIFGTTLDSKTQSLLIVNNATNVVIKVCEFQFCNDPFLGVYYHKNNKSWMESEFRVYSSANNCTFEYVSQPFLMDLEGKQGNFKNLREFVFKNIDGYFKIYSKHTPINLVRDLPQGFSALEPLVDLPIGINITRFQTLLALHRSYLTPGDSSSGWTAGAAAYYVGYLQPRTFLLKYNENGTITDAVDCALDPLSETKCTLKSFTVEKGIYQTSNFRVQPTESIVRFPNITNLCPFGEVFNATRFASVYAWNRKRISNCVADYSVLYNSASFSTFKCYGVSPTKLNDLCFTNVYADSFVIRGDEVRQIAPGQTGKIADYNYKLPDDFTGCVIAWNSNNLDSKVGGNYNYLYRLFRKSNLKPFERDISTEIYQAGSTPCNGVEGFNCYFPLQSYGFQPTNGVGYQPYRVVVLSFELLHAPATVCGPKKSTNLVKNKCVNFNFNGLTGTGVLTESNKKFLPFQQFGRDIADTTDAVRDPQTLEILDITPCSFGGVSVITPGTNTSNQVAVLYQDVNCTEVPVAIHADQLTPTWRVYSTGSNVFQTRAGCLIGAEHVNNSYECDIPIGAGICASYQTQTNSPRRARSVASQSIIAYTMSLGAENSVAYSNNSIAIPTNFTISVTTEILPVSMTKTSVDCTMYICGDSTECSNLLLQYGSFCTQLNRALTGIAVEQDKNTQEVFAQVKQIYKTPPIKDFGGFNFSQILPDPSKPSKRSFIEDLLFNKVTLADAGFIKQYGDCLGDIAARDLICAQKFNGLTVLPPLLTDEMIAQYTSALLAGTITSGWTFGAGAALQIPFAMQMAYRFNGIGVTQNVLYENQKLIANQFNSAIGKIQDSLSFTASALGKLQDVVNQNAQALNTLVKQLSSNFGAISSVLNDILSRLDKVEAEVQIDRLITGRLQSLQTYVTQQLIRAAEIRASANLAATKMSECVLGQSKRVDFCGKGYHLMSFPQSAPHGVVFLHVTYVPAQEKNFTTAPAICHDGKAHFPREGVFVSNGTHWFVTQRNFYEPQIITTDNTFVSGNCDVVIGIVNNTVYDPLQPELDSGGGGSDIDPYKEFGSSYQLLNFLPLDFFPDLNALVDTATALYEEELTGREHCSPHHTAIRQALVCWDELTKLIAWMSSNITSEQVRTIIVNHVNDTWGLKVRQSLWFHLSCLTFGQHTVQEFLVSFGVWIRTPAPYRPPNAPILSTLPEHTVIC

SEQ ID NO: 10679 - protein, 1301 aa, Artificial Sequence; identical to SEQ ID NO: 10659
  SARS-CoV-2/Australia/NSW10/2020__EPI_ISL_413596 spike protein (1-1147) WhcAg construct

SEQ ID NO: 10680 - protein, 1301 aa, Artificial Sequence
  SARS-CoV-2/Switzerland/1000477797/2020__EPI_ISL_413023 spike protein (1-1147) WhcAg construct
MFVFLVLLPLVSSQCVNLTTRTQLPPAYTNSFTRGVYYPDKVFRSSVLHSTQDLFLPFFSNVTWFHAIHVSGTNGTKRFDNPVLPFNDGVYFASTEKSNIIRGWIFGTTLDSKTQSLLIVNNATNVVIKVCEFQFCNDPFLGVYYHKNNKSWMESEFRVYSSANNCTFEYVSQPFLMDLEGKQGNFKNLREFVFKNIDGYFNIYSKHTPINLVRDLPQGFSALEPLVDLPIGINITRFQTLLALHRSYLTPGDSSSGWTAGAAAYYVGYLQPRTFLLKYNENGTITDAVDCALDPLSETKCTLKSFTVEKGIYQTSNFRVQPTESIVRFPNITNLCPFGEVFNATRFASVYAWNRKRISNCVADYSVLYNSASFSTFKCYGVSPTKLNDLCFTNVYADSFVIRGDEVRQIAPGQTGKIADYNYKLPDDFTGCVIAWNSNNLDSKVGGNYNYLYRLFRKSNLKPFERDISTEIYQAGSTPCNGVEGFNCYFPLQSYGFQPTNGVGYQPYRVVVLSFELLHAPATVCGPKKSTNLVKNKCVNFNFNGLTGTGVLTESNKKFLPFQQFGRDIADTTDAVRDPQTLEILDITPCSFGGVSVITPGTNTSNQVAVLYQGVNCTEVPVAIHADQLTPTWRVYSTGSNVFQTRAGCLIGAEHVNNSYECDIPIGAGICASYQTQTNSPRRARSVASQSIIAYTMSLGAENSVAYSNNSIAIPTNFTISVTTEILPVSMTKTSVDCTMYICGDSTECSNLLLQYGSFCTQLNRALTGIAVEQDKNTQEVFAQVKQIYKTPPIKDFGGFNFSQILPDPSKPSKRSFIEDLLFNKVTLADAGFIKQYGDCLGDIAARDLICAQKFNGLTVLPPLLTDEMIAQYTSALLAGTITSGWTFGAGAALQIPFAMQMAYRFNGIGVTQNVLYENQKLIANQFNSAIGKIQDSLSSTASALGKLQDVVNQNAQALNTLVKQLSSNFGAISSVLNDILSRLDKVEAEVQIDRLITGRLQSLQTYVTQQLIRAAEIRASANLAATKMSECVLGQSKRVDFCGKGYHLMSFPQSAPHGVVFLHVTYVPAQEKNFTTAPAICHDGKAHFPREGVFVSNGTHWFVTQRNFYEPQIITTDNTFVSGNCDVVIGIVNNTVYDPLQPELDSGGGGSDIDPYKEFGSSYQLLNFLPLDFFPDLNALVDTATALYEEELTGREHCSPHHTAIRQALVCWDELTKLIAWMSSNITSEQVRTIIVNHVNDTWGLKVRQSLWFHLSCLTFGQHTVQEFLVSFGVWIRTPAPYRPPNAPILSTLPEHTVIC

SEQ ID NO: 10681 - protein, 1301 aa, Artificial Sequence
  SARS-CoV-2/Belgium/BA-02291/2020__EPI_ISL_415159 spike protein (1-1147) WhcAg construct
MFVFLVLLPLVSSQCVNLTTRTQLPPAYTNSFTRGVYYPDKVFRSSVLHSTQDLFLPFFSNVTWFHAIHVSGTNGTKRFDNPVLPFNDGVYFASTEKSNIIRGWIFGTTLDSKTQSLLIVNNATNVVIKVCEFQFCNDPFLGVYYHKNNKSWMESEFRVYSSANNCTFEYVSQPFLMDLEGKQGNFKNLREFVFKNIDGYFKIYSKHTPINLVRDLPQGFSALEPLVDLPIGINITRFQTLLALHRSYLTPGDSSSGWTAGAAAYYVGYLQPRTFLLKYNENGTITDAVDCALDPLSETKCTLKSFTVEKGIYQTSNFRVQPTESIVRFPNITNLCPFGEVFNATRFASVYAWNRKRISNCVADYSVLYNSASFSTFKCYGVSPTKLNDLCFTNVYADSFVIRGDEVRQIAPGQTGKIADYNYKLPDDFTGCVIAWNSNNLDSKVGGNYNYLYRLFRRSNLKPFERDISTEIYQAGSTPCNGVEGFNCYFPLQSYGFQPTNGVGYQPYRVVVLSFELLPAPATVCGPKKSTNLVKNKCVNFNFNGLTGTGVLTESNKKFLPFQQFGRDIADTTDAVRDPQTLEILDITPCSFGGVSVITPGTNTSNQVAVLYQGVNCTEVPVAIHADQLTPTWRVYSTGSNVFQTRAGCLIGAEHVNNSYECDIPIGAGICASYQTQTNSPRRARSVASQSIIAYTMSLGAENSVAYSNNSIAIPTNFTISVTTEILPVSMTKTSVDCTMYICGDSTECSNLLLQYGSFCTQLNRALTGIAVEQDKNTQEVFAQVKQIYKTPPIKDFGGFNFSQILPDPSKPSKRSFIEDLLFNKVTLADAGFIKQYGDCLGDIAARDLICAQKFNGLTVLPPLLTDEMIAQYTSALLAGTITSGWTFGAGAALQIPFAMQMAYRFNGIGVTQNVLYENQKLIANQFNSAIGKIQDSLSSAAPALGKLQDVVNQNAQALNTLVKQLSSNFGAISSVLNDILSRLDKVEAEVQIDRLITGRLQSLQTYVTQQLIRAAEIRASANLAATKMSECVLGQSKRVDFCGKGYHLMSFPQSAPHGVVFLHVTYVPAQEKNFTTAPAICHDGKAHFPREGVFVSNGTHWFVTQRNFYEPQIITTDNTFVSGNCDVVIGIVNNTVYDPLQPELDSGGGGSDIDPYKEFGSSYQLLNFLPLDFFPDLNALVDTATALYEEELTGREHCSPHHTAIRQALVCWDELTKLIAWMSSNITSEQVRTIIVNHVNDTWGLKVRQSLWFHLSCLTFGQHTVQEFLVSFGVWIRTPAPYRPPNAPILSTLPEHTVIC

SEQ ID NO: 10682 - protein, 1301 aa, Artificial Sequence
  SARS-CoV-2/USA/WA8-UW5/2020__EPI_ISL_413486 spike protein (1-1147) WhcAg construct
MFVFLVLLPLVSSQCVNLTTRTQLPPAYTNSFTRGVYYPDKVFRSSVLHSTQDLFLPFFSNVTWFHAIHVSGTNGTKRFDNPVLPFNDGVYFASTEKSNIIRGWIFGTTLDSKTQSLLIVNNATNVVIKVCEFQFCNDPFLGVYYHKNNKSWMESEFRVYSSANNCTFEYVSQPFLMDLEGKQGNFKNLREFVFKNIDGYFKIYSKHTPINLVRDLPQGFSALEPLVDLPIGINITRFQTLLALHRSYLTPGDSSSGWTAGAAAYYVGYLQPRTFLLKYNENGTITDAVDCALDPLSETKCTLKSFTVEKGIYQTSNFRVQPTESIVRFPNITNLCPFGEVFNATRFASVYAWNRKRISNCVADYSVLYNSASFSTFKCYGVSPTKLNDLCFTNVYADSFVIRGDEVRQIAPGQTGKIADYNYKLPDDFTGCVIAWNSNNLDSKVGGNYNYLYRLFRKSNLKPFERDISTEIYQAGSTPCNGVEGFNCYFPLQSYGFQPTNGVGYQPYRVVVLSFELLHAPATVCGPKKSTNLVKNKCVNFNFNGLTGTGVLTESNKKFLPFQQFGRDIADTTDAVRDPQTLEILDITPCSFGGVSVITPGTNTSNQVAVLYQDVNCTEVPVAIHADQLTPTWRVYSTGSNVFQTRAGCLIGAEYVNNSYECDIPIGAGICASYQTQTNSPRRARSVASQSIIAYTMSLGAENSVAYSNNSIAIPTNFTISVTTEILPVSMTKTSVDCTMYICGDSTECSNLLLQYGSFCTQLNRALTGIAVEQDKNTQEVFAQVKQIYKTPPIKDFGGFNFSQILPDPSKPSKRSFIEDLLFNKVTLADAGFIKQYGDCLGDIAARDLICAQKFNGLTVLPPLLTDEMIAQYTSALLAGTITSGWTFGAGAALQIPFAMQMAYRFNGIGVTQNVLYENQKLIANQFNSAIGKIQDSLSSTASALGKLQDVVNQNAQALNTLVKQLSSNFGAISSVLNDILSRLDKVEAEVQIDRLITGRLQSLQTYVTQQLIRAAEIRASANLAATKMSECVLGQSKRVDFCGKGYHLMSFPQSAPHGVVFLHVTYVPAQEKNFTTAPAICHDGKAHFPREGVFVSNGTHWFVTQRNFYEPQIITTDNTFVSGNCDVVIGIVNNTVYDPLQPELDSGGGGSDIDPYKEFGSSYQLLNFLPLDFFPDLNALVDTATALYEEELTGREHCSPHHTAIRQALVCWDELTKLIAWMSSNITSEQVRTIIVNHVNDTWGLKVRQSLWFHLSCLTFGQHTVQEFLVSFGVWIRTPAPYRPPNAPILSTLPEHTVIC

SEQ ID NO: 10683 - protein, 1301 aa, Artificial Sequence
  SARS-CoV-2/England/20102000506/2020__EPI_ISL_415147 spike protein (1-1147) WhcAg construct
MFVFLVLLPLVSSQCVNLTTRTQLPPAYTNSFTRGVYYPDKVFRSSVLHSTQDLFLPFFSNVTWFHAIHVSGTNGTKRFDNPVLPFNDGVYFASTEKSNIIRGWIFGTTLDSKTQSLLIVNNATNVVIKVCEFQFCNDPFLGVYYHKNNKSWMESEFRVYSSANNCTFEYVSQPFLMDLEGKQGNFKNLREFVFKNIDGYFKIYSKHTPINLVRDLPQGFSALEPLVDLPIGINITRFQTLLALHRSYLTPGDSSSGWTAGAAAYYVGYLQPRTFLLKYNENGTITDAVDCALDPLSETKCTLKSFTVEKGIYQTSNFRVQPTESIVRFPNITNLCPFGEVFNATRFASVYAWNRKRISNCVADYSVLYNSASFSTFKCYGVSPTKLNDLCFTNVYADSFVIRGDEVRQIAPGQTGKIADYNYKLPDDFTGCVIAWNSNNLDSKVGGNYNYLYRLFRKSNLKPFERDISTEIYQAGSTPCNGVEGFNCYFPLQSYGFQPTNGVGYQPYRVVVLSFELLHAPATVCGPKKSTNLVKNKCVNFNFNGLTGTGVLTESNKKFLPFQQFGRDIADTTDAVRDPQTLEILDITPCSFGGVSVITPGTNTSNQVAVLYQGVNCTEVPVAIHADQLTPTWRVYSTGSNVFQTRAGCLIGAEHVNNSYECDIPIGAGICASYQTQTNSPRRARSVASQSIIAYTMSLGAENSVAYSNNSIAIPTNFTISVTTEILPVSMTKTSVDCTMYICGDSTECSNLLLQYGSFCTQLNRALTGIAVEQDKNTQEVFAQVKQIYKTPPIKDFGGFNFSQILPDPSKPSKRSFIEDLLFNKVTLADAGFIKQYGYCLGDIAARDLICAQKFNGLTVLPPLLTDEMIAQYTSALLAGTITSGWTFGAGAALQIPFAMQMAYRFNGIGVTQNVLYENQKLIANQFNSAIGKIQDSLSSTASALGKLQDVVNQNAQALNTLVKQLSSNFGAISSVLNDILSRLDKVEAEVQIDRLITGRLQSLQTYVTQQLIRAAEIRASANLAATKMSECVLGQSKRVDFCGKGYHLMSFPQSAPHGVVFLHVTYVPAQEKNFTTAPAICHDGKAHFPREGVFVSNGTHWFVTQRNFYEPQIITTDNTFVSGNCDVVIGIVNNTVYDPLQPELDSGGGGSDIDPYKEFGSSYQLLNFLPLDFFPDLNALVDTATALYEEELTGREHCSPHHTAIRQALVCWDELTKLIAWMSSNITSEQVRTIIVNHVNDTWGLKVRQSLWFHLSCLTFGQHTVQEFLVSFGVWIRTPAPYRPPNAPILSTLPEHTVIC

SEQ ID NO: 10684 - protein, 1301 aa, Artificial Sequence
  SARS-CoV-2/Belgium/VAG-03013/2020__EPI_ISL_415155 spike protein (1-1147) WhcAg construct
MFVFLVLLPLVSSQCVNLTTRTQLPPAYTNSFTRGVYYPDKVFRSSVLHSTQDLFLPFFSNVTWFHAIHVSGTNGTKRFDNPVLPFNDGVYFASTEKSNIIRGWIFGTTLDSKTQSLLIVNNATNVVIKVCEFQFCNDPFLGVYYHKNNKSWMESEFRVYSSANNCTFEYVSQPFLMDLEGKQGNFKNLREFVFKNIDGYFKIYSKHTPINLVRDLPQGFSALEPLVDLPIGINITRFQTLLALHRSYLTPGDSSSGWTAGAAAYYVGYLQPRTFLLKYNENGTITDAVDCALDPLSETKCTLKSFTVEKGIYQTSNFRVQPTESIVRFPNITNLCPFGEVFNATRFASVYAWNRKRISNCVADYSVLYNSASFSTFKCYGVSPTKLNDLCFTNVYADSFVIRGDEVRQIAPGQTGKIADYNYKLPDDFTGCVIAWNSNNLDSKVGGNYNYLYRLFRKSNLKPFERDISTEIYQAGSTPCNGVEGFNCYFPLQSYGFQPTNGVGYQPYRVVVLSFELLHAPATVCGPKKSTNLVKNKCVNFNFNGLTGTGVLTESNKKFLPFQQFGRDIADTTDAVRDPQTLEILDITPCSFGGVSVITPGTNTSNQVAVLYQGVNCTEVPVAIHADQLTPTWRVYSTGSNVFQTRAGCLIGAEHVNNSYECDIPIGAGICASYQTQTNSPRRARSVASQSIIAYTMSLGAENSVAYSNNSIAIPTNFTISVTTEILPVSMTKTSVDCTMYICGDSTECSNLLLQYGSFCTQLNRALTGIAVEQDKNTQEVFAQVKQIYKTPPIKDFGGFNFSQILPDPSKPSKRSFIEDLLFNKVTLADAGFIKQYGDCLGDIAARDLICAQKFNGLTVLPPLLTDEMIAQYTSALLAGTITSGWTFGAGAALQIPFAMQMAYRFNGIGVTQNVLYENQKLIANQFNSAIGKIQDSLSSTATALGKLQDVVNQNAQALNTLVKQLSSNFGAISSVLNDILSRLDKVEAEVQIDRLITGRLQSLQTYVTQQLIRAAEIRASANLAATKMSECVLGQSKRVDFCGKGYHLMSFPQSAPHGVVFLHVTYVPAQEKNFTTAPAICHDGKAHFPREGVFVSNGTHWFVTQRNFYEPQIITTDNTFVSGNCDVVIGIVNNTVYDPLQPELDSGGGGSDIDPYKEFGSSYQLLNFLPLDFFPDLNALVDTATALYEEELTGREHCSPHHTAIRQALVCWDELTKLIAWMSSNITSEQVRTIIVNHVNDTWGLKVRQSLWFHLSCLTFGQHTVQEFLVSFGVWIRTPAPYRPPNAPILSTLPEHTVIC

SEQ ID NO: 10685 - protein, 1301 aa, Artificial Sequence
  SARS-CoV-2/Belgium/BC-03016/2020__EPI_ISL_415157 spike protein (1-1147) WhcAg construct
MFVFLVLLPLVSSQCVNLTTRTQLPPAYTNSFTRGVYYPDKVFRSSVLHSTQDLFLPFFSNVTWFHAIHVSGTNGTKRFDNPVLPFNDGVYFASTEKSNIIRGWIFGTTLDSKTQSLLIVNNATNVVIKVCEFQFCNDPFLGVYYHKNNKSWMESEFRVYSSANNCTFEYVSQPFLMDLEGKQGNFKNLREFVFKNIDGYFKIYSKHTPINLVRDLPQGFSALEPLVDLPIGINITRFQTLLALHRSYLTPGDSSSGWTAGAAAYYVGYLQPRTFLLKYNENGTITDAVDCALDPLSETKCTLKSFTVEKGIYQTSNFRVQPTESIVRFPNITNLCPFGEVFNATRFASVYAWNRKRISNCVADYSVLYNSASFSTFKCYGVSPTKLNDLCFTNVYADSFVIRGDEVRQIAPGQTGKIADYNYKLPDDFTGCVIAWNSNNLDSKVGGNYNYLYRLFRKSNLKPFERDISTEIYQAGSTPCNGVEGFNCYFPLQSYGFQPTNGVGYQPYRVVVLSFELLHAPATVCGPKKSTNLVKNKCVNFNFNGLTGTGVLTESNKKFLPFQQFGRDIADTTDAVRDPQTLEILDITPCSFGGVSVITPGTNTSNQVAVLYQGVNCTEVPVAIHADQLTPTWRVYSTGSNVFQTRAGCLIGAEHVNNSYECDIPIGAGICASYQTQTNSPRRARSVASQSIIAYTMSLGAENSVAYSNNSIAIPTNFTISVTTEILPVSMTKTSVDCTMYICGDSTECSNLLLQYGSFCTQLNRALTGIAVEQDKNTQEVFAQVKQIYKTPPIKDFGGFNFSQILPDPSKPSKRSFIEDLLFNKVTLADAGFIKQYGDCLGDIAARDLICAQKFNGLTVLPPLLTDEMIAQYTSALLAGTITSGWTFGAGAALQIPFAMQMAYRFNGIGVTQNVLYENQKLIANQFNSAIGKIQDSLSSTAPALGKLQDVVNQNAQALNTLVKQLSSNFGAISSVLNDILSRLDKVEAEVQIDRLITGRLQSLQTYVTQQLIRAAEIRASANLAATKMSECVLGQSKRVDFCGKGYHLMSFPQSAPHGVVFLHVTYVPAQEKNFTTAPAICHDGKAHFPREGVFVSNGTHWFVTQRNFYEPQIITTDNTFVSGNCDVVIGIVNNTVYDPLQPELDSGGGGSDIDPYKEFGSSYQLLNFLPLDFFPDLNALVDTATALYEEELTGREHCSPHHTAIRQALVCWDELTKLIAWMSSNITSEQVRTIIVNHVNDTWGLKVRQSLWFHLSCLTFGQHTVQEFLVSFGVWIRTPAPYRPPNAPILSTLPEHTVIC

SEQ ID NO: 10686 - protein, 1301 aa, Artificial Sequence
  SARS-CoV-2/Germany/BavPat3/2020__EPI_ISL_414521 spike protein (1-1147) WhcAg construct
MFVFLVLLPLVSSQCVNLTTRTQLPPAYTNSFTRGVYYPDKVFRSSVLHSTQDLFLPFFSNVTWFHAIHVSGTNGTKRFDNPVLPFNDGVYFASTEKSNIIRGWIFGTTLDSKTQSLLIVNNATNVVIKVCEFQFCNDPFLGVYYHKNNKSWMESEFRVYSSANNCTFEYVSQPFLMDLEGKQGNFKNLREFVFKNIDGYFKIYSKHTPINLVRDLPQGFSALEPLVDLPIGINITRFQTLLALHRSYLTPGDSSSGWTAGAAAYYVGYLQPRTFLLKYNENGTITDAVDCALDPLSETKCTLKSFTVEKGIYQTSNFRVQPTESIVRFPNITNLCPFGEVFNATRFASVYAWNRKRISNCVADYSVLYNSASFSTFKCYGVSPTKLNDLCFTNVYADSFVIRGDEVRQIAPGQTGKIADYNYKLPDDFTGCVIAWNSNNLDSKVGGNYNYLYRLFRKSNLKPFERDISTEIYQAGSTPCNGVEGFNCYFPLQSYGFQPTNGVGYQPYRVVVLSFELLHAPATVCGPKKSTNLVKNKCVNFNFNGLTGTGVLTESNKKFLPFQQFGRDIADTTDAVRDPQTLEILDITPCSFGGVSVITPGTNTSNQVAVLYQDVNCTEVPVAIHADQLTPTWRVYSTGSNVFQTRAGCLIGAEHVNNSYECDIPIGAGICASYQTQTNSPRRARSVASQSIIAYTMSLGAENSVAYSNNSIAIPTNFTISVTTEILPVSMTKTSVDCTMYICGDSTECSNLLLQYGSFCTQLNRALTGIAVEQDKNTQQVFAQVKQIYKTPPIKDFGGFNFSQILPDPSKPSKRSFIEDLLFNKVTLADAGFIKQYGDCLGDIAARDLICAQKFNGLTVLPPLLTDEMIAQYTSALLAGTITSGWTFGAGAALQIPFAMQMAYRFNGIGVTQNVLYENQKLIANQFNSAIGKIQDSLSSTASALGKLQDVVNQNAQALNTLVKQLSSNFGAISSVLNDILSRLDKVEAEVQIDRLITGRLQSLQTYVTQQLIRAAEIRASANLAATKMSECVLGQSKRVDFCGKGYHLMSFPQSAPHGVVFLHVTYVPAQEKNFTTAPAICHDGKAHFPREGVFVSNGTHWFVTQRNFYEPQIITTDNTFVSGNCDVVIGIVNNTVYDPLQPELDSGGGGSDIDPYKEFGSSYQLLNFLPLDFFPDLNALVDTATALYEEELTGREHCSPHHTAIRQALVCWDELTKLIAWMSSNITSEQVRTIIVNHVNDTWGLKVRQSLWFHLSCLTFGQHTVQEFLVSFGVWIRTPAPYRPPNAPILSTLPEHTVIC

SEQ ID NO: 10687 - protein, 1301 aa, Artificial Sequence
  SARS-CoV-2/France/HF1805/2020__EPI_ISL_414628 spike protein (1-1147) WhcAg construct
MFVFLVLLPLVSSQCVNLTTRTQLPPAYTNSFTRGVYYPDKVFRSSVLHSTQDLFLPFFSNVTWFHAIHVSGTNGTKRFDNPVLPFNDGVYFASTEKSNIIRGWIFGTTLDSKTQSLLIVNNATNVVIKVCEFQFCNDPFLGVYYHKNNKSWMESEFRVYSSANNCTFEYVSQPFLMDLEGKQGNFKNLREFVFKNIDGYFKIYSKHTPINLVRDLPQGFSALEPLVDLPIGINITRFQTLLALHRSYLTPGDSSSGWTAGAAAYYVGYLQPRTFLLKYNENGTITDAVDCALDPLSETKCTLKSFTVEKGIYQTSNFRVQPTESIVRFPNITNLCPFGEVFNATRFASVYAWNRKRISNCVADYSVLYNSASFSTFKCYGVSPTKLNDLCFTNVYADSFVIRGDEVRQIAPGQTGKIADYNYKLPDDFTGCVIAWNSNNLDSKVGGNYNYLYRLFRKSNLKPFERDISTEIYQAGSTPCNGVEGFNCYFPLQSYGFQPTNGVGYQPYRVVVLSFELLHAPATVCGPKKSTNLVKNKCVNFNFNGLTGTGVLTESNKKFLPFQQFGRDIADTTDAVRDPQTLEILDITPCSFGGVSVITPGTNTSNQVAVLYQGVNCTEVPVAIHADQLTPTWRVYSTGSNVFQTRAGCLIGAEHVNNSYECDIPIGAGICASYQTQTNSPRRARSVASQSIIAYTMSLGAENSVAYSNNSIAIPTNFTISVTTEILPVSMTKTSVDCTMYICGDSTECSNLLLQYGSFCTQLNRALTGIAVEQDKNTQEVFAQVKQIYKTPPIKDFGGFNFSQILPDPSKPSKRSFIEDLLFNKVTLADAGFIKQYGDCLGDIAARDLICAQKFNGLTVLPPLLTDEMIAQYTSALLAGTITSGWTFGAGAALQIPFAMQMAYRFNGIGVTQNVLYENQKLIANQFNSAIGKIQDSLSSTASALGKLQDVVNQNAQALNTLVKQLSSNFGAISSVLNDILSRLDKVEAEVQIDRLITGRLQSLQTYVTQQLIRAAEIRASANLAATKMSECVLGQSKRVDFCGKGYHLMSFPQSAPHGVVFLHVTYVPAQEKNFTTAPAICHDGKAHFPREGVFVSNGTHWFVTQRNFYEPQIITTDNTFVSGNCDVVIGVVNNTVYDPLQPELDSGGGGSDIDPYKEFGSSYQLLNFLPLDFFPDLNALVDTATALYEEELTGREHCSPHHTAIRQALVCWDELTKLIAWMSSNITSEQVRTIIVNHVNDTWGLKVRQSLWFHLSCLTFGQHTVQEFLVSFGVWIRTPAPYRPPNAPILSTLPEHTVIC

SEQ ID NO: 10688 - protein, 1301 aa, Artificial Sequence
  SARS-CoV-2/Netherlands/ZuidHolland_9/2020__EPI_ISL_414445 spike protein (1-1147) WhcAg construct
MFVFLVLLPLVSSQCVNLTTRTQLPPAYTNSFTRGVYYPDKVFRSSVLHSTQDLFLPFFSNVTWFHAIHVSGTNGTKRFDNPVLPFNDGVYFASTEKSNIIRGWIFGTTLDSKTQSLLIVNNATNVVIKVCEFQFCNDPFLGVYYHKNNKSWMESEFRVYSSANNCTFEYVSQPFLMDLEGKQGNFKNLREFVFKNIDGYFKIYSKHTPINLVRDLPQGFSALEPLVDLPIGINITRFQTLLALHRSYLTPGDSSSGWTAGAAAYYVGYLQPRTFLLKYNENGTITDAVDCALDPLSETKCTLKSFTVEKGIYQTSNFRVQPTESIVRFPNITNLCPFGEVFNATRFASVYAWNRKRISNCVADYSVLYNSASFSTFKCYGVSPTKLNDLCFTNVYADSFVIRGDEVRQIAPGQTGKIADYNYKLPDDFTGCVIAWNSNNLDSKVGGNYNYLYRLFRKSNLKPFERDISTEIYQAGSTPCNGVEGFNCYFPLQSYGFQPTNGVGYQPYRVVVLSFELLHAPATVCGPKKSTNLVKNKCVNFNFNGLTGTGVLTESNKKFLPFQQFGRDIADTTDAVRDPQTLEILDITPCSFGGVSVITPGTNTSNQVAVLYQGVNCTEVPVAIHADQLTPTWRVYSTGSNVFQTRAGCLIGAEHVNNSYECDIPIGAGICASYQTQTNSPRRARSVASQSIIAYTMSLGAENSVAYSNNSIAIPTNFTISVTTEILPVSMTKTSVDCTMYICGDSTECSNLLLQYGSFCTQLNRALTGIAVEQDKNTQEVFAQVKQIYKTPPIKDFGGFNFSQILPDPSKPSKRSFIEDLLFNKVTLADAGFIKQYGDCLGDIAARDLICVQKFNGLTVLPPLLTDEMIAQYTSALLAGTITSGWTFGAGAALQIPFAMQMAYRFNGIGVTQNVLYENQKLIANQFNSAIGKIQDSLSSTASALGKLQDVVNQNAQALNTLVKQLSSNFGAISSVLNDILSRLDKVEAEVQIDRLITGRLQSLQTYVTQQLIRAAEIRASANLAATKMSECVLGQSKRVDFCGKGYHLMSFPQSAPHGVVFLHVTYVPAQEKNFTTAPAICHDGKAHFPREGVFVSNGTHWFVTQRNFYEPQIITTDNTFVSGNCDVVIGIVNNTVYDPLQPELDSGGGGSDIDPYKEFGSSYQLLNFLPLDFFPDLNALVDTATALYEEELTGREHCSPHHTAIRQALVCWDELTKLIAWMSSNITSEQVRTIIVNHVNDTWGLKVRQSLWFHLSCLTFGQHTVQEFLVSFGVWIRTPAPYRPPNAPILSTLPEHTVIC

SEQ ID NO: 10689 - protein, 1301 aa, Artificial Sequence
  SARS-CoV-2/Finland/FIN03032020A/2020__EPI_ISL_413602 spike protein (1-1147) WhcAg construct
MFVFLVLLPLVSSQCVNLTTRTQLPPAYTNSFTRGVYYPDKVFRSSVLHSTQDLFLPFFSNVTWFHAIHVSGTNGTKRFDNPVLPFNDGVYFASTEKSNIIRGWIFGTTLDSKTQSLLIVNNATNVVIKVCEFQFCNDPFLGVYYHKNNKSWMESEFRVYSSANNCTFEYVSQPFLMDLEGKQGNFKNLREFVFKNIDGYFKIYSKHTPINLVRDLPQGFSALEPLVDLPIGINITRFQTLLALHRSYLTPGDSSSGWTAGAAAYYVGYLQPRTFLLKYNENGTITDAVDCALDPLSETKCTLKSFTVEKGIYQTSNFRVQPTESIVRFPNITNLCPFGEVFNATRFASVYAWNRKRISNCVADYSVLYNSASFSTFKCYGVSPTKLNDLCFTNVYADSFVIRGDEVRQIAPGQTGKIADYNYKLPDDFTGCVISWNSNNLDSKVGGNYNYLYRLFRKSNLKPFERDISTEIYQAGSTPCNGVEGFNCYFPLQSYGFQPTNGVGYQPYRVVVLSFELLHAPATVCGPKKSTNLVKNKCVNFNFNGLTGTGVLTESNKKFLPFQQFGRDIADTTDAVRDPQTLEILDITPCSFGGVSVITPGTNTSNQVAVLYQGVNCTEVPVAIHADQLTPTWRVYSTGSNVFQTRAGCLIGAEHVNNSYECDIPIGAGICASYQTQTNSPRRARSVASQSIIAYTMSLGAENSVAYSNNSIAIPTNFTISVTTEILPVSMTKTSVDCTMYICGDSTECSNLLLQYGSFCTQLNRALTGIAVEQDKNTQEVFAQVKQIYKTPPIKDFGGFNFSQILPDPSKPSKRSFIEDLLFNKVTLADAGFIKQYGDCLGDIAARDLICAQKFNGLTVLPPLLTDEMIAQYTSALLAGTITSGWTFGAGAALQIPFAMQMAYRFNGIGVTQNVLYENQKLIANQFNSAIGKIQDSLSSTASALGKLQDVVNQNAQALNTLVKQLSSNFGAISSVLNDILSRLDKVEAEVQIDRLITGRLQSLQTYVTQQLIRAAEIRASANLAATKMSECVLGQSKRVDFCGKGYHLMSFPQSAPHGVVFLHVTYVPAQEKNFTTAPAICHDGKAHFPREGVFVSNGTHWFVTQRNFYEPQIITTDNTFVSGNCDVVIGIVNNTVYDPLQPELDSGGGGSDIDPYKEFGSSYQLLNFLPLDFFPDLNALVDTATALYEEELTGREHCSPHHTAIRQALVCWDELTKLIAWMSSNITSEQVRTIIVNHVNDTWGLKVRQSLWFHLSCLTFGQHTVQEFLVSFGVWIRTPAPYRPPNAPILSTLPEHTVIC

SEQ ID NO: 10690 - protein, 1301 aa, Artificial Sequence
  SARS-CoV-2/France/GE1977/2020__EPI_ISL_414632 spike protein (1-1147) WhcAg construct
MFVFLVLLPLVSSQCVNLTTRTQLPPAYTNSFTRGVYYPDKVFRSSVLHSTQDLFLPFFSNVTWFHAIHVSGTNGTKRFDNPVLPFNDGVYFASTEKSNIIRGWIFGTTLDSKTQSLLIVNNATNVVIKVCEFQFCNDPFLGVYYHKNNKSWMESEFRVYSSANNCTFEYVSQPFLMDLEGKQGNFKNLREFVFKNIDGYFKIYSKHTPINLVRDLPQGFSALEPLVDLPIGINITRFQTLLALHRSYLTPGDSSSGWTAGAAAYYVGYLQPRTFLLKYNENGTITDAVDCALDPLSETKCTLKSFTVEKGIYQTSNFRVQPTESIVRFPNITNLCPFGEVFNATRFASVYAWNRKRISNCVADYSVLYNSASFSTFKCYGVSPTKLNDLCFTNVYADSFVIRGDEVRQIAPGQTGKIADYNYKLPDDFTGCVIAWNSNNLDSKVGGNYNYLYRLFRKSNLKPFERDISTEIYQAGSTPCNGVEGFNCYFPLQSYGFQPTNGVGYQPYRVVVLSFELLHAPATVCGPKKSTNLVKNKCVNFNFNGLTGTGVLTESNKKFLPFQQFGRDIADTTDAVRDPQTLEILDITPCSFGGVSVITPGTNTSNQVAVLYQGVNCTEVPVAIHADQLTPTWRVYSTGSNVFQTRAGCLIGAEHVNNSYECDIPIGAGICASYQTQTNSPRRARSVASQSIIAYTMSLGAENSVAYSNNSIAIPTNFTISVTTEILPVSMTKTSVDCTMYICGDSTECSNLLLQYGSFCTQLNRALTGIAVEQDKNTQEVFAQVKQIYKTPPIKDFGGFNFSQILPDPSKPSKRSFIEDLLFNKVTLADAGFIKQYGDCLGDIAARDLICAQKFNGLTVLPPLLTDEMIAQYTSALLAGTITSGWTFGAGAALQIPFAMQMAYRFNGIGVTQNVLYENQKLIANQFNSAIGKIQDSLFSTASALGKLQDVVNQNAQALNTLVKQLSSNFGAISSVLNDILSRLDKVEAEVQIDRLITGRLQSLQTYVTQQLIRAAEIRASANLAATKMSECVLGQSKRVDFCGKGYHLMSFPQSAPHGVVFLHVTYVPAQEKNFTTAPAICHDGKAHFPREGVFVSNGTHWFVTQRNFYEPQIITTDNTFVSGNCDVVIGIVNNTVYDPLQPELDSGGGGSDIDPYKEFGSSYQLLNFLPLDFFPDLNALVDTATALYEEELTGREHCSPHHTAIRQALVCWDELTKLIAWMSSNITSEQVRTIIVNHVNDTWGLKVRQSLWFHLSCLTFGQHTVQEFLVSFGVWIRTPAPYRPPNAPILSTLPEHTVIC

SEQ ID NO: 10691 - protein, 1301 aa, Artificial Sequence
  SARS-CoV-2/Finland/FIN-313/2020__EPI_ISL_414641 spike protein (1-1147) WhcAg construct
MFVFLVLLPLVSSQCVNLTTRTQLPPAYTNSFTRGVYYPDKVFRSSVLHSTQDLFLPFFSNVTWFHAIHVSGTNGTKRFDNPVLPFNDGVYFASTEKSNIIRGWIFGTTLDSKTQSLLIVNNATNVVIKVCEFQFCNDPFLGVYYHKNNKSWMESEFRVYSSANNCTFEYVSQPFLMDLEGKQGNFKNLREFVFKNIDGYFKIYSKHTPINLVRDLPQGFSALEPLVDLPIGINITRFKTLLALHRSYLTPGDSSSGWTAGAAAYYVGYLQPRTFLLKYNENGTITDAVDCALDPLSETKCTLKSFTVEKGIYQTSNFRVQPTESIVRFPNITNLCPFGEVFNATRFASVYAWNRKRISNCVADYSVLYNSASFSTFKCYGVSPTKLNDLCFTNVYADSFVIRGDEVRQIAPGQTGKIADYNYKLPDDFTGCVIAWNSNNLDSKVGGNYNYLYRLFRKSNLKPFERDISTEIYQAGSTPCNGVEGFNCYFPLQSYGFQPTNGVGYQPYRVVVLSFELLHAPATVCGPKKSTNLVKNKCVNFNFNGLTGTGVLTESNKKFLPFQQFGRDIADTTDAVRDPQTLEILDITPCSFGGVSVITPGTNTSNQVAVLYQGVNCTEVPVAIHADQLTPTWRVYSTGSNVFQTRAGCLIGAEHVNNSYECDIPIGAGICASYQTQTNSPRRARSVASQSIIAYTMSLGAENSVAYSNNSIAIPTNFTISVTTEILPVSMTKTSVDCTMYICGDSTECSNLLLQYGSFCTQLNRALTGIAVEQDKNTQEVFAQVKQIYKTPPIKDFGGFNFSQILPDPSKPSKRSFIEDLLFNKVTLADAGFIKQYGDCLGDIAARDLICAQKFNGLTVLPPLLTDEMIAQYTSALLAGTITSGWTFGAGAALQIPFAMQMAYRFNGIGVTQNVLYENQKLIANQFNSAIGKIQDSLSSTASALGKLQDVVNQNAQALNTLVKQLSSNFGAISSVLNDILSRLDKVEAEVQIDRLITGRLQSLQTYVTQQLIRAAEIRASANLAATKMSECVLGQSKRVDFCGKGYHLMSFPQSAPHGVVFLHVTYVPAQEKNFTTAPAICHDGKAHFPREGVFVSNGTHWFVTQRNFYEPQIITTDNTFVSGNCDVVIGIVNNTVYDPLQPELDSGGGGSDIDPYKEFGSSYQLLNFLPLDFFPDLNALVDTATALYEEELTGREHCSPHHTAIRQALVCWDELTKLIAWMSSNITSEQVRTIIVNHVNDTWGLKVRQSLWFHLSCLTFGQHTVQEFLVSFGVWIRTPAPYRPPNAPILSTLPEHTVIC

SEQ ID NO: 10692 - protein, 1301 aa, Artificial Sequence
  SARS-CoV-2/Netherlands/ZuidHolland_2/2020__EPI_ISL_414556 spike protein (1-1147) WhcAg construct
MFVFLVLLPLVSSQCVNLTTRTQLPPAYTNSFTRGVYYPDKVFRSSVLHSTQDLFLPFFSNVTWFHAIHVSGTNGTKRFDNPVLPFNDGVYFASTEKSNIIRGWIFGTTLDSKTQSLLIVNNATNVVIKVCEFQFCNDPFLGVYYHKNNKSWMESEFRVYSSANNCTFEYVSQPFLMDLEGKQGNFKNLREFVFKNIDGYFKIYSKHTPINLVRDLPQGFSALEPLVDLPIGINITRFQTLLALHRSYLTPGDSSSGWTAGAAAYYVGYLQPRTFLLKYNENGTITDAVDCALDPLSETKCTLKSFTVEKGIYQTSNFRVQPTESIVRFPNITNLCPFGEVFNATRFASVYAWNRKRISNCVADYSVLYNSASFSTFKCYGVSPTKLNDLCFTNVYADSFVIRGDEVRQIAPGQTGKIADYNYKLPDDFTGCVIAWNSNNLDSKVGGNYNYLYRLFRKSNLKPFERDISTEIYQAGSTPCNGVEGFNCYFPLQSYGFQPTNGVGYQPYRVVVLSFELLHAPATVCGPKKSTNLVKNKCVNFNFNGLTGTGVLTESNKKFLPFQQFGRDIADTTDAVRDPQTLEILDITPCSFGGVSVITPGTNTSNQVAVLYQGVNCTEVPVAIHADQLTPTWRVYSTGSNVFQTRAGCLIGAEHVNNSYECDIPIGAGICASYQTQTNSPRRARSVASQSIIAYTMSLGAENSVAYSNNSIAIPTNFTISVTTEILPVSMTKTSVDCTMYICGDSTECSNLLLQYGSFCTQLNRALTGIALEQDKNTQEVFAQVKQIYKTPPIKDFGGFNFSQILPDPSKPSKRSFIEDLLFNKVTLADAGFIKQYGDCLGDIAARDLICAQKFNGLTVLPPLLTDEMIAQYTSALLAGTITSGWTFGAGAALQIPFAMQMAYRFNGIGVTQNVLYENQKLIANQFNSAIGKIQDSLSSTASALGKLQDVVNQNAQALNTLVKQLSSNFGAISSVLNDILSRLDKVEAEVQIDRLITGRLQSLQTYVTQQLIRAAEIRASANLAATKMSECVLGQSKRVDFCGKGYHLMSFPQSAPHGVVFLHVTYVPAQEKNFTTAPAICHDGKAHFPREGVFVSNGTHWFVTQRNFYEPQIITTDNTFVSGNCDVVIGIVNNTVYDPLQPELDSGGGGSDIDPYKEFGSSYQLLNFLPLDFFPDLNALVDTATALYEEELTGREHCSPHHTAIRQALVCWDELTKLIAWMSSNITSEQVRTIIVNHVNDTWGLKVRQSLWFHLSCLTFGQHTVQEFLVSFGVWIRTPAPYRPPNAPILSTLPEHTVIC

SEQ ID NO: 10693 - protein, 1301 aa, Artificial Sequence
  SARS-CoV-2/USA/WA-UW31/2020__EPI_ISL_414618 spike protein (1-1147) WhcAg construct
MFVFLVLLPLVSSQCVNLTTRTQLPPAYTNSFTRGVYYPDKVFRSSVLHSTQDLFLPFFSNVTWFHAIHVSGTNGTKRFDNPVLPFNDGVYFASTEKSNIIRGWIFGTTLDSKTQSLLIVNNATNVVIKVCEFQFCNDPFLGVYYHKNNKSWMESEFRVYSSANNCTFEYVSQPFLMDLEGKQGNFKNLREFVFKNIDGYFKIYSKHTPINLVRDLPQGFSALEPLVDLPIGINITRFQTLLALHRSYLTPGDSSSGWTAGAAAYYVGYLQPRTFLLKYNENGTITDAVDCALDPLSETKCTLKSFTVEKGIYQTSNFRVQPTESIVRFPNITNLCPFGEVFNATRFASVYAWNRKRISNCVADYSVLYNSASFSTFKCYGVSPTKLNDLCFTNVYADSFVIRGDEVRQIAPGQTGKIADYNYKLPDDFTGCVIAWNSNNLDSKVGGNYNYLYRLFRKSNLKPFERDISTEIYQAGSTPCNGAEGFNCYFPLQSYGFQPTNGVGYQPYRVVVLSFELLHAPATVCGPKKSTNLVKNKCVNFNFNGLTGTGVLTESNKKFLPFQQFGRDIADTTDAVRDPQTLEILDITPCSFGGVSVITPGTNTSNQVAVLYQDVNCTEVPVAIHADQLTPTWRVYSTGSNVFQTRAGCLIGAEHVNNSYECDIPIGAGICASYQTQTNSPRRARSVASQSIIAYTMSLGAENSVAYSNNSIAIPTNFTISVTTEILPVSMTKTSVDCTMYICGDSTECSNLLLQYGSFCTQLNRALTGIAVEQDKNTQEVFAQVKQIYKTPPIKDFGGFNFSQILPDPSKPSKRSFIEDLLFNKVTLADAGFIKQYGDCLGDIAARDLICAQKFNGLTVLPPLLTDEMIAQYTSALLAGTITSGWTFGAGAALQIPFAMQMAYRFNGIGVTQNVLYENQKLIANQFNSAIGKIQDSLSSTASALGKLQDVVNQNAQALNTLVKQLSSNFGAISSVLNDILSRLDKVEAEVQIDRLITGRLQSLQTYVTQQLIRAAEIRASANLAATKMSECVLGQSKRVDFCGKGYHLMSFPQSAPHGVVFLHVTYVPAQEKNFTTAPAICHDGKAHFPREGVFVSNGTHWFVTQRNFYEPQIITTDNTFVSGNCDVVIGIVNNTVYDPLQPELDSGGGGSDIDPYKEFGSSYQLLNFLPLDFFPDLNALVDTATALYEEELTGREHCSPHHTAIRQALVCWDELTKLIAWMSSNITSEQVRTIIVNHVNDTWGLKVRQSLWFHLSCLTFGQHTVQEFLVSFGVWIRTPAPYRPPNAPILSTLPEHTVIC

SEQ ID NO: 10694 - protein, 1301 aa, Artificial Sequence
  SARS-CoV-2/South Korea/SNU01/2020__EPI_ISL_411929 spike protein (1-1147) WhcAg construct
MFVFLVLLPLVSSQCVNLTTRTQLPPAYTNSFTRGVYYPDKVFRSSVLHSTQDLFLPFFSNVTWFHAIHVSGTNGTKRFDNPVLPFNDGVYFASTEKSNIIRGWIFGTTLDSKTQSLLIVNNATNVVIKVCEFQFCNDPFLGVYYHKNNKSWMESEFRVYSSANNCTFEYVSQPFLMDLEGKQGNFKNLREFVFKNIDGYFKIYSKHTPINLVRDLPQGFWALEPLVDLPIGINITRFQTLLALHRSYLTPGDSSSGWTAGAAAYYVGYLQPRTFLLKYNENGTITDAVDCALDPLSETKCTLKSFTVEKGIYQTSNFRVQPTESIVRFPNITNLCPFGEVFNATRFASVYAWNRKRISNCVADYSVLYNSASFSTFKCYGVSPTKLNDLCFTNVYADSFVIRGDEVRQIAPGQTGKIADYNYKLPDDFTGCVIAWNSNNLDSKVGGNYNYLYRLFRKSNLKPFERDISTEIYQAGSTPCNGVEGFNCYFPLQSYGFQPTNGVGYQPYRVVVLSFELLHAPATVCGPKKSTNLVKNKCVNFNFNGLTGTGVLTESNKKFLPFQQFGRDIADTTDAVRDPQTLEILDITPCSFGGVSVITPGTNTSNQVAVLYQDVNCTEVPVAIHADQLTPTWRVYSTGSNVFQTRAGCLIGAEHVNNSYECDIPIGAGICASYQTQTNSPRRARSVASQSIIAYTMSLGAENSVAYSNNSIAIPTNFTISVTTEILPVSMTKTSVDCTMYICGDSTECSNLLLQYGSFCTQLNRALTGIAVEQDKNTQEVFAQVKQIYKTPPIKDFGGFNFSQILPDPSKPSKRSFIEDLLFNKVTLADAGFIKQYGDCLGDIAARDLICAQKFNGLTVLPPLLTDEMIAQYTSALLAGTITSGWTFGAGAALQIPFAMQMAYRFNGIGVTQNVLYENQKLIANQFNSAIGKIQDSLSSTASALGKLQDVVNQNAQALNTLVKQLSSNFGAISSVLNDILSRLDKVEAEVQIDRLITGRLQSLQTYVTQQLIRAAEIRASANLAATKMSECVLGQSKRVDFCGKGYHLMSFPQSAPHGVVFLHVTYVPAQEKNFTTAPAICHDGKAHFPREGVFVSNGTHWFVTQRNFYEPQIITTDNTFVSGNCDVVIGIVNNTVYDPLQPELDSGGGGSDIDPYKEFGSSYQLLNFLPLDFFPDLNALVDTATALYEEELTGREHCSPHHTAIRQALVCWDELTKLIAWMSSNITSEQVRTIIVNHVNDTWGLKVRQSLWFHLSCLTFGQHTVQEFLVSFGVWIRTPAPYRPPNAPILSTLPEHTVIC

SEQ ID NO: 10695 - protein, 1301 aa, Artificial Sequence
  SARS-CoV-2/China/WF0004/2020__EPI_ISL_413694 spike protein (1-1147) WhcAg construct
MFVFLVLLPLVSSQCVNLTTRTQLPPAYTNSFTRGVYYPDKVFRSSVLHSTQDLFLPFFSNVTWFHAIHVSGTNGTKRFDNPVLPFNDGVYFASTEKSNIIRGWIFGTTLDSKTQSLLIVNNATNVVIKVCEFQFCNDPFLGVYYHKNNKSWTESEFRVYSSANNCTFEYVSQPFLMDLEGKQGNFKNLREFVFKNIDGYFKIYSKHTPINLVRDLPQGFSALEPLVDLPIGINITRFQTLLALHRSYLTPGDSSSGWTAGAAAYYVGYLQPRTFLLKYNENGTITDAVDCALDPLSETKCTLKSFTVEKGIYQTSNFRVQPTESIVRFPNITNLCPFGEVFNATRFASVYAWNRKRISNCVADYSVLYNSASFSTFKCYGVSPTKLNDLCFTNVYADSFVIRGDEVRQIAPGQTGKIADYNYKLPDDFTGCVIAWNSNNLDSKVGGNYNYLYRLFRKSNLKPFERDISTEIYQAGSTPCNGVEGFNCYFPLQSYGFQPTNGVGYQPYRVVVLSFELLHAPATVCGPKKSTNLVKNKCVNFNFNGLTGTGVLTESNKKFLPFQQFGRDIADTTDAVRDPQTLEILDITPCSFGGVSVITPGTNTSNQVAVLYQDVNCTEVPVAIHADQLTPTWRVYSTGSNVFQTRAGCLIGAEHVNNSYECDIPIGAGICASYQTQTNSPRRARSVASQSIIAYTMSLGAENSVAYSNNSIAIPTNFTISVTTEILPVSMTKTSVDCTMYICGDSTECSNLLLQYGSFCTQLNRALTGIAVEQDKNTQEVFAQVKQIYKTPPIKDFGGFNFSQILPDPSKPSKRSFIEDLLFNKVTLADAGFIKQYGDCLGDIAARDLICAQKFNGLTVLPPLLTDEMIAQYTSALLAGTITSGWTFGAGAALQIPFAMQMAYRFNGIGVTQNVLYENQKLIANQFNSAIGKIQDSLSSTASALGKLQDVVNQNAQALNTLVKQLSSNFGAISSVLNDILSRLDKVEAEVQIDRLITGRLQSLQTYVTQQLIRAAEIRASANLAATKMSECVLGQSKRFDFCGKGYHLMSFPQSAPHGVVFLHVTYVPAQEKNFTTAPAICHDGKAHFPREGVFVSNGTHWFVTQRNFYEPQIITTDNTFVSGNCDVVIGIVNNTVYDPLQPELDSGGGGSDIDPYKEFGSSYQLLNFLPLDFFPDLNALVDTATALYEEELTGREHCSPHHTAIRQALVCWDELTKLIAWMSSNITSEQVRTIIVNHVNDTWGLKVRQSLWFHLSCLTFGQHTVQEFLVSFGVWIRTPAPYRPPNAPILSTLPEHTVIC

SEQ ID NO: 10696 - protein, 1301 aa, Artificial Sequence
  SARS-CoV-2/China/WF0028/2020__EPI_ISL_413791 spike protein (1-1147) WhcAg construct
MFVFLVLLPLVSSQCVNLTTRTQLPPAYTNSFTRGVYYPDKVFRSSVLHSTQDLFLPFFSNVTWFHAIHVSGTNGTKRFDNPVLPFNDGVYFASTEKSNIIRGWIFGTTLDSKTQSLLIVNNATNVVIKVCEFQFCNDPFLGVYYHKNNKSWMESEFRVYSSANNCTFEYVSQPFLMDLEGKQGNFKNLREFVFKNIDGYFKIYSKHTPINLVRDLPQGFSALEPLVDLPIGINITRFQTLLALHRSYLTPGDSSSGWTAGAAAYYVGYLQPRTFLLKYNENGTITDAVDCALDPLSETKCTLKSFTVEKGIYQTSNFRVQPTESIVRFPNITNLCPFGEVFNATRFASVYAWNRKRISNCVADYSVLYNSASFSTFKCYGVSPTKLNDLCFTNVYADSFVIRGDEVRQIAPGQTGKIADYNYKLPDDFTGCVIAWNSNNLDSKVGGNYNYLYRLFRKSNLKPFERDISTEIYQAGSTPCNGVEGFNCYFPLQSYGFQPTNGVGYQPYRVVVLSFELLHAPATVCGPKKSTNLVKNKCVNFNFNGLTGTGVLTESNKKFLPFQQFGRDIADTTDAVRDPQTLEILDITPCSFGGVSVITPGTNTSNQVAVLYQDVNCTEVPVAIHADQLTPTWRVYSTGSNVFQTRAGCLIGAEHVNNSYECDIPIGAGICASYQTQTNSPRRARSVASQSIIAYTMSLGAENSVAYSNNSIAIPTNFTISVTTEILPVSMTKTSVDCTMYICGDSTECSNLLLQYGSFCTQLNRALTGIAVEQDKNTQEVFAQVKQIYKTPPIKDFGGFNFSQILPDPSKPSKRSFIEDLLFNKVTLADAGFIKQYGDCLGDIAARDLICAQKFNGLTVLPPLLTDEMIAQYTSALLAGTITSGWTFGAGAALQIPFAMQMAYRFNGIGVTQNVLYENQKLIANQFNSAIGKIQDSLSSTASALGKLQDVVNQNAQALNTLVKQLSSNFGAISSVLNDILSRLDKVEAEVQIDRLITGRLQSLQTYVTQQLIRAAEIRASANLAATKMSECVLGQSKRVDFCGKGYHLMSFPQSAPHGVVFLHVTYVPAQEKNFTTAPAICHDGKAHFPREGVFVSNGTHWFVTQRNFYEPQIITTDNTFVSGNCDVVIGIVNNTVYDPLQPELESGGGGSDIDPYKEFGSSYQLLNFLPLDFFPDLNALVDTATALYEEELTGREHCSPHHTAIRQALVCWDELTKLIAWMSSNITSEQVRTIIVNHVNDTWGLKVRQSLWFHLSCLTFGQHTVQEFLVSFGVWIRTPAPYRPPNAPILSTLPEHTVIC

SEQ ID NO: 10697 - protein, 1301 aa, Artificial Sequence
  SARS-CoV-2/2019-nCoV/USA-CruiseA-18/2020__MT159716.1 spike protein (1-1147) WhcAg construct
MFVFLVLLPLVSSQCVNLTTRTQLPPAYTNSFTRGVYYPDKVFRSSVLHSTQDLFLPFFSNVTWFHAIHVSGTNGTKRFDNPVLPFNDGVYFASTEKSNIIRGWIFGTTLDSKTQSLLIVNNATNVVIKVCEFQFCNDPFLGVYYHKNNKSWMESELRVYSSANNCTFEYVSQPFLMDLEGKQGNFKNLREFVFKNIDGYFKIYSKHTPINLVRDLPQGFSALEPLVDLPIGINITRFQTLLALHRSYLTPGDSSSGWTAGAAAYYVGYLQPRTFLLKYNENGTITDAVDCALDPLSETKCTLKSFTVEKGIYQTSNFRVQPTESIVRFPNITNLCPFGEVFNATRFASVYAWNRKRISNCVADYSVLYNSASFSTFKCYGVSPTKLNDLCFTNVYADSFVIRGDEVRQIAPGQTGKIADYNYKLPDDFTGCVIAWNSNNLDSKVGGNYNYLYRLFRKSNLKPFERDISTEIYQAGSTPCNGVEGFNCYFPLQSYGFQPTNGVGYQPYRVVVLSFELLHAPATVCGPKKSTNLVKNKCVNFNFNGLTGTGVLTESNKKFLPFQQFGRDIADTTDAVRDPQTLEILDITPCSFGGVSVITPGTNTSNQVAVLYQDVNCTEVPVAIHADQLTPTWRVYSTGSNVFQTRAGCLIGAEHVNNSYECDIPIGAGICASYQTQTNSPRRARSVASQSIIAYTMSLGAENSVAYSNNSIAIPTNFTISVTTEILPVSMTKTSVDCTMYICGDSTECSNLLLQYGSFCTQLNRALTGIAVEQDKNTQEVFAQVKQIYKTPPIKDFGGFNFSQILPDPSKPSKRSFIEDLLFNKVTLADAGFIKQYGDCLGDIAARDLICAQKFNGLTVLPPLLTDEMIAQYTSALLAGTITSGWTFGAGAALQIPFAMQMAYRFNGIGVTQNVLYENQKLIANQFNSAIGKIQDSLSSTASALGKLQDVVNQNAQALNTLVKQLSSNFGAISSVLNDILSRLDKVEAEVQIDRLITGRLQSLQTYVTQQLIRAAEIRASANLAATKMSECVLGQSKRVDFCGKGYHLMSFPQSAPHGVVFLHVTYVPAQEKNFTTAPAICHDGKAHFPREGVFVSNGTHWFVTQRNFYEPQIITTDNTFVSGNCDVVIGIVNNTVYDPLQPELDSGGGGSDIDPYKEFGSSYQLLNFLPLDFFPDLNALVDTATALYEEELTGREHCSPHHTAIRQALVCWDELTKLIAWMSSNITSEQVRTIIVNHVNDTWGLKVRQSLWFHLSCLTFGQHTVQEFLVSFGVWIRTPAPYRPPNAPILSTLPEHTVIC

SEQ ID NO: 10698 - protein, 1301 aa, Artificial Sequence
  SARS-CoV-2/SARS-CoV-2/Yunnan-01/human/2020/CHN__MT049951.1 spike protein (1-1147) WhcAg construct
MFVFLVLLPLVSSQCVNLTTRTQLPPANTNSFTRGVYYPDKVFRSSVLHSTQDLFLPFFSNVTWFHAIHVSGTNGTKRFDNPVLPFNDGVYFASTEKSNIIRGWIFGTTLDSKTQSLLIVNNATNVVIKVCEFQFCNDPFLGVYYHKNNKSWMESEFRVYSSANNCTFEYVSQPFLMDLEGKQGNFKNLREFVFKNIDGYFKIYSKHTPINLVRDLPQGFSALEPLVDLPIGINITRFQTLLALHRSYLTPGDSSSGWTAGAAAYYVGYLQPRTFLLKYNENGTITDAVDCALDPLSETKCTLKSFTVEKGIYQTSNFRVQPTESIVRFPNITNLCPFGEVFNATRFASVYAWNRKRISNCVADYSVLYNSASFSTFKCYGVSPTKLNDLCFTNVYADSFVIRGDEVRQIAPGQTGKIADYNYKLPDDFTGCVIAWNSNNLDSKVGGNYNYLYRLFRKSNLKPFERDISTEIYQAGSTPCNGVEGFNCYFPLQSYGFQPTNGVGYQPYRVVVLSFELLHAPATVCGPKKSTNLVKNKCVNFNFNGLTGTGVLTESNKKFLPFQQFGRDIADTTDAVRDPQTLEILDITPCSFGGVSVITPGTNTSNQVAVLYQDVNCTEVPVAIHADQLTPTWRVYSTGSNVFQTRAGCLIGAEHVNNSYECDIPIGAGICASYQTQTNSPRRARSVASQSIIAYTMSLGAENSVAYSNNSIAIPTNFTISVTTEILPVSMTKTSVDCTMYICGDSTECSNLLLQYGSFCTQLNRALTGIAVEQDKNTQEVFAQVKQIYKTPPIKDFGGFNFSQILPDPSKPSKRSFIEDLLFNKVTLADAGFIKQYGDCLGDIAARDLICAQKFNGLTVLPPLLTDEMIAQYTSALLAGTITSGWTFGAGAALQIPFAMQMAYRFNGIGVTQNVLYENQKLIANQFNSAIGKIQDSLSSTASALGKLQDVVNQNAQALNTLVKQLSSNFGAISSVLNDILSRLDKVEAEVQIDRLITGRLQSLQTYVTQQLIRAAEIRASANLAATKMSECVLGQSKRVDFCGKGYHLMSFPQSAPHGVVFLHVTYVPAQEKNFTTAPAICHDGKAHFPREGVFVSNGTHWFVTQRNFYEPQIITTDNTFVSGNCDVVIGIVNNTVYDPLQPELDSGGGGSDIDPYKEFGSSYQLLNFLPLDFFPDLNALVDTATALYEEELTGREHCSPHHTAIRQALVCWDELTKLIAWMSSNITSEQVRTIIVNHVNDTWGLKVRQSLWFHLSCLTFGQHTVQEFLVSFGVWIRTPAPYRPPNAPILSTLPEHTVIC

SEQ ID NO: 10699 - protein, 1301 aa, Artificial Sequence
  SARS-CoV-2/USA/WA-UW292/2020__EPI_ISL_418077 spike protein (1-1147) WhcAg construct
MFVFLVLLPLVSSQCVNLTTRTQLPPAYTNSFTRGVYYPDKVFRSSVLHSTQDLFLPFFSNVTWFHAIHVSGTNGTKRFDNPVLPFNDGVYFASTEKSNIIRGWIFGTTLDSKTQSLLIVNNATNVVIKVCEFQFCNDPFLGVYYHKNNKSWMESEFRVYSSANNCTFEYVSQPFLMDLEGKQGNFKNLREFVFKNIDGYFKIYSKHTPINLVRDLPQGFSALEPLVDLPIGINITRFQTLLALHRSYLTPGDSSSGWTAGAAAYYVGYLQPRTFLLKYNENGTITDAVDCALDPLSETKCTLKSFTVEKGIYQTSNFRVQPTESIVRFPNITNLCPFGEVFNATRFASVYAWNRKRISNCVADYSVLYNSASFSTFKCYGVSPTKLNDLCFTNVYADSFVIRGDEVRQIAPGQTGKIADYNYKLPDDFTGCVIAWNSNNLDSKVGGNYNYLYRLFRKSNLKPFERDISTEIYQASSTPCNGVEGFNCYFPLQSYGFQPTNGVGYQPYRVVVLSFELLHAPATVCGPKKSTNLVKNKCVNFNFNGLTGTGVLTESNKKFLPFQQFGRDIADTTDAVRDPQTLEILDITPCSFGGVSVITPGTNTSNQVAVLYQDVNCTEVPVAIHADQLTPTWRVYSTGSNVFQTRAGCLIGAEHVNNSYECDIPIGAGICASYQTQTNSPRRARSVASQSIIAYTMSLGAENSVAYSNNSIAIPTNFTISVTTEILPVSMTKTSVDCTMYICGDSTECSNLLLQYGSFCTQLNRALTGIAVEQDKNTQEVFAQVKQIYKTPPIKDFGGFNFSQILPDPSKPSKRSFIEDLLFNKVTLADAGFIKQYGDCLGDIAARDLICAQKFNGLTVLPPLLTDEMIAQYTSALLAGTITSGWTFGAGAALQIPFAMQMAYRFNGIGVTQNVLYENQKLIANQFNSAIGKIQDSLSSTASALGKLQDVVNQNAQALNTLVKQLSSNFGAISSVLNDILSRLDKVEAEVQIDRLITGRLQSLQTYVTQQLIRAAEIRASANLAATKMSECVLGQSKRVDFCGKGYHLMSFPQSAPHGVVFLHVTYVPAQEKNFTTAPAICHDGKAHFPREGVFVSNGTHWFVTQRNFYEPQIITTDNTFVSGNCDVVIGIVNNTVYDPLQPELDSGGGGSDIDPYKEFGSSYQLLNFLPLDFFPDLNALVDTATALYEEELTGREHCSPHHTAIRQALVCWDELTKLIAWMSSNITSEQVRTIIVNHVNDTWGLKVRQSLWFHLSCLTFGQHTVQEFLVSFGVWIRTPAPYRPPNAPILSTLPEHTVIC

SEQ ID NO: 10700 - protein, 1301 aa, Artificial Sequence
  SARS-CoV-2/Iceland/192/2020__EPI_ISL_417819 spike protein (1-1147) WhcAg construct
MFVFFVLLPLVSSQCVNLTTRTQLPPAYTNSFTRGVYYPDKVFRSSVLHSTQDLFLPFFSNVTWFHAIHVSGTNGTKRFDNPVLPFNDGVYFASTEKSNIIRGWIFGTTLDSKTQSLLIVNNATNVVIKVCEFQFCNDPFLGVYYHKNNKSWMESEFRVYSSANNCTFEYVSQPFLMDLEGKQGNFKNLREFVFKNIDGYFKIYSKHTPINLVRDLPQGFSALEPLVDLPIGINITRFQTLLALHRSYLTPGDSSSGWTAGAAAYYVGYLQPRTFLLKYNENGTITDAVDCALDPLSETKCTLKSFTVEKGIYQTSNFRVQPTESIVRFPNITNLCPFGEVFNATRFASVYAWNRKRISNCVADYSVLYNSASFSTFKCYGVSPTKLNDLCFTNVYADSFVIRGDEVRQIAPGQTGKIADYNYKLPDDFTGCVIAWNSNNLDSKVGGNYNYLYRLFRKSNLKPFERDISTEIYQAGSTPCNGVEGFNCYFPLQSYGFQPTNGVGYQPYRVVVLSFELLHAPATVCGPKKSTNLVKNKCVNFNFNGLTGTGVLTESNKKFLPFQQFGRDIADTTDAVRDPQTLEILDITPCSFGGVSVITPGTNTSNQVAVLYQGVNCTEVPVAIHADQLTPTWRVYSTGSNVFQTRAGCLIGAEHVNNSYECDIPIGAGICASYQTQTNSPRRARSVASQSIIAYTMSLGAENSVAYSNNSIAIPTNFTISVTTEILPVSMTKTSVDCTMYICGDSTECSNLLLQYGSFCTQLNRALTGIAVEQDKNTQEVFAQVKQIYKTPPIKDFGGFNFSQILPDPSKPSKRSFIEDLLFNKVTLADAGFIKQYGDCLGDIAARDLICAQKFNGLTVLPPLLTDEMIAQYTSALLAGTITSGWTFGAGAALQIPFAMQMAYRFNGIGVTQNVLYENQKLIANQFNSAIGKIQDSLSSTASALGKLQDVVNQNAQALNTLVKQLSSNFGAISSVLNDILSRLDKVEAEVQIDRLITGRLQSLQTYVTQQLIRAAEIRASANLAATKMSECVLGQSKRVDFCGKGYHLMSFPQSAPHGVVFLHVTYVPAQEKNFTTAPAICHDGKAHFPREGVFVSNGTHWFVTQRNFYEPQIITTDNTFVSGNCDVVIGIVNNTVYDPLQPELDSGGGGSDIDPYKEFGSSYQLLNFLPLDFFPDLNALVDTATALYEEELTGREHCSPHHTAIRQALVCWDELTKLIAWMSSNITSEQVRTIIVNHVNDTWGLKVRQSLWFHLSCLTFGQHTVQEFLVSFGVWIRTPAPYRPPNAPILSTLPEHTVIC

SEQ ID NO: 10701 - protein, 1301 aa, Artificial Sequence
  SARS-CoV-2/Belgium/ULG-6939/2020__EPI_ISL_417020 spike protein (1-1147) WhcAg construct
MFVFLVLLPLVSSQCVNLTTRTQLPPAYTNSFTRGVYYPDKVFRSSVLHSTQDLFLPFFSNVTWFHAIHVSGTNGTKRFDNPVLPFNDGVYFASTEKSNIIRGWIFGTTLDSKTQSLLIVNNATNVVIKVCEFQFCNDPFLGVYYHKNNKSWMESEFRVYSSANNCTFEYVSQPFLMDLEGKQGNFKNLREFVFKNIDGYFKIYSKHTPINLVRDLPQGFSALEPLVDLPIGINITRFQTLLALHRSYLTPGDSSSGWTAGAAAYYVGYLQPRTFLLKYNENGTITDAVDCALDPLSETKCTLKSFTVEKGIYQTSNFRVQPTESIVRFPNITNLCPFGEVFNATRFASVYAWNRKRISNCVADYSVLYNSASFSTFKCYGVSPTKLNDLCFTNVYADSFVIRGDEVRQIAPGQTGKIADYNYKLPDDFTGCVIAWNSNNLDSKVGGNYNYLYRLFRKSNLKPFERDISTEIYQAGSTPCNGVEGFNCYFPLQSYGFQPTNGVGYQPYRVVVLSFELLHAPATVCGPKKSTNLVKNKCVNFNFNGLTGTGVLTESNKKFLPFQQFGRDIADTTDAVRDPQTLEILDITPCSFGGVSVITPGTNTSNQVAVLYQGVNCTEVPVAIHADQLTPTWRVYSTGSNVFQTRAGCLIGAEHVNNSYECDIPIGAGICASYQTQTNSPRRARSVASQSIIAYTMSLGAENSVVYSNNSIAIPTNFTISVTTEILPVSMTKTSVDCTMYICGDSTECSNLLLQYGSFCTQLNRALTGIAVEQDKNTQEVFAQVKQIYKTPPIKDFGGFNFSQILPDPSKPSKRSFIEDLLFNKVTLADAGFIKQYGDCLGDIAARDLICAQKFNGLTVLPPLLTDEMIAQYTSALLAGTITSGWTFGAGAALQIPFAMQMAYRFNGIGVTQNVLYENQKLIANQFNSAIGKIQDSLSSTASALGKLQDVVNQNAQALNTLVKQLSSNFGAISSVLNDILSRLDKVEAEVQIDRLITGRLQSLQTYVTQQLIRAAEIRASANLAATKMSECVLGQSKRVDFCGKGYHLMSFPQSAPHGVVFLHVTYVPAQEKNFTTAPAICHDGKAHFPREGVFVSNGTHWFVTQRNFYEPQIITTDNTFVSGNCDVVIGIVNNTVYDPLQPELDSGGGGSDIDPYKEFGSSYQLLNFLPLDFFPDLNALVDTATALYEEELTGREHCSPHHTAIRQALVCWDELTKLIAWMSSNITSEQVRTIIVNHVNDTWGLKVRQSLWFHLSCLTFGQHTVQEFLVSFGVWIRTPAPYRPPNAPILSTLPEHTVIC

SEQ ID NO: 10702 - protein, 1301 aa, Artificial Sequence
  SARS-CoV-2/France/HF2496/2020__EPI_ISL_418231 spike protein (1-1147) WhcAg construct
MFVFLVLLPLVSSQCVNLTTRTQLPPAYTNSFTRGVYYPDKVFRSSVLHSTQDLFLPFFSNVTWFHAIHVSGTNGTKRFDNPVLPFNDGVYFASTEKSNIIRGWIFGTTLDSKTQSLLIVNNATNVVIKVCEFQFCNDPFLGVYYHKNNKSWMESEFRVYSSANNCTFEYVSQPFLMDLEGKQGNFKNLREFVFKNIDGYFKIYSKHTPINLVRDLPQGFSALEPLVDLPIGINITRFQTLLALHRSYLTPGDSSSGWTAGAAAYYVGYLQPRTFLLKYNENGTITDAVDCALDPLSETKCTLKSFTVEKGIYQTSNFRVQPTESIVRFPNITNLCPFGEVFNATRFASVYAWNRKRISNCVADYSVLYNSASFSTFKCYGVSPTKLNDLCFTNVYADSFVIRGDEVRQIAPGQTGKIADYNYKLPDDFTGCVIAWNSNNLDSKVGGNYNYLYRLFRKSNLKPFERDISTEIYQAGSTPCNGVEGFNCYFPLQSYGFQPTNGVGYQPYRVVVLSFELLHAPATVCGPKKSTNLVKNKCVNFNFNGLTGTGVLTESNKKFLPFQQFGRDIADTTDAVRDPQTLEILDITPCSFGGVSVITPGTNTSNQVAVLYQGVNCTEVPVAIHADQLTPTWRVYSTGSNVFQTRAGCLIGAEHVNNSYECDIPIGAGICASYQTQTNSPRRARSVASQSIIAYTMSLGAENSVAYSNNSIAIPTNFTISVTTEILPVSMTKTSVDCTMYICGDSTECSNLLLQYGSFCTQLNRALTGIAVEQDKNTQEVFAQVKQIYKTPPIKDFGGFNFSQILPDPSKPSKRSFIEDLLFNKVTLADAGFIKQYGDCLGDIVARDLICAQKFNGLTVLPPLLTDEMIAQYTSALLAGTITSGWTFGAGAALQIPFAMQMAYRFNGIGVTQNVLYENQKLIANQFNSAIGKIQDSLSSTASALGKLQDVVNQNAQALNTLVKQLSSNFGAISSVLNDILSRLDKVEAEVQIDRLITGRLQSLQTYVTQQLIRAAEIRASANLAATKMSECVLGQSKRVDFCGKGYHLMSFPQSAPHGVVFLHVTYVPAQEKNFTTAPAICHDGKAHFPREGVFVSNGTHWFVTQRNFYEPQIITTDNTFVSGNCDVVIGIVNNTVYDPLQPELDSGGGGSDIDPYKEFGSSYQLLNFLPLDFFPDLNALVDTATALYEEELTGREHCSPHHTAIRQALVCWDELTKLIAWMSSNITSEQVRTIIVNHVNDTWGLKVRQSLWFHLSCLTFGQHTVQEFLVSFGVWIRTPAPYRPPNAPILSTLPEHTVIC

SEQ ID NO: 10703 - protein, 1301 aa, Artificial Sequence
  SARS-CoV-2/USA/WA-UW291/2020__EPI_ISL_418076 spike protein (1-1147) WhcAg construct
MFVFLVLLPLVSSQCVNLTTRTQLPPAYTNSFTRGVYYPDKVFRSSVLHSTQDLFLPFFSNVTWFHAIHVSGTNGTKRFDNPVLPFNDGVYFASTEKSNIIRGWIFGTTLDSKTQSLLIVNNATNVVIKVCEFQFCNDPFLGVYYHKNNKSWMESEFRVYSSANNCTFEYVSQPFLMDLEGKQGNFKNLREFVFKNIDGYFKIYSKHTPINLVRDLPQGFSALEPLVDLPIGINITRFQTLLALHRSYLTPGDSSSGWTAGAAAYYVGYLQPRTFLLKYNENGTITDAVDCALDPLSETKCTLKSFTVEKGIYQTSNFRVQPTESIVRFPNITNLCPFGEVFNATRFASVYAWNRKRISNCVADYSVLYNSASFSTFKCYGVSPTKLNDLCFTNVYADSFVIRGDEVRQIAPGQTGKIADYNYKLPDDFTGCVIAWNSNNLDSKVGGNYNYLYRLFRKSNLKPFERDISTEIYQAGSTPCNGVEGFNCYFPLQSYGFQPTNGVGYQPYRVVVLSFELLHAPATVCGPKKSTNLVKNKCVNFNFNGLTGTGVLTESNKKFLPFQQFGRDIADTTDAVRDPQTLEILDITPCSFGGVSVITPGTNTSNQVAVLYQGVNCTEVPVAIHADQLTPTWRVYSTGSNVFQTRAGCLIGAEHVNNSYECDIPIGAGICASYQTQTNSPRRARSVASQSIIAYTMSLGAENSVAYSNNSIAIPTNFTISVTTEILPVSMTKTSVDCTMYICGDSTECSNLLLQYGSFCTQLNRALTGIAVEQDKNTQEVFAQVKQIYKTPPIKDFGGFNFSQILPDPSKPSKRSFIEDLLFNKVTLADAGFIKQYGDCLGDIAARDLICAQKFNGLTVLPPLLTDEMIAQYTSALLAGTITSGWTFGAGAALQIPFAMQMAYRFNGIGVTQNVLYENQKLIANQFNSAIGKIQYSLSSTASALGKLQDVVNQNAQALNTLVKQLSSNFGAISSVLNDILSRLDKVEAEVQIDRLITGRLQSLQTYVTQQLIRAAEIRASANLAATKMSECVLGQSKRVDFCGKGYHLMSFPQSAPHGVVFLHVTYVPAQEKNFTTAPAICHDGKAHFPREGVFVSNGTHWFVTQRNFYEPQIITTDNTFVSGNCDVVIGIVNNTVYDPLQPELDSGGGGSDIDPYKEFGSSYQLLNFLPLDFFPDLNALVDTATALYEEELTGREHCSPHHTAIRQALVCWDELTKLIAWMSSNITSEQVRTIIVNHVNDTWGLKVRQSLWFHLSCLTFGQHTVQEFLVSFGVWIRTPAPYRPPNAPILSTLPEHTVIC

SEQ ID NO: 10704 - protein, 1301 aa, Artificial Sequence; identical to SEQ ID NO: 10667
  SARS-CoV-2/Portugal/PT0034/2020__EPI_ISL_418019 spike protein (1-1147) WhcAg construct

SEQ ID NO: 10705 - protein, 1301 aa, Artificial Sequence; identical to SEQ ID NO: 10659
  SARS-CoV-2/Iceland/202/2020__EPI_ISL_417750 spike protein (1-1147) WhcAg construct

SEQ ID NO: 10706 - protein, 1301 aa, Artificial Sequence
  SARS-CoV-2/USA/WA-UW261/2020__EPI_ISL_418046 spike protein (1-1147) WhcAg construct
MFVFLVLLPLVSSQCVNLTTRTQLPPAYTNSFTRGVYYPDKVFRSSVLHSTQDLFLPFFSNVTWFHAIHVSGTNGTKRFDNPVLPFNDGVYFASTEKSNIIRGWIFGTTLDSKTQSLLIVNNATNVVIKVCEFQFCNDPFLGVYYHKNNKSWMESEFRVYSSANNCTFEYVSQPFLMDLEGKQGNFKNLREFVFKNIDGYFKIYSKHTPINLVRDLPQGFSALEPLVDLPIGINITRFQTLLALHRSYLTPGDSSSGWTAGAAAYYVGYLQPRTFLLKYNENGTITDAVDCALDPLSETKCTLKSFTVEKGIYQTSNFRVQPTESIVRFPNITNLCPFGEVFNATRFTSVYAWNRKRISNCVADYSVLYNSASFSTFKCYGVSPTKLNDLCFTNVYADSFVIRGDEVRQIAPGQTGKIADYNYKLPDDFTGCVIAWNSNNLDSKVGGNYNYLYRLFRKSNLKPFERDISTEIYQAGSTPCNGVEGFNCYFPLQSYGFQPTNGVGYQPYRVVVLSFELLHAPATVCGPKKSTNLVKNKCVNFNFNGLTGTGVLTESNKKFLPFQQFGRDIADTTDAVRDPQTLEILDITPCSFGGVSVITPGTNTSNQVAVLYQDVNCTEVPVAIHADQLTPTWRVYSTGSNVFQTRAGCLIGAEHVNNSYECDIPIGAGICASYQTQTNSPRRARSVASQSIIAYTMSLGAENSVAYSNNSIAIPTNFTISVTTEILPVSMTKTSVDCTMYICGDSTECSNLLLQYGSFCTQLNRALTGIAVEQDKNTQEVFAQVKQIYKTPPIKDFGGFNFSQILPDPSKPSKRSFIEDLLFNKVTLADAGFIKQYGDCLGDIAARDLICAQKFNGLTVLPPLLTDEMIAQYTSALLAGTITSGWTFGAGAALQIPFAMQMAYRFNGIGVTQNVLYENQKLIANQFNSAIGKIQDSLSSTASALGKLQDVVNQNAQALNTLVKQLSSNFGAISSVLNDILSRLDKVEAEVQIDRLITGRLQSLQTYVTQQLIRAAEIRASANLAATKMSECVLGQSKRVDFCGKGYHLMSFPQSAPHGVVFLHVTYVPAQEKNFTTAPAICHDGKAHFPREGVFVSNGTHWFVTQRNFYEPQIITTDNTFVSGNCDVVIGIVNNTVYDPLQPELDSGGGGSDIDPYKEFGSSYQLLNFLPLDFFPDLNALVDTATALYEEELTGREHCSPHHTAIRQALVCWDELTKLIAWMSSNITSEQVRTIIVNHVNDTWGLKVRQSLWFHLSCLTFGQHTVQEFLVSFGVWIRTPAPYRPPNAPILSTLPEHTVIC

SEQ ID NO: 10707 - protein, 1301 aa, Artificial Sequence
  SARS-CoV-2/Portugal/PT0035/2020__EPI_ISL_418020 spike protein (1-1147) WhcAg construct
MFVFLVLLPLVSSQCVNLTTRTQLPPAYTNSFTRGVYYPDKVFRSSVLHSTQDLFLPFFSNVTWFHAIHVSGTNGTKRFDNPVLPFNDGVYFASTEKSNIIRGWIFGTTLDSKTQSLLIVNNATNVVIKVCEFQFCNDPFLGVYYHKNNKSWMESEFRVYSSANNCTFEYVSQPFLMDLEGKQGNFKNLREFVFKNIDGYFKIYSKHTPINLVRDLPQGFSALEPLVDLPIGINITRFQTLLALHRSYLTPGDSSSGWTAGAAAYYVGYLQPRTFLLKYNENGTITDAVDCALDPLSETKCTLKSFTVEKGIYQTSNFRVQPTESIVRFPNITNLCPFGEVFNATRFASVYAWNRKRISNCVADYSVLYNSASFSTFKCYGVSPTKLNDLCFTNVYADSFVIRGDEVRQIAPGQTGKIADYNYKLPDDFTGCVIAWNSNNLDSKVGGNYNYLYRLFRKSNLKPFERDISTEIYQAGSTPCNGVEGFNCYFPLQSYGFQPTNGVGYQPYRVVVLSFELLHAPATVCGPKKSTNLVKNKCVNFNFNGLTGTGVLTESNKKFLPFQQFGRDIADTTDAVRDPQTLEILDITPCSFGGVSVITPGTNTSNQVAVLYQDVNCTEVPVAIHADQLTPTWRVYSTGSNVFQTRAGCLIGAEHVNNSYECDIPIGAGICASYQTQTNSPRRARSVASQSIIAYTMSLGAENSVAYSNNSIAIPTNFTISVTTEILPVSMTKTSVDCTMYICGDSTECSNLLLQYGSFCTQLNRALTGIAVEQDKNTQEVFAQVKQIYKTPPIKDFGGFNFSQILPDPSKPSKRSFIEDLLFNKVTLADAGFIKQYGDCLGDISARDLICAQKFNGLTVLPPLLTDEMIAQYTSALLAGTITSGWTFGAGAALQIPFAMQMAYRFNGIGVTQNVLYENQKLIANQFNSAIGKIQDSLSSTASALGKLQDVVNQNAQALNTLVKQLSSNFGAISSVLNDILSRLDKVEAEVQIDRLITGRLQSLQTYVTQQLIRAAEIRASANLAATKMSECVLGQSKRVDFCGKGYHLMSFPQSAPHGVVFLHVTYVPAQEKNFTTAPAICHDGKAHFPREGVFVSNGTHWFVTQRNFYEPQIITTDNTFVSGNCDVVIGIVNNTVYDPLQPELDSGGGGSDIDPYKEFGSSYQLLNFLPLDFFPDLNALVDTATALYEEELTGREHCSPHHTAIRQALVCWDELTKLIAWMSSNITSEQVRTIIVNHVNDTWGLKVRQSLWFHLSCLTFGQHTVQEFLVSFGVWIRTPAPYRPPNAPILSTLPEHTVIC

SEQ ID NO: 10708 - protein, 1301 aa, Artificial Sequence
  SARS-CoV-2/USA/NY-NYUMC7/2020__EPI_ISL_418192 spike protein (1-1147) WhcAg construct
MFVFLVLLPLVSSQCVNLTTRTQLPPAYTNSFTRGVYYPDKVFRSSVLHSTQDLFLPFFSNVTWFHAIHVSGTNGTKRFDNPVLPFNDGVYFASTEKSNIIRGWIFGTTLDSKTQSLLIVNNATNVVIKVCEFQFCNDPFLGVYHHKNNKSWMESEFRVYSSANNCTFEYVSQPFLMDLEGKQGNFKNLREFVFKNIDGYFKIYSKHTPINLVRDLPQGFSALEPLVDLPIGINITRFQTLLALHRSYLTPGDSSSGWTAGAAAYYVGYLQPRTFLLKYNENGTITDAVDCALDPLSETKCTLKSFTVEKGIYQTSNFRVQPTESIVRFPNITNLCPFGEVFNATRFASVYAWNRKRISNCVADYSVLYNSASFSTFKCYGVSPTKLNDLCFTNVYADSFVIRGDEVRQIAPGQTGKIADYNYKLPDDFTGCVIAWNSNNLDSKVGGNYNYLYRLFRKSNLKPFERDISTEIYQAGSTPCNGVEGFNCYFPLQSYGFQPTNGVGYQPYRVVVLSFELLHAPATVCGPKKSTNLVKNKCVNFNFNGLTGTGVLTESNKKFLPFQQFGRDIADTTDAVRDPQTLEILDITPCSFGGVSVITPGTNTSNQVAVLYQGVNCTEVPVAIHADQLTPTWRVYSTGSNVFQTRAGCLIGAEHVNNSYECDIPIGAGICASYQTQTNSPRRARSVASQSIIAYTMSLGAENSVAYSNNSIAIPTNFTISVTTEILPVSMTKTSVDCTMYICGDSTECSNLLLQYGSFCTQLNRALTGIAVEQDKNTQEVFAQVKQIYKTPPIKDFGGFNFSQILPDPSKPSKRSFIEDLLFNKVTLADAGFIKQYGDCLGDIAARDLICAQKFNGLTVLPPLLTDEMIAQYTSALLAGTITSGWTFGAGAALQIPFAMQMAYRFNGIGVTQNVLYENQKLIANQFNSAIGKIQDSLSSTASALGKLQDVVNQNAQALNTLVKQLSSNFGAISSVLNDILSRLDKVEAEVQIDRLITGRLQSLQTYVTQQLIRAAEIRASANLAATKMSECVLGQSKRVDFCGKGYHLMSFPQSAPHGVVFLHVTYVPAQEKNFTTAPAICHDGKAHFPREGVFVSNGTHWFVTQRNFYEPQIITTDNTFVSGNCDVVIGIVNNTVYDPLQPELDSGGGGSDIDPYKEFGSSYQLLNFLPLDFFPDLNALVDTATALYEEELTGREHCSPHHTAIRQALVCWDELTKLIAWMSSNITSEQVRTIIVNHVNDTWGLKVRQSLWFHLSCLTFGQHTVQEFLVSFGVWIRTPAPYRPPNAPILSTLPEHTVIC

SEQ ID NO: 10709 - protein, 1301 aa, Artificial Sequence
  SARS-CoV-2/Iceland/189/2020__EPI_ISL_417709 spike protein (1-1147) WhcAg construct
MFVFLVLLPLVSSQCVNLTTRTQLPPAYTNSFTRGVYYPDKVFRSSVLHSTQDLFLPFFSNVTWFHAIHVSGTNGTKRFDNPVLPFNDGVYFASTEKSNIIRGWIFGTTLDSKTQSLLIVNNATNVVIKVCEFQFCNDPFLGVYYHKNNKSWMESEFRVYSSANNCTFEYVSQPFLMDLEGKQGNFKNLREFVFKNIDGYFKIYSKHTPINLVRDLPQGFSALEPLVDLPIGINITRFQTLLALHRSYLTPGDSSSGWTAGAAAYYVGYLQPRTFLLKYNENGTITDAVDCALDPLSETKCTLKSFTVEKGIYQTSNFRVQPTESIVRFPNITNLCPFGEVFNATRFASVYAWNRKRISNCVADYSVLYNSASFSTFKCYGVSPTKLNDLCFTNVYADSFVIRGDEVRQIAPGQTGKIADYNYKLPDDFTGCVIAWNSNNLDSKVGGNYNYLYRLFRKSNLKPFERDISTEIYQAGSTPCNGVEGFNCYFPLQSYGFQPTNGVGYQPYRVVVLSFELLHAPATVCGPKKSTNLVKNKCVNFNFNGLTGTGVLTESNKKFLPFQQFGRDIADTTDAVRDPQTLEILDITPCSFGGVSVITPGTNTSNQVAVLYQGVNCTEVPVAIHADQLTPTWRVYSTGSNVFQTRAGCLIGAEHVNNSYECDIPIGAGICASYQTQTNSPRRARSVASQSIIAYTMSLGAENSVAYSNNSIAIPTNFTISVTTEILPVSMTKTSVDCTMYICGDSTECSNLLLQYGSFCTQLNRALTGIAVEQDKNTQEVFAQVKQIYKTPPIKDFGGFNFSQILPDPSKPSKRSFIEDLLFNKVTLADAGFTKQYGDCLGDIAARDLICAQKFNGLTVLPPLLTDEMIAQYTSALLAGTITSGWTFGAGAALQIPFAMQMAYRFNGIGVTQNVLYENQKLIANQFNSAIGKIQDSLSSTASALGKLQDVVNQNAQALNTLVKQLSSNFGAISSVLNDILSRLDKVEAEVQIDRLITGRLQSLQTYVTQQLIRAAEIRASANLAATKMSECVLGQSKRVDFCGKGYHLMSFPQSAPHGVVFLHVTYVPAQEKNFTTAPAICHDGKAHFPREGVFVSNGTHWFVTQRNFYEPQIITTDNTFVSGNCDVVIGIVNNTVYDPLQPELDSGGGGSDIDPYKEFGSSYQLLNFLPLDFFPDLNALVDTATALYEEELTGREHCSPHHTAIRQALVCWDELTKLIAWMSSNITSEQVRTIIVNHVNDTWGLKVRQSLWFHLSCLTFGQHTVQEFLVSFGVWIRTPAPYRPPNAPILSTLPEHTVIC

SEQ ID NO: 10710 - protein, 1301 aa, Artificial Sequence
  SARS-CoV-2/Australia/NSW56/2020__EPI_ISL_417408 spike protein (1-1147) WhcAg construct
MFVFLVLLPLVSSQCVNLTTRTQLPPAYTNSFTRGVYYPDKVFRSSVLHSTQDLFLPFFSNVTWFHAIHVSGTNGTKRFDNPVLPFNDGVYFASTEKSNIIRGWIFGTTLDSKTQSLLIVNNATNVVIKVCEFQFCNDPFLGVYYHKNNKSWMESEFRVYSSANNCTFEYVSQPFLMDLEGKQGNFKNLREFVFKNIDGYFKIYSKHTPINLVRDLPQGFSALEPLVDLPIGINITRFQTLLALHRSYLTPGDSSSGWTAGAAAYYVGYLQPRTFLLKYNENGTITDAVDCALDPLSETKCTLKSFTVEKGIYQTSNFRVQPTESIVRFPNITNLCPFGEVFNATRFASVYAWNRKRISNCVADYSVLYNSASFSTFKCYGVSPTKLNDLCFTNVYADSFVIRGDEVRQIAPGQTGKIADYNYKLPDDFTGCVIAWNSNNLDSKVGGNYNYLYRLFRKSNLKPFERDISTEIYQAGSTPCNGVEGFNCYFPLQSYGFQPTNGVGYQPYRVVVLSFELLHAPATVCGPKKSTNLVKNKCVNFNFNGLTGTGVLTESNKKFLPFQQFGRDIADTTDAVRDPQTLEILDITPCSFGGVSVITPGTNTSNQVAVLYQDVNCTEVPVAIHADQLTPTWRVYSTGSNVFQTRAGCLIGAEHVNNSYECDIPIGAGICASYQTQTNSPRRARSVASQSIIAYTMSLGAENSVAYSNNSIAIPTNFTISVTTEILPVSMTKTSVDCTMYICGDSTECSNLLLQYGSFCTQLNRALTGIAVEQDKNTQEVFAQVKQIYKTPPIKDFGGFNFSQILPDSSKPSKRSFIEDLLFNKVTLADAGFIKQYGDCLGDIAARDLICAQKFNGLTVLPPLLTDEMIAQYTSALLAGTITSGWTFGAGAALQIPFAMQMAYRFNGIGVTQNVLYENQKLIANQFNSAIGKIQDSLSSTASALGKLQDVVNQNAQALNTLVKQLSSNFGAISSVLNDILSRLDKVEAEVQIDRLITGRLQSLQTYVTQQLIRAAEIRASANLAATKMSECVLGQSKRVDFCGKGYHLMSFPQSAPHGVVFLHVTYVPAQEKNFTTAPAICHDGKAHFPREGVFVSNGTHWFVTQRNFYEPQIITTDNTFVSGNCDVVIGIVNNTVYDPLQPELDSGGGGSDIDPYKEFGSSYQLLNFLPLDFFPDLNALVDTATALYEEELTGREHCSPHHTAIRQALVCWDELTKLIAWMSSNITSEQVRTIIVNHVNDTWGLKVRQSLWFHLSCLTFGQHTVQEFLVSFGVWIRTPAPYRPPNAPILSTLPEHTVIC

SEQ ID NO: 10711 - protein, 1301 aa, Artificial Sequence
  SARS-CoV-2/Iceland/280/2020__EPI_ISL_417608 spike protein (1-1147) WhcAg construct
MFVFLVLLPLVSSQCVNLTTRTQLPPAYTNSFTRGVYYPDKVFRSSVLHSTQDLFLPFFSNVTWFHAIHVSGTNGTKRFDNPVLPFNDGVYFASTEKSNIIRGWIFGTTLDSKTQSLLIVNNATNVVIKVCEFQFCNDPFLGVYYHKNNKSWMESEFRVYSSANNCTFEYVSQPFLMDLEGKQGNFKNLREFVFKNIDGYFKIYSKHTPINLVRDLPQGFSALEPLVDLPIGINITRFQTLLALHRSYLTPGDSSSGWTAGAAAYYVGYLQPRTFLLKYNENGTITDAVDCALDPLSETKCTLKSFTVEKGIYQTSNFRVQPTESIVRFPNITNLCPFGEVFNATRFASVYAWNRKRISNCVADYSVLYNSASFSTFKCYGVSPTKLNDLCFTNVYADSFVIRGDEVRQIAPGQTGKIADYNYKLPDDFTGCVIAWNSNNLDSKVGGNYNYLYRLFRKSNLKPFERDISTEIYQAGSTPCNGVEGFNCYFPLQSYGFQPTNGVGYQPYRVVVLSFELLHAPATVCGPKKSTNLVKNKCVNFNFNGLTGTGVLTESNKKFLPFQQFGRDIADTTDAVRDPQTLEILDITPCSFGGVSVITPGTNTSNQVAVLYQGVNCTEVPVAIHADQLTPTWRVYSTGSNVFQTRAGCLIGAEHVNNSYECDIPIGAGICASYHTQTNSPRRARSVASQSIIAYTMSLGAENSVAYSNNSIAIPTNFTISVTTEILPVSMTKTSVDCTMYICGDSTECSNLLLQYGSFCTQLNRALTGIAVEQDKNTQEVFAQVKQIYKTPPIKDFGGFNFSQILPDPSKPSKRSFIEDLLFNKVTLADAGFIKQYGDCLGDIAARDLICAQKFNGLTVLPPLLTDEMIAQYTSALLAGTITSGWTFGAGAALQIPFAMQMAYRFNGIGVTQNVLYENQKLIANQFNSAIGKIQDSLSSTASALGKLQDVVNQNAQALNTLVKQLSSNFGAISSVLNDILSRLDKVEAEVQIDRLITGRLQSLQTYVTQQLIRAAEIRASANLAATKMSECVLGQSKRVDFCGKGYHLMSFPQSAPHGVVFLHVTYVPAQEKNFTTAPAICHDGKAHFPREGVFVSNGTHWFVTQRNFYEPQIITTDNTFVSGNCDVVIGIVNNTVYDPLQPELDSGGGGSDIDPYKEFGSSYQLLNFLPLDFFPDLNALVDTATALYEEELTGREHCSPHHTAIRQALVCWDELTKLIAWMSSNITSEQVRTIIVNHVNDTWGLKVRQSLWFHLSCLTFGQHTVQEFLVSFGVWIRTPAPYRPPNAPILSTLPEHTVIC

SEQ ID NO: 10712 - protein, 1301 aa, Artificial Sequence; identical to SEQ ID NO: 10667
  SARS-CoV-2/Iceland/247/2020__EPI_ISL_417575 spike protein (1-1147) WhcAg construct

SEQ ID NO: 10713 - protein, 1301 aa, Artificial Sequence
  SARS-CoV-2/Iceland/238/2020__EPI_ISL_417566 spike protein (1-1147) WhcAg construct
MFVFLVLLPLVSSQCVNLTTRTQLPPAYTNSFTRGVYYPDKVFRSSVLHSTQDLFLPFFSNVTWFHAIHVSGTNGTKRFDNPVLPFNDGVYFASTEKSNIIRGWIFGTTLDSKTQSLLIVNNATNVVIKVCEFQFCNDPFLGVYYHKNNKSWMESEFRVYSSANNCTFEYVSQPFLMDLEGKQGNFKNLREFVFKNIDGYFKIYSKHTPINLVRDLPQGFSALEPLVDLPIGINITRFQTLLALHRSYLTPGDSSSGWTAGAAAYYVGYLQPRTFLLKYNENGTITDAVDCALDPLSETKCTLKSFTVEKGIYQTSNFRVQPTESIVRFPNITNLCPFGEVFNATRFASVYAWNRKRISNCVADYSVLYNSASFSTFKCYGVSPTKLNDLCFTNVYADSFVIRGDEVRQIAPGQTGKIADYNYKLPDDFTGCVIAWNSNNLDSKVGGNYNYLYRLFRKSNLKPFERDISTEIYQAGSTPCNGVEGFNCYFPLQSYGFQPTNGVGYQPYRVVVLSFELLHAPATVCGPKKSTNLVKNKCVNFNFNGLTGTGVLTESNKKFLPFQQFGRDIADTTDAVRDPQTLEILDITPCSFGGVSVITPGTNTSNQVAVLYQGVNCTEVPVAIHADQLTPTWRVYSTGSNVFQTRAGCLIGAEHVNNSYECDIPIGAGICASYQTQTNSPRRARSVASQSIIAYTMSLGAENSVAYSNNSIAIPTNFTISVTTEILPVSMTKTSVDCTMYICGDSTECSNLLLQYGSFCTQLNRALTGIAVEQDKNTQEVFAQVKQIYKTPPIKDFGGFNFSQILPDPSKPSKRSFIEDLLFNKVTLADVGFIKQYGDCLGDIAARDLICAQKFNGLTVLPPLLTDEMIAQYTSALLAGTITSGWTFGAGAALQIPFAMQMAYRFNGIGVTQNVLYENQKLIANQFNSAIGKIQDSLSSTASALGKLQDVVNQNAQALNTLVKQLSSNFGAISSVLNDILSRLDKVEAEVQIDRLITGRLQSLQTYVTQQLIRAAEIRASANLAATKMSECVLGQSKRVDFCGKGYHLMSFPQSAPHGVVFLHVTYVPAQEKNFTTAPAICHDGKAHFPREGVFVSNGTHWFVTQRNFYEPQIITTDNTFVSGNCDVVIGIVNNTVYDPLQPELDSGGGGSDIDPYKEFGSSYQLLNFLPLDFFPDLNALVDTATALYEEELTGREHCSPHHTAIRQALVCWDELTKLIAWMSSNITSEQVRTIIVNHVNDTWGLKVRQSLWFHLSCLTFGQHTVQEFLVSFGVWIRTPAPYRPPNAPILSTLPEHTVIC

SEQ ID NO: 10714 - protein, 1301 aa, Artificial Sequence
  SARS-CoV-2/Greece/16/2020__EPI_ISL_418265 spike protein (1-1147) WhcAg construct
MFVFLVLLPLVSSQCVNLTTRTQLPPAYTNSFTRGVYYPDKVFRSSVLHSTQDLFLPFFSNVTWFHAIHVSGTNGTKRFDNPVLPFNDGVYFASTEKSNIIRGWIFGTTLDSKTQSLLIVNNATNVVIKVCEFQFCNDPFLGVYYHKNNKSWMESEFRVYSSANNCTFEYVSQPFLMDLEGKQGNFKNLREFVFKNVDGYFKIYSKHTPINLVRDLPQGFSALEPLVDLPIGINITRFQTLLALHRSYLTPGDSSSGWTAGAAAYYVGYLQPRTFLLKYNENGTITDAVDCALDPLSETKCTLKSFTVEKGIYQTSNFRVQPTESIVRFPNITNLCPFGEVFNATRFASVYAWNRKRISNCVADYSVLYNSASFSTFKCYGVSPTKLNDLCFTNVYADSFVIRGDEVRQIAPGQTGKIADYNYKLPDDFTGCVIAWNSNNLDSKVGGNYNYLYRLFRKSNLKPFERDISTEIYQAGSTPCNGVEGFNCYFPLQSYGFQPTNGVGYQPYRVVVLSFELLHAPATVCGPKKSTNLVKNKCVNFNFNGLTGTGVLTESNKKFLPFQQFGRDIADTTDAVRDPQTLEILDITPCSFGGVSVITPGTNTSNQVAVLYQDVNCTEVPVAIHADQLTPTWRVYSTGSNVFQTRAGCLIGAEHVNNSYECDIPIGAGICASYQTQTNSPRRARSVASQSIIAYTMSLGAENSVAYSNNSIAIPTNFTISVTTEILPVSMTKTSVDCTMYICGDSTECSNLLLQYGSFCTQLNRALTGIAVEQDKNTQEVFAQVKQIYKTPPIKDFGGFNFSQILPDPSKPSKRSFIEDLLFNKVTLADAGFIKQYGDCLGDIAARDLICAQKFNGLTVLPPLLTDEMIAQYTSALLAGTITSGWTFGAGAALQIPFAMQMAYRFNGIGVTQNVLYENQKLIANQFNSAIGKIQDSLSSTASALGKLQDVVNQNAQALNTLVKQLSSNFGAISSVLNDILSRLDKVEAEVQIDRLITGRLQSLQTYVTQQLIRAAEIRASANLAATKMSECVLGQSKRVDFCGKGYHLMSFPQSAPHGVVFLHVTYVPAQEKNFTTAPAICHDGKAHFPREGVFVSNGTHWFVTQRNFYEPQIITTDNTFVSGNCDVVIGIVNNTVYDPLQPELDSGGGGSDIDPYKEFGSSYQLLNFLPLDFFPDLNALVDTATALYEEELTGREHCSPHHTAIRQALVCWDELTKLIAWMSSNITSEQVRTIIVNHVNDTWGLKVRQSLWFHLSCLTFGQHTVQEFLVSFGVWIRTPAPYRPPNAPILSTLPEHTVIC

SEQ ID NO: 10715 - protein, 1301 aa, Artificial Sequence
  SARS-CoV-2/Iceland/319/2020__EPI_ISL_417648 spike protein (1-1147) WhcAg construct
MFVFLVLLPLVSSQCVNLTTRTQLPPAYTNSFTRGVYYPDKVFRSSVLHSTQDLFLPFFSNVTWFHAIHVSGTNGTKRFDNPVLPFNDGVYFASTEKSNIIRGWIFGTTLDSKTQSLLIVNNATNVVIKVCEFQFCNDPFLGVYYHKNNKSWMESEFRVYSSANNCTFEYVSQPFLIDLEGKQGNFKNLREFVFKNIDGYFKIYSKHTPINLVRDLPQGFSALEPLVDLPIGINITRFQTLLALHRSYLTPGDSSSGWTAGAAAYYVGYLQPRTFLLKYNENGTITDAVDCALDPLSETKCTLKSFTVEKGIYQTSNFRVQPTESIVRFPNITNLCPFGEVFNATRFASVYAWNRKRISNCVADYSVLYNSASFSTFKCYGVSPTKLNDLCFTNVYADSFVIRGDEVRQIAPGQTGKIADYNYKLPDDFTGCVIAWNSNNLDSKVGGNYNYLYRLFRKSNLKPFERDISTEIYQAGSTPCNGVEGFNCYFPLQSYGFQPTNGVGYQPYRVVVLSFELLHAPATVCGPKKSTNLVKNKCVNFNFNGLTGTGVLTESNKKFLPFQQFGRDIADTTDAVRDPQTLEILDITPCSFGGVSVITPGTNTSNQVAVLYQGVNCTEVPVAIHADQLTPTWRVYSTGSNVFQTRAGCLIGAEHVNNSYECDIPIGAGICASYQTQTNSPRRARSVASQSIIAYTMSLGAENSVAYSNNSIAIPTNFTISVTTEILPVSMTKTSVDCTMYICGDSTECSNLLLQYGSFCTQLNRALTGIAVEQDKNTQEVFAQVKQIYKTPPIKDFGGFNFSQILPDPSKPSKRSFIEDLLFNKVTLADAGFIKQYGDCLGDIAARDLICAQKFNGLTVLPPLLTDEMIAQYTSALLAGTITSGWTFGAGAALQIPFAMQMAYRFNGIGVTQNVLYENQKLIANQFNSAIGKIQDSLSSTASALGKLQDVVNQNAQALNTLVKQLSSNFGAISSVLNDILSRLDKVEAEVQIDRLITGRLQSLQTYVTQQLIRAAEIRASANLAATKMSECVLGQSKRVDFCGKGYHLMSFPQSAPHGVVFLHVTYVPAQEKNFTTAPAICHDGKAHFPREGVFVSNGTHWFVTQRNFYEPQIITTDNTFVSGNCDVVIGIVNNTVYDPLQPELDSGGGGSDIDPYKEFGSSYQLLNFLPLDFFPDLNALVDTATALYEEELTGREHCSPHHTAIRQALVCWDELTKLIAWMSSNITSEQVRTIIVNHVNDTWGLKVRQSLWFHLSCLTFGQHTVQEFLVSFGVWIRTPAPYRPPNAPILSTLPEHTVIC

SEQ ID NO: 10716 - protein, 1301 aa, Artificial Sequence
  SARS-CoV-2/Congo/94/2020__EPI_ISL_417947 spike protein (1-1147) WhcAg construct
MFVFLVLLPLVSSQCVNLTTRTQLPPAYTNSFTRGVYYPDKVFRSSVLHSTQDLFLPFFSNVTWFHAIHVSGTNGTKRFDNPVLPFNDGVYFASTEKSNIIRGWIFGTTLDSKTQSLLIVNNATNVVIKVCEFQFCNDPFLGVYYHKNNKSWMESEFRVYSSANNCTFEYVSQPFLMDLEGKQGNFKNLREFVFKNIDGYFKIYSKHTPINLVRDLPQGFSALEPLVDLPIGINITRFQTLLALHRSYLTPGDSSSGWTAGAAAYYVGYLQPRTFLLKYNENGTITDAVDCALDPLSETKCTLKSFTVEKGIYQTSNFRVQPTESIVRFPNITNLCPFGEVFNATRFASVYAWNRKRISNCVADYSVLYNSASFSTFKCYGVSPTKLNDLCFTNVYADSFVIRGDEVRQIAPGQTGKIADYNYKLPDDFTGCVIAWNSNNLDSKVGGNYNYLYRLFRKSNLKPFERDISTEIYQAGSTPCNGVEGFNCYFPLQSYGFQPTNGVGYQPYRVVVLSFELLHAPATVCGPKKSTNLVKNKCVNFNFNGLTGTGVLTESNKKFLPFQQFGRDIADTTDAVRDPQTLEILDITPCSFGGVSVITPGTNTSNQVAVLYQGVNCTEVPVAIHADQLTPTWRVYSTGSNVFQTRAGCLIGAEHVNNSYECDIPIGAGICASYQTQTNSPRRARSVASQSIIAYTMSLGAENSVAYSNNSIAIPTNFTISVTTEILPVSMTKTSVDCTMYICGDSTECSNLLLQYGSFCTQLNRALTGIAVEQDKNTQEVFAQVKQIYKTPPIKDFGGFNFSQILPDPSKPSKRSFIEDILFNKVTLADAGFIKQYGDCLGDIAARDLICAQKFNGLTVLPPLLTDEMIAQYTSALLAGTITSGWTFGAGAALQIPFAMQMAYRFNGIGVTQNVLYENQKLIANQFNSAIGKIQDSLSSTASALGKLQDVVNQNAQALNTLVKQLSSNFGAISSVLNDILSRLDKVEAEVQIDRLITGRLQSLQTYVTQQLIRAAEIRASANLAATKMSECVLGQSKRVDFCGKGYHLMSFPQSAPHGVVFLHVTYVPAQEKNFTTAPAICHDGKAHFPREGVFVSNGTHWFVTQRNFYEPQIITTDNTFVSGNCDVVIGIVNNTVYDPLQPELDSGGGGSDIDPYKEFGSSYQLLNFLPLDFFPDLNALVDTATALYEEELTGREHCSPHHTAIRQALVCWDELTKLIAWMSSNITSEQVRTIIVNHVNDTWGLKVRQSLWFHLSCLTFGQHTVQEFLVSFGVWIRTPAPYRPPNAPILSTLPEHTVIC

SEQ ID NO: 10717 - protein, 1301 aa, Artificial Sequence
  SARS-CoV-2/Congo/158/2020__EPI_ISL_417950 spike protein (1-1147) WhcAg construct
MFVFLVLLPLVSSQCVNLTTRTQLPPAYTNSFTRGVYYPDKVFRSSVLHSTQDLFLPFFSNVTWFHAIHVSGTNGTKRFDNPVLPFNDGVYFASTEKSNIIRGWIFGTTLDSKTQSLLIVNNATNVVIKVCEFQFCNDPFLGVYYHKNNKSWMESEFRVYSSANNCTFEYVSQPFLMDLEGKQGNFKNLREFVFKNIDGYFKIYSKHTPINLVRDLPQGFSALEPLVDLPIGINITRFQTLLALHRSYLTPGDSSSGWTAGAAAYYVGYLQPRTFLLKYNENGTITDAVDCALDPLSETKCTLKSFTVEKGIYQTSNFRVQPTESIVRFPNITNLCPFGEVFNATRFASVYAWNRKRISNCVADYSVLYNSASFSTFKCYGVSPTKLNDLCFTNVYADSFVIRGDEVRQIAPGQTGKIADYNYKLPDDFTGCVIAWNSNNLDSKVGGNYNYLYRLFRKSNLKPFERDISTEIYQAGSTPCNGVEGFNCYFPLQSYGFQPTNGVGYQPYRVVVLSFELLHAPATVCGPKKSTNLVKNKCVNFNFNGLTGTGVLTESNKKFLPFQQFGRDIADTTDAVRDPQTLEILDITPCSFGGVSVITPGTNTSNQVAVLYQDVNCTEVPVAIHADQLTPTWRVYSTGSNVFQTRAGCLIGAEHVNNSYECDIPIGAGICASYQTQTNSPRRARSVASQSIIAYTMSLGAENSVAYSNNSIAIPTNFTISVTTEILPVSMTKTSVDCTMYICGDSTECSNLLLQYGSFCTQLNRALTGIAVEQDKNTQEVFAQVKQIYKTPPIKDFGGFNFSQILPDPSKPSKRSFIEDLLFNKVTLADAGFIKQYGDCLGDIAARDLICAQKFNGLTVLPPLLTDEMIAQYTSALLAGTITSGWTFGAGAALQIPFAMQMAYRFNGIGVTQNVLYENQKLIANQFNSAIGKIQDSLSSTASALGKLQDVVNQNAQALNTLVKQLSSNFGAISSVLNDILSRLDKVEAEVQIDRLITGRLQSLQTYVTQQLIRAAEIRASANLAATKMSECVLGQSKRVDFCGKGYHLMSFPQSAPHGVVFLHVTYVPAQEKNFTTAPAICHDGKAHFPREGVFVSNGTHWFVTQRNFYEPQIITTDNTFLSGNCDVVIGIVNNTVYDPLQPELDSGGGGSDIDPYKEFGSSYQLLNFLPLDFFPDLNALVDTATALYEEELTGREHCSPHHTAIRQALVCWDELTKLIAWMSSNITSEQVRTIIVNHVNDTWGLKVRQSLWFHLSCLTFGQHTVQEFLVSFGVWIRTPAPYRPPNAPILSTLPEHTVIC

SEQ ID NO: 10718 - protein, 1301 aa, Artificial Sequence
  SARS-CoV-2/USA/UT-00034/2020__EPI_ISL_417977 spike protein (1-1147) WhcAg construct
MFVFLVLLPLVSSQCVNLTTRTQLPPAYTNSFTRGVYYPDKVFRSSVLHSTQDLFLPFFSNVTWFHAIHVSGTNGTKRFDNPVLPFNDGVYFASTEKSNIIRGWIFGTTLDSKTQSLLIVNNATNVVIKVCEFQFCNDPFLGVYYYKNNKSWMESEFRVYSSANNCTFEYVSQPFLMDLEGKQGNFKNLREFVFKNIDGYFKIYSKHTPINLVRDLPQGFSALEPLVDLPIGINITRFQTLLALHRSYLTPGDSSSGWTAGAAAYYVGYLQPRTFLLKYNENGTITDAVDCALDPLSETKCTLKSFTVEKGIYQTSNFRVQPTESIVRFPNITNLCPFGEVFNATRFASVYAWNRKRISNCVADYSVLYNSASFSTFKCYGVSPTKLNDLCFTNVYADSFVIRGDEVRQIAPGQTGKIADYNYKLPDDFTGCVIAWNSNNLDSKVGGNYNYLYRLFRKSNLKPFERDISTEIYQAGSTPCNGVEGFNCYFPLQSYGFQPTNGVGYQPYRVVVLSFELLHAPATVCGPKKSTNLVKNKCVNFNFNGLTGTGVLTESNKKFLPFQQFGRDIADTTDAVRDPQTLEILDITPCSFGGVSVITPGTNTSNQVAVLYQGVNCTEVPVAIHADQLTPTWRVYSTGSNVFQTRAGCLIGAEHVNNSYECDIPIGAGICASYQTQTNSPRRARSVASQSIIAYTMSLGAENSVAYSNNSIAIPTNFTISVTTEILPVSMTKTSVDCTMYICGDSTECSNLLLQYGSFCTQLNRALTGIAVEQDKNTQEVFAQVKQIYKTPPIKDFGGFNFSQILPDPSKPSKRSFIEDLLFNKVTLADAGFIKQYGDCLGDIAARDLICAQKFNGLTVLPPLLTDEMIAQYTSALLAGTITSGWTFGAGAALQIPFAMQMAYRFNGIGVTQNVLYENQKLIANQFNSAIGKIQDSLSSTASALGKLQDVVNQNAQALNTLVKQLSSNFGAISSVLNDILSRLDKVEAEVQIDRLITGRLQSLQTYVTQQLIRAAEIRASANLAATKMSECVLGQSKRVDFCGKGYHLMSFPQSAPHGVVFLHVTYVPAQEKNFTTAPAICHDGKAHFPREGVFVSNGTHWFVTQRNFYEPQIITTDNTFVSGNCDVVIGIVNNTVYDPLQPELDSGGGGSDIDPYKEFGSSYQLLNFLPLDFFPDLNALVDTATALYEEELTGREHCSPHHTAIRQALVCWDELTKLIAWMSSNITSEQVRTIIVNHVNDTWGLKVRQSLWFHLSCLTFGQHTVQEFLVSFGVWIRTPAPYRPPNAPILSTLPEHTVIC

SEQ ID NO: 10719 - protein, 1301 aa, Artificial Sequence
  SARS-CoV-2/USA/UT-00033/2020__EPI_ISL_417976 spike protein (1-1147) WhcAg construct
MFVFLVLLPLVSSQCVNLTTRTQLPPAYTNSFTRGVYYPDKVFRSSVLHSTQDLFLPFFSNVTWFHAIHVSGTNGTKRFDNPVLPFNDGVYFASTEKSNIIRGWIFGTTLDSKTQSLLIVNNATNVVIKVCEFQFCNDPFLGVYYHKNNKSWMESEFRVYSSANNCTFEYVSQPFLMDLEGKQGNFKNLREFVFKNIDGYFKIYSKHTPINLVRDLPQGFSALEPLVDLPIGINITRFQTLLALHRSYLTPGDSSSGLTAGAAAYYVGYLQPRTFLLKYNENGTITDAVDCALDPLSETKCTLKSFTVEKGIYQTSNFRVQPTESIVRFPNITNLCPFGEVFNATRFASVYAWNRKRISNCVADYSVLYNSASFSTFKCYGVSPTKLNDLCFTNVYADSFVIRGDEVRQIAPGQTGKIADYNYKLPDDFTGCVIAWNSNNLDSKVGGNYNYLYRLFRKSNLKPFERDISTEIYQAGSTPCNGVEGFNCYFPLQSYGFQPTNGVGYQPYRVVVLSFELLHAPATVCGPKKSTNLVKNKCVNFNFNGLTGTGVLTESNKKFLPFQQFGRDIADTTDAVRDPQTLEILDITPCSFGGVSVITPGTNTSNQVAVLYQGVNCTEVPVAIHADQLTPTWRVYSTGSNVFQTRAGCLIGAEHVNNSYECDIPIGAGICASYQTQTNSPRRARSVASQSIIAYTMSLGAENSVAYSNNSIAIPTNFTISVTTEILPVSMTKTSVDCTMYICGDSTECSNLLLQYGSFCTQLNRALTGIAVEQDKNTQEVFAQVKQIYKTPPIKDFGGFNFSQILPDPSKPSKRSFIEDLLFNKVTLADAGFIKQYGDCLGDIAARDLICAQKFNGLTVLPPLLTDEMIAQYTSALLAGTITSGWTFGAGAALQIPFAMQMAYRFNGIGVTQNVLYENQKLIANQFNSAIGKIQDSLSSTASALGKLQDVVNQNAQALNTLVKQLSSNFGAISSVLNDILSRLDKVEAEVQIDRLITGRLQSLQTYVTQQLIRAAEIRASANLAATKMSECVLGQSKRVDFCGKGYHLMSFPQSAPHGVVFLHVTYVPAQEKNFTTAPAICHDGKAHFPREGVFVSNGTHWFVTQRNFYEPQIITTDNTFVSGNCDVVIGIVNNTVYDPLQPELDSGGGGSDIDPYKEFGSSYQLLNFLPLDFFPDLNALVDTATALYEEELTGREHCSPHHTAIRQALVCWDELTKLIAWMSSNITSEQVRTIIVNHVNDTWGLKVRQSLWFHLSCLTFGQHTVQEFLVSFGVWIRTPAPYRPPNAPILSTLPEHTVIC

SEQ ID NO: 10720 - protein, 1301 aa, Artificial Sequence
  SARS-CoV-2/USA/WI-13/2020__EPI_ISL_417516 spike protein (1-1147) WhcAg construct
MFVFLVLLPLVSSQCVNLTTRTQLPPAYTNSFTRGVYYPDKVFRSSVLHSTQDLFLPFFSNVTWFHAIHVSGTNGTKRFDNPVLPFNDGVYFASTEKSNIIRGWIFGTTLDSKTQSLLIVNNATNVVIKVCEFQFCNDPFLGVYYHKNNKSWMESEFRVYSSANNCTFEYVSQPFLMDLEGKQGNFKNLREFVFKNIDGYFKIYSKHTPINLVRDLPQGFSALEPLVDLPIGINITRFQTLLALHRSYLTPGDSSSGWTAGAAAYYVGYLQPRTFLLKYNENGTITDAVDCALDPLSETKCTLKSFTVEKGIYQTSNFRVLPTESIVRFPNITNLCPFGEVFNATRFASVYAWNRKRISNCVADYSVLYNSASFSTFKCYGVSPTKLNDLCFTNVYADSFVIRGDEVRQIAPGQTGKIADYNYKLPDDFTGCVIAWNSNNLDSKVGGNYNYLYRLFRKSNLKPFERDISTEIYQAGSTPCNGVEGFNCYFPLQSYGFQPTNGVGYQPYRVVVLSFELLHAPATVCGPKKSTNLVKNKCVNFNFNGLTGTGVLTESNKKFLPFQQFGRDIADTTDAVRDPQTLEILDITPCSFGGVSVITPGTNTSNQVAVLYQGVNCTEVPVAIHADQLTPTWRVYSTGSNVFQTRAGCLIGAEHVNNSYECDIPIGAGICASYQTQTNSPRRARSVASQSIIAYTMSLGAENSVAYSNNSIAIPTNFTISVTTEILPVSMTKTSVDCTMYICGDSTECSNLLLQYGSFCTQLNRALTGIAVEQDKNTQEVFAQVKQIYKTPPIKDFGGFNFSQILPDPSKPSKRSFIEDLLFNKVTLADAGFIKQYGDCLGDIAARDLICAQKFNGLTVLPPLLTDEMIAQYTSALLAGTITSGWTFGAGAALQIPFAMQMAYRFNGIGVTQNVLYENQKLIANQFNSAIGKIQDSLSSTASALGKLQDVVNQNAQALNTLVKQLSSNFGAISSVLNDILSRLDKVEAEVQIDRLITGRLQSLQTYVTQQLIRAAEIRASANLAATKMSECVLGQSKRVDFCGKGYHLMSFPQSAPHGVVFLHVTYVPAQEKNFTTAPAICHDGKAHFPREGVFVSNGTHWFVTQRNFYEPQIITTDNTFVSGNCDVVIGIVNNTVYDPLQPELDSGGGGSDIDPYKEFGSSYQLLNFLPLDFFPDLNALVDTATALYEEELTGREHCSPHHTAIRQALVCWDELTKLIAWMSSNITSEQVRTIIVNHVNDTWGLKVRQSLWFHLSCLTFGQHTVQEFLVSFGVWIRTPAPYRPPNAPILSTLPEHTVIC

SEQ ID NO: 10721 - protein, 1300 aa, Artificial Sequence
  SARS-CoV-2/India/1-27/2020__EPI_ISL_413522 spike protein (1-1146) WhcAg construct
MFVFLVLLPLVSSQCVNLTTRTQLPPAYTNSFTRGVYYPDKVFRSSVLHSTQDLFLPFFSNVTWFHAIHVSGTNGTKRFDNPVLPFNDGVYFASTEKSNIIRGWIFGTTLDSKTQSLLIVNNATNVVIKVCEFQFCNDPFLGVYHKNNKSWMESEFRVYSSANNCTFEYVSQPFLMDLEGKQGNFKNLREFVFKNIDGYFKIYSKHTPINLVRDLPQGFSALEPLVDLPIGINITRFQTLLALHRSYLTPGDSSSGWTAGAAAYYVGYLQPRTFLLKYNENGTITDAVDCALDPLSETKCTLKSFTVEKGIYQTSNFRVQPTESIVRFPNITNLCPFGEVFNATRFASVYAWNRKRISNCVADYSVLYNSASFSTFKCYGVSPTKLNDLCFTNVYADSFVIRGDEVIQIAPGQTGKIADYNYKLPDDFTGCVIAWNSNNLDSKVGGNYNYLYRLFRKSNLKPFERDISTEIYQAGSTPCNGVEGFNCYFPLQSYGFQPTNGVGYQPYRVVVLSFELLHAPATVCGPKKSTNLVKNKCVNFNFNGLTGTGVLTESNKKFLPFQQFGRDIADTTDAVRDPQTLEILDITPCSFGGVSVITPGTNTSNQVAVLYQDVNCTEVPVAIHADQLTPTWRVYSTGSNVFQTRAGCLIGAEHVNNSYECDIPIGAGICASYQTQTNSPRRARSVASQSIIAYTMSLGAENSVAYSNNSIAIPTNFTISVTTEILPVSMTKTSVDCTMYICGDSTECSNLLLQYGSFCTQLNRALTGIAVEQDKNTQEVFAQVKQIYKTPPIKDFGGFNFSQILPDPSKPSKRSFIEDLLFNKVTLADAGFIKQYGDCLGDIAARDLICAQKFNGLTVLPPLLTDEMIAQYTSALLAGTITSGWTFGAGAALQIPFAMQMAYRFNGIGVTQNVLYENQKLIANQFNSAIGKIQDSLSSTASALGKLQDVVNQNAQALNTLVKQLSSNFGAISSVLNDILSRLDKVEAEVQIDRLITGRLQSLQTYVTQQLIRAAEIRASANLAATKMSECVLGQSKRVDFCGKGYHLMSFPQSAPHGVVFLHVTYVPAQEKNFTTAPAICHDGKAHFPREGVFVSNGTHWFVTQRNFYEPQIITTDNTFVSGNCDVVIGIVNNTVYDPLQPELDSGGGGSDIDPYKEFGSSYQLLNFLPLDFFPDLNALVDTATALYEEELTGREHCSPHHTAIRQALVCWDELTKLIAWMSSNITSEQVRTIIVNHVNDTWGLKVRQSLWFHLSCLTFGQHTVQEFLVSFGVWIRTPAPYRPPNAPILSTLPEHTVIC

SEQ ID NO: 10722 - protein, 1295 aa, Artificial Sequence
  SARS-CoV-2/pangolin/Guangxi/P4L/2017__EPI_ISL_410538 spike protein (1-1141) WhcAg construct
MFVFLFVLPLVSSQCVNLTTRTGIPPGYTNSSTRGVYYPDKVFRSSILHLTQDLFLPFFSNVTWFNTINYQGGFKKFDNPVLPFNDGVYFASTEKSNIIRGWIFGTTLDARTQSLLIVNNATNVVIKVCEFQFCTDPFLGVYYHNNNKTWVENEFRVYSSANNCTFEYISQPFLMDLEGKQGNFKNLREFVFKNVDGYFKIYSKHTPIDLVRDLPRGFAALEPLVDLPIGINITRFQTLLALHRSYLTPGNLESGWTTGAAAYYVGYLQQRTFLLSYNQNGTITDAVDCSLDPLSETKCTLKSLTVEKGIYQTSNFRVQPTISIVRFPNITNLCPFGEVFNASKFASVYAWNRKRISNCVADYSVLYNSTSFSTFKCYGVSPTKLNDLCFTNVYADSFVVKGDEVRQIAPGQTGVIADYNYKLPDDFTGCVIAWNSVKQDALTGGNYGYLYRLFRKSKLKPFERDISTEIYQAGSTPCNGQVGLNCYYPLERYGFHPTTGVNYQPFRVVVLSFELLNGPATVCGPKLSTTLVKDKCVNFNFNGLTGTGVLTTSKKQFLPFQQFGRDISDTTDAVRDPQTLEILDITPCSFGGVSVITPGTNTSNQVAVLYQDVNCTEVPMAIHAEQLTPAWRVYSAGANVFQTRAGCLVGAEHVNNSYECDIPVGAGICASYHSMSSLRSVNQRSIIAYTMSLGAENSVAYSNNSIAIPTNFTISVTTEILPVSMTKTSVDCTMYICGDSIECSNLLLQYGSFCTQLNRALTGIAVEQDKNTQEVFAQVKQIYKTPPIKDFGGFNFSQILPDPSKPSKRSFIEDLLFNKVTLADAGFIKQYGDCLGDIAARDLICAQKFNGLTVLPPLLTDEMIAQYTSALLAGTITSGWTFGAGAALQIPFAMQMAYRFNGIGVTQNVLYENQKLIANQFNSAIGKIQDSLSSTASALGKLQDVVNQNAQALNTLVKQLSSNFGAISSVLNDILSRLDKVEAEVQIDRLITGRLQSLQTYVTQQLIRAAEIRASANLAATKMSECVLGQSKRVDFCGKGYHLMSFPQSAPHGVVFLHVTYVPAQEKNFTTAPAICHEGKAHFPREGVFVSNGTHWFITQRNFYEPQIITTDNTFVSGSCDVVIGIVNNTVYDPLQPELDSGGGGSDIDPYKEFGSSYQLLNFLPLDFFPDLNALVDTATALYEEELTGREHCSPHHTAIRQALVCWDELTKLIAWMSSNITSEQVRTIIVNHVNDTWGLKVRQSLWFHLSCLTFGQHTVQEFLVSFGVWIRTPAPYRPPNAPILSTLPEHTVIC

SEQ ID NO: 10723 - protein, 1295 aa, Artificial Sequence
  SARS-CoV-2/pangolin/Guangxi/P5L/2017__EPI_ISL_410540 spike protein (1-1141) WhcAg construct
MFVFLFVLPLVSSQCVNLTTRTGIPPGYTNSSTRGVYYPDKVFRSSILHLTQDLFLPFFSNVTWFNTINYQGGFKKFDNPVLPFNDGVYFASTEKSNIIRGWIFGTTLDARTQSLLIVNNATNVVIKVCEFQFCTDPFLGVYYHNNNKTWVENEFRVYSSANNCTFEYISQPFLMDLEGKQGNFKNLREFVFKNVDGYFKIYSKHTPIDLVRDLPRGFAALEPLVDLPIGINITRFQTLLALHRSYLTPGKLESGWTTGAAAYYVGYLQQRTFLLSYNQNGTITDAVDCSLDPLSETKCTLKSLTVEKGIYQTSNFRVQPTISIVRFPNITNLCPFGEVFNASKFASVYAWNRKRISNCVADYSVLYNSTSFSTFKCYGVSPTKLNDLCFTNVYADSFVVKGDEVRQIAPGQTGVIADYNYKLPDDFTGCVIAWNSVKQDALTGGNYGYLYRLFRKSKLKPFERDISTEIYQAGSTPCNGQVGLNCYYPLERYGFHPTTGVNYQPFRVVVLSFELLNGPATVCGPKLSTTLVKDKCVNFNFNGLTGTGVLTTSKKQFLPFQQFGRDISDTTDAVRDPQTLEILDITPCSFGGVSVITPGTNTSNQVAVLYQDVNCTEVPMAIHAEQLTPAWRVYSAGANVFQTRAGCLVGAEHVNNSYECDIPVGAGICASYHSMSSFRSVNQRSIIAYTMSLGAENSVAYSNNSIAIPTNFTISVTTEILPVSMTKTSVDCTMYICGDSIECSNLLLQYGSFCTQLNRALTGIAVEQDKNTQEVFAQVKQIYKTPPIKDFGGFNFSQILPDPSKPSKRSFIEDLLFNKVTLADAGFIKQYGDCLGDIAARDLICAQKFNGLTVLPPLLTDEMIAQYTSALLAGTITSGWTFGAGAALQIPFAMQMAYRFNGIGVTQNVLYENQKLIANQFNSAIGKIQDSLSSTASALGKLQDVVNQNAQALNTLVKQLSSNFGAISSVLNDILSRLDKVEAEVQIDRLITGRLQSLQTYVTQQLIRAAEIRASANLAATKMSECVLGQSKRVDFCGKGYHLMSFPQSAPHGVVFLHVTYVPAQEKNFTTAPAICHEGKAHFPREGVFVSNGTHWFITQRNFYEPQIITTDNTFVSGSCDVVIGIVNNTVYDPLQPELDSGGGGSDIDPYKEFGSSYQLLNFLPLDFFPDLNALVDTATALYEEELTGREHCSPHHTAIRQALVCWDELTKLIAWMSSNITSEQVRTIIVNHVNDTWGLKVRQSLWFHLSCLTFGQHTVQEFLVSFGVWIRTPAPYRPPNAPILSTLPEHTVIC

SEQ ID NO: 10724 - protein, 1295 aa, Artificial Sequence
  SARS-CoV-2/pangolin/Guangxi/P5E/2017__EPI_ISL_410541 spike protein (1-1141) WhcAg construct
MFVFLFVLPLVSSQCVNLTTRTGIPPGYTNSSTRGVYYPDKVFRSSILHLTQDLFLPFFSNVTWFNTITYQGGSKKFDNPVLPFNDGVYFASTEKSNIIRGWIFGTTLDARTQSLLIVNNATNVVIKVCEFQFCTDPFLGVYYHNNNKTWVENEFRVYSSANNCTFEYISQPFLMDLEGKQGNFKNLREFVFKNVDGYFKIYSKHTPIDLVRDLPRGFAALEPLVDLPIGINITRFQTLLALHRSYLTPGKLESGWTTGAAAYYVGYLQQRTFLLSYNQNGTITDAVDCSLDPLSETKCTLKSLTVEKGIYQTSNFRVQPTISIVRFPNITNLCPFGEVFNASKFASVYAWNRKRISNCVADYSVLYNSTSFSTFKCYGVSPTKLNDLCFTNVYADSFVVKGDEVRQIAPGQTGVIADYNYKLPDDFTGCVIAWNSVKQDALTGDNYGYLYRLFRKSKLKPFERDISTEIYQAGSTPCNGQVGLNCYYPLERYGFHPTTGVNYQPFRVVVLSFELLNGPATVCGPKLSTTLVKDKCVNFNFNGLTGTGVLTTSKKQFLPFQQFGRDISDTTDAVRDPQTLEILDITPCSFGGVSVITPGTNTSNQVAVLYQDVNCTEVPMAIHAEQLTPAWRVYSAGANVFQTRAGCLVGAEHVNNSYECDIPVGAGICASYHSMSSFRSVNQRSIIAYTMSLGAENSVAYSNNSIAIPTNFTISVTTEILPVSMTKTSVDCTMYICGDSIECSNLLLQYGSFCTQLNRALTGIAVEQDKNTQEVFAQVKQIYKTPPIKDFGGFNFSQILPDPSKPSKRSFIEDLLFNKVTLADAGFIKQYGDCLGDIAARDLICAQKFNGLTVLPPLLTDEMIAQYTSALLAGTITSGWTFGAGAALQIPFAMQMAYRFNGIGVTQNVLYENQKLIANQFNSAIGKIQDSLSSTASALGKLQDVVNQNAQALNTLVKQLSSNFGAISSVLNDILSRLDKVEAEVQIDRLITGRLQSLQTYVTQQLIRAAEIRASANLAATKMSECVLGQSKRVDFCGKGYHLMSFPQSAPHGVVFLHVTYVPAQEKNFTTAPAICHEGKAHFPREGVFVSNGTHWFITQRNFYEPQIITTDNTFVSGSCDVVIGIVNNTVYDPLQPELDSGGGGSDIDPYKEFGSSYQLLNFLPLDFFPDLNALVDTATALYEEELTGREHCSPHHTAIRQALVCWDELTKLIAWMSSNITSEQVRTIIVNHVNDTWGLKVRQSLWFHLSCLTFGQHTVQEFLVSFGVWIRTPAPYRPPNAPILSTLPEHTVIC

SEQ ID NO: 10725 - protein, 1293 aa, Artificial Sequence
  SARS-CoV-2/pangolin/Guangxi/P1E/2017__EPI_ISL_410539 spike protein (1-1139) WhcAg construct
MFVFLFVLPLVSSQCVNLTTRTGIQPGYTNSSTRGVYYPDKVFRSSILHLTQDLFLPFFSNVTWFNTINYQGGFKKFDNPVLPFNDGVYFASTEKSNIIRGWIFGTTLDARTQSLLIVNNATNVVIKVCEFQFCTDPFLGVYYHNNNKTWVENEFRVYSSANNCTFEYISQPFLMDLEGKQGNFKNLREFVFKNVDGYFKIYSKHTPIDLVRDLPRGFAALEPLVDLPIGINITRFQTLLALHRSYLTPGKLESGWTTGAAAYYVGYLQQRTFLLSYNQNGTITDAVDCSLDPLSETKCTLKSLTVEKGIYQTSNFRVQPTISIVRFPNITNLCPFGEVFNASKFASVYAWNRKRISNCVADYSVLYNSTSFSTFKCYGVSPTKLNDLCFTNVYADSFVVKGDEVRQIAPGQTGVIADYNYKLPDDFTGCVIAWNSVKQDALTGGNYLYRLFRKSKLKPFERDISTEIYQAGSTPCNGQVGLNCYYPLERYGFHPTTGVNYQPFRVVVLSFELLNGPATVCGPKLSTTLVKDKCVNFNFNGLTGTGVLTTSKKQFLPFQQFGRDISDTTDAVRDPQTLEILDITPCSFGGVSVITPGTNTSNQVAVLYQDVNCTEVPMAIHAEQLTPAWRVYSAGANVFQTRAGCLVGAEHVNNSYECDIPVGAGICASYHSMSSLRSVNQRSIIAYTMSLGAENSVAYSNNSIAIPTNFTISVTTEILPVSMTKTSVDCTMYICGDSIECSNLLLQYGSFCTQLNRALTGIAVEQDKNTQEVFAQVKQIYKTPPIKDFGGFNFSQILPDPSKPSKRSFIEDLLFNKVTLADAGFIKQYGDCLGDIAARDLICAQKFNGLTVLPPLLTDEMIAQYTSALLAGTITSGWTFGAGAALQIPFAMQMAYRFNGIGVTQNVLYENQKLIANQFNSAIGKIQDSLSSTASALGKLQDVVNQNAQALNTLVKQLSSNFGAISSVLNDILSRLDKVEAEVQIDRLITGRLQSLQTYVTQQLIRAAEIRASANLAATKMSECVLGQSKRVDFCGKGYHLMSFPQSAPHGVVFLHVTYVPAQEKNFTTAPAICHEGKAHFPREGVFVSNGTHWFITQRNFYEPQIITTDNTFVSGSCDVVIGIVNNTVYDPLQPELDSGGGGSDIDPYKEFGSSYQLLNFLPLDFFPDLNALVDTATALYEEELTGREHCSPHHTAIRQALVCWDELTKLIAWMSSNITSEQVRTIIVNHVNDTWGLKVRQSLWFHLSCLTFGQHTVQEFLVSFGVWIRTPAPYRPPNAPILSTLPEHTVIC

SEQ ID NO: 10726 - protein, 1301 aa, Artificial Sequence
  SARS-CoV-2/Wuhan/WIV05/2019__EPI_ISL_402128 spike protein (1-1147)(K986P_V987P) WhcAg construct
MFVFLVLLPLVSSQCVNLTTRTQLPPAYTNSFTRGVYYPDKVFRSSVLHSTQDLFLPFFSNVTWFHAIHVSGTNGTKRFDNPVLPFNDGVYFASTEKSNIIRGWIFGTTLDSKTQSLLIVNNATNVVIKVCEFQFCNDPFLGVYYHKNNKSWMESEFRVYSSANNCTFEYVSQPFLMDLEGKQGNFKNLREFVFKNIDGYFKIYSKHTPINLVRDLPQGFSALEPLVDLPIGINITRFQTLLALHRSYLTPGDSSSGWTAGAAAYYVGYLQPRTFLLKYNENGTITDAVDCALDPLSETKCTLKSFTVEKGIYQTSNFRVQPTESIVRFPNITNLCPFGEVFNATRFASVYAWNRKRISNCVADYSVLYNSASFSTFKCYGVSPTKLNDLCFTNVYADSFVIRGDEVRQIAPGQTGKIADYNYKLPDDFTGCVIAWNSNNLDSKVGGNYNYLYRLFRKSNLKPFERDISTEIYQAGSTPCNGVEGFNCYFPLQSYGFQPTNGVGYQPYRVVVLSFELLHAPATVCGPKKSTNLVKNKCVNFNFNGLTGTGVLTESNKKFLPFQQFGRDIADTTDAVRDPQTLEILDITPCSFGGVSVITPGTNTSNQVAVLYQDVNCTEVPVAIHADQLTPTWRVYSTGSNVFQTRAGCLIGAEHVNNSYECDIPIGAGICASYQTQTNSPRRARSVASQSIIAYTMSLGAENSVAYSNNSIAIPTNFTISVTTEILPVSMTKTSVDCTMYICGDSTECSNLLLQYGSFCTQLNRALTGIAVEQDKNTQEVFAQVKQIYKTPPIKDFGGFNFSQILPDPSKPSKRSFIEDLLFNKVTLADAGFIKQYGDCLGDIAARDLICAQKFNGLTVLPPLLTDEMIAQYTSALLAGTITSGWTFGAGAALQIPFAMQMAYRFNGIGVTQNVLYENQKLIANQFNSAIGKIQDSLSSTASALGKLQDVVNQNAQALNTLVKQLSSNFGAISSVLNDILSRLDPPEAEVQIDRLITGRLQSLQTYVTQQLIRAAEIRASANLAATKMSECVLGQSKRVDFCGKGYHLMSFPQSAPHGVVFLHVTYVPAQEKNFTTAPAICHDGKAHFPREGVFVSNGTHWFVTQRNFYEPQIITTDNTFVSGNCDVVIGIVNNTVYDPLQPELDSGGGGSDIDPYKEFGSSYQLLNFLPLDFFPDLNALVDTATALYEEELTGREHCSPHHTAIRQALVCWDELTKLIAWMSSNITSEQVRTIIVNHVNDTWGLKVRQSLWFHLSCLTFGQHTVQEFLVSFGVWIRTPAPYRPPNAPILSTLPEHTVIC

SEQ ID NO: 10727 - protein, 1297 aa, Artificial Sequence
  SARS-CoV-2/bat/Yunnan/RaTG13/2013__EPI_ISL_402131 spike protein (1-1143)(K982P_V983P) WhcAg construct
MFVFLVLLPLVSSQCVNLTTRTQLPPAYTNSSTRGVYYPDKVFRSSVLHLTQDLFLPFFSNVTWFHAIHVSGTNGIKRFDNPVLPFNDGVYFASTEKSNIIRGWIFGTTLDSKTQSLLIVNNATNVVIKVCEFQFCNDPFLGVYYHKNNKSWMESEFRVYSSANNCTFEYVSQPFLMDLEGKQGNFKNLREFVFKNIDGYFKIYSKHTPINLVRDLPPGFSALEPLVDLPIGINITRFQTLLALHRSYLTPGDSSSGWTAGAAAYYVGYLQPRTFLLKYNENGTITDAVDCALDPLSETKCTLKSFTVEKGIYQTSNFRVQPTDSIVRFPNITNLCPFGEVFNATTFASVYAWNRKRISNCVADYSVLYNSTSFSTFKCYGVSPTKLNDLCFTNVYADSFVITGDEVRQIAPGQTGKIADYNYKLPDDFTGCVIAWNSKHIDAKEGGNFNYLYRLFRKANLKPFERDISTEIYQAGSKPCNGQTGLNCYYPLYRYGFYPTDGVGHQPYRVVVLSFELLNAPATVCGPKKSTNLVKNKCVNFNFNGLTGTGVLTESNKKFLPFQQFGRDIADTTDAVRDPQTLEILDITPCSFGGVSVITPGTNASNQVAVLYQDVNCTEVPVAIHADQLTPTWRVYSTGSNVFQTRAGCLIGAEHVNNSYECDIPIGAGICASYQTQTNSRSVASQSIIAYTMSLGAENSVAYSNNSIAIPTNFTISVTTEILPVSMTKTSVDCTMYICGDSTECSNLLLQYGSFCTQLNRALTGIAVEQDKNTQEVFAQVKQIYKTPPIKDFGGFNFSQILPDPSKPSKRSFIEDLLFNKVTLADAGFIKQYGDCLGDIAARDLICAQKFNGLTVLPPLLTDEMIAQYTSALLAGTITSGWTFGAGAALQIPFAMQMAYRFNGIGVTQNVLYENQKLIANQFNSAIGKIQDSLSSTASALGKLQDVVNQNAQALNTLVKQLSSNFGAISSVLNDILSRLDPPEAEVQIDRLITGRLQSLQTYVTQQLIRAAEIRASANLAATKMSECVLGQSKRVDFCGKGYHLMSFPQSAPHGVVFLHVTYVPAQEKNFTTAPAICHDGKAHFPREGVFVSNGTHWFVTQRNFYEPQIITTDNTFVSGSCDVVIGIVNNTVYDPLQPELDSGGGGSDIDPYKEFGSSYQLLNFLPLDFFPDLNALVDTATALYEEELTGREHCSPHHTAIRQALVCWDELTKLIAWMSSNITSEQVRTIIVNHVNDTWGLKVRQSLWFHLSCLTFGQHTVQEFLVSFGVWIRTPAPYRPPNAPILSTLPEHTVIC

SEQ ID NO: 10728 - protein, 1301 aa, Artificial Sequence
  SARS-CoV-2/Wuhan/HBCDC-HB-01/2019__EPI_ISL_402132 spike protein (1-1147)(K986P_V987P) WhcAg construct
MFVFLVLLPLVSSQCVNLTTRTQLPPAYTNSITRGVYYPDKVFRSSVLHSTQDLFLPFFSNVTWFHAIHVSGTNGTKRFDNPVLPFNDGVYFASTEKSNIIRGWIFGTTLDSKTQSLLIVNNATNVVIKVCEFQFCNDPFLGVYYHKNNKSWMESEFRVYSSANNCTFEYVSQPFLMDLEGKQGNFKNLREFVFKNIDGYFKIYSKHTPINLVRDLPQGFSALEPLVDLPIGINITRFQTLLALHRSYLTPGDSSSGWTAGAAAYYVGYLQPRTFLLKYNENGTITDAVDCALDPLSETKCTLKSFTVEKGIYQTSNFRVQPTESIVRFPNITNLCPFGEVFNATRFASVYAWNRKRISNCVADYSVLYNSASFSTFKCYGVSPTKLNDLCFTNVYADSFVIRGDEVRQIAPGQTGKIADYNYKLPDDFTGCVIAWNSNNLDSKVGGNYNYLYRLFRKSNLKPFERDISTEIYQAGSTPCNGVEGFNCYFPLQSYGFQPTNGVGYQPYRVVVLSFELLHAPATVCGPKKSTNLVKNKCVNFNFNGLTGTGVLTESNKKFLPFQQFGRDIADTTDAVRDPQTLEILDITPCSFGGVSVITPGTNTSNQVAVLYQDVNCTEVPVAIHADQLTPTWRVYSTGSNVFQTRAGCLIGAEHVNNSYECDIPIGAGICASYQTQTNSPRRARSVASQSIIAYTMSLGAENSVAYSNNSIAIPTNFTISVTTEILPVSMTKTSVDCTMYICGDSTECSNLLLQYGSFCTQLNRALTGIAVEQDKNTQEVFAQVKQIYKTPPIKDFGGFNFSQILPDPSKPSKRSFIEDLLFNKVTLADAGFIKQYGDCLGDIAARDLICAQKFNGLTVLPPLLTDEMIAQYTSALLAGTITSGWTFGAGAALQIPFAMQMAYRFNGIGVTQNVLYENQKLIANQFNSAIGKIQDSLSSTASALGKLQDVVNQNAQALNTLVKQLSSNFGAISSVLNDILSRLDPPEAEVQIDRLITGRLQSLQTYVTQQLIRAAEIRASANLAATKMSECVLGQSKRVDFCGKGYHLMSFPQSAPHGVVFLHVTYVPAQEKNFTTAPAICHDGKAHFPREGVFVSNGTHWFVTQRNFYEPQIITTDNTFVSGNCDVVIGIVNNTVYDPLQPELDSGGGGSDIDPYKEFGSSYQLLNFLPLDFFPDLNALVDTATALYEEELTGREHCSPHHTAIRQALVCWDELTKLIAWMSSNITSEQVRTIIVNHVNDTWGLKVRQSLWFHLSCLTFGQHTVQEFLVSFGVWIRTPAPYRPPNAPILSTLPEHTVIC

SEQ ID NO: 10729 - protein, 1301 aa, Artificial Sequence
  SARS-CoV-2/Guangdong/20SF028/2020__EPI_ISL_403936 spike protein (1-1147)(K986P_V987P) WhcAg construct
MFVFLVLLPLVSSQCVNLTTRTQLPPAYTNSFTRGVYYPDKVFRSSVLYSTQDLFLPFFSNVTWFHAIHVSGTNGTKRFDNPVLPFNDGVYFASTEKSNIIRGWIFGTTLDSKTQSLLIVNNATNVVIKVCEFQFCNDPFLGVYYHKNNKSWMESEFRVYSSANNCTFEYVSQPFLMDLEGKQGNFKNLREFVFKNIDGYFKIYSKHTPINLVRDLPQGFSALEPLVDLPIGINITRFQTLLALHRSYLTPGDSSSGWTAGAAAYYVGYLQPRTFLLKYNENGTITDAVDCALDPLSETKCTLKSFTVEKGIYQTSNFRVQPTESIVRFPNITNLCPFGEVFNATRFASVYAWNRKRISNCVADYSVLYNSASFSTFKCYGVSPTKLNDLCFTNVYADSFVIRGDEVRQIAPGQTGKIADYNYKLPDDFTGCVIAWNSNNLDSKVGGNYNYLYRLFRKSNLKPFERDISTEIYQAGSTPCNGVEGFNCYFPLQSYGFQPTNGVGYQPYRVVVLSFELLHAPATVCGPKKSTNLVKNKCVNFNFNGLTGTGVLTESNKKFLPFQQFGRDIADTTDAVRDPQTLEILDITPCSFGGVSVITPGTNTSNQVAVLYQDVNCTEVPVAIHADQLTPTWRVYSTGSNVFQTRAGCLIGAEHVNNSYECDIPIGAGICASYQTQTNSPRRARSVASQSIIAYTMSLGAENSVAYSNNSIAIPTNFTISVTTEILPVSMTKTSVDCTMYICGDSTECSNLLLQYGSFCTQLNRALTGIAVEQDKNTQEVFAQVKQIYKTPPIKDFGGFNFSQILPDPSKPSKRSFIEDLLFNKVTLADAGFIKQYGDCLGDIAARDLICAQKFNGLTVLPPLLTDEMIAQYTSALLAGTITSGWTFGAGAALQIPFAMQMAYRFNGIGVTQNVLYENQKLIANQFNSAIGKIQDSLSSTASALGKLQDVVNQNAQALNTLVKQLSSNFGAISSVLNDILSRLDPPEAEVQIDRLITGRLQSLQTYVTQQLIRAAEIRASANLAATKMSECVLGQSKRVDFCGKGYHLMSFPQSAPHGVVFLHVTYVPAQEKNFTTAPAICHDGKAHFPREGVFVSNGTHWFVTQRNFYEPQIITTDNTFVSGNCDVVIGIVNNTVYDPLQPELDSGGGGSDIDPYKEFGSSYQLLNFLPLDFFPDLNALVDTATALYEEELTGREHCSPHHTAIRQALVCWDELTKLIAWMSSNITSEQVRTIIVNHVNDTWGLKVRQSLWFHLSCLTFGQHTVQEFLVSFGVWIRTPAPYRPPNAPILSTLPEHTVIC

SEQ ID NO: 10730 - protein, 1301 aa, Artificial Sequence
  SARS-CoV-2/Shenzhen/SZTH-001/2020__EPI_ISL_406592 spike protein (1-1147)(K986P_V987P) WhcAg construct
MFVFLVLLPLVSSQCVNLTTRTQLPPAYTNSFTRGVYYPDKVFRSSVLHSTQDLFLPFFSNVTWFHAIHVSGTNGTKRFDNPVLPFNDGVYFASTEKSNIIRGWIFGTTLDSKTQSLLIVNNATNVVIKVCEFQFCNDPFLGVYYHKNNKSWMESEFRVYSSANNCTFEYVSQPFLMDLEGKQGNFKNLREFVFKNIDGYFKIYSKHTPINLVRDLPQGFSALEPLVDLPIGINITRFQTLLALHRSYLTPGDSSSGWTAGAAAYYVGYLQPRTFLLKYNENGTITDAVDCALDPLSETKCTLKSFTVEKGIYQTSNFRVQPTESIVRFPNITNLCPFGEVFNATRFASVYAWNRKRISNCVADYSVLYNSASFSTFKCYGVSPTKLNDLCFTNVYADSFVIRGDEVRQIAPGQTGKIADYNYKLPDDFTGCVIAWNSNNLDSKVGGNYNYLYRLFRKSNLKPFERDISTEIYQAGSTPCNGVEGFNCYFPLQSYGFQPTNGVGYQPYRVVVLSFELLHAPATVCGPKKSTNLVKNKCVNFNFNGLTGTGVLTESNKKFLPFQQFGRDIADTTDAVRDPQTLEILDITPCSFGGVSVITPGTNTSNQVAVLYQDVNCTEVPVAIHADQLTPTWRVYSTGSNVFQTRAGCLIGAEHVNNSYECDIPIGAGICASYQTQTNSPRRARSVASQSIIAYTMSLGAENSVAYSNNSIAIPTNFTISVTTEILPVSMTKTSVDCTMYICGDSTECSNLLLQYGSFCTQLNRALTGIAVEQDKNTQEVFAQVKQIYKTPPIKDFGGFNFSQILPDPSKPSKRSFIEDLLFNKVTLADAGFIKQYGDCLGDIAARDLICAQKFNGLTVLPPLLTDEMIAQYTSALLAGTITSGWTFGAGAALQIPFAMQMAYRFNGIGVTQNVLYENQKLIANQFNSAIGKIQDSLSSTASALGKLQDVVNQNAQALNTLVKQLSSNFGAISSVLNDILSRLDPPEAEVQIDRLITGRLQSLQTYVTQQLIRAAEIRASANLAATKMSECVLGQSKRVDFCGKGYHLMSFPQSAPHGVVFLHVTYVPAQEKNFTTAPAICHDGKAHFPREGVFVSNGTHWFVTQRNFYEPQIITTDNTFVSGNCDVLIGIVNNTVYDPLQPELDSGGGGSDIDPYKEFGSSYQLLNFLPLDFFPDLNALVDTATALYEEELTGREHCSPHHTAIRQALVCWDELTKLIAWMSSNITSEQVRTIIVNHVNDTWGLKVRQSLWFHLSCLTFGQHTVQEFLVSFGVWIRTPAPYRPPNAPILSTLPEHTVIC

SEQ ID NO: 10731 - protein, 1301 aa, Artificial Sequence
  SARS-CoV-2/Shenzhen/SZTH-004/2020__EPI_ISL_406595 spike protein (1-1147)(K986P_V987P) WhcAg construct
MFVFLVLLPLVSSQCVNLTTRTQLPPAYTNSFTRGVYYPDKVFRSSVLHSTQDLFLPFFSNVTWFHAIHVSGTNGTKRFDNPVLPFNDGVYFASTEKSNIIRGWIFGTTLDSKTQSLLIVNNATNVVIKVCEFQFCNDPFLGVYYHKNNKSWMESEFRVYSSANNCTFEYVSQPFLMDLEGKQGNFKNLREFVFKNIDGYFKIYSKHTPINLVRDLPQGFSALEPLVDLPIGINITRFQTLLALHRSYLTPGDSSSGWTAGAAAYYVGYLQPRTFLLKYNENGTITDAVDCALDPLSETKCTLKSFTVEKGIYQTSNFRVQPTESIVRFPNITNLCPFGEVFNATRFASVYAWDRKRISNCVAYYSVLYNSASFSTFKCYGVSPTKLNDLCFTNVYADSFVIRGDEVRQIAPGQTGKIADYNYKLPDDFTGCVIAWNSNNLDSKVGGNYNYLYRLFRKSNLKPFERDISTEIYQAGSTPCNGVEGFNCYFPLQSYGFQPTNGVGYQPYRVVVLSFELLHAPATVCGPKKSTNLVKNKCVNFNFNGLTGTGVLTESNKKFLPFQQFGRDIADTTDAVRDPQTLEILDITPCSFGGVSVITPGTNTSNQVAVLYQDVNCTEVPVAIHADQLTPTWRVYSTGSNVFQTRAGCLIGAEHVNNSYECDIPIGAGICASYQTQTNSPRRARSVASQSIIAYTMSLGAENSVAYSNNSIAIPTNFTISVTTEILPVSMTKTSVDCTMYICGDSTECSNLLLQYGSFCTQLNRALTGIAVEQDKNTQEVFAQVKQIYKTPPIKDFGGFNFSQILPDPSKPSKRSFIEDLLFNKVTLADAGFIKQYGDCLGDIAARDLICAQKFNGLTVLPPLLTDEMIAQYTSALLAGTITSGWTFGAGAALQIPFAMQMAYRFNGIGVTQNVLYENQKLIANQFNSAIGKIQDSLSSTASALGKLQDVVNQNAQALNTLVKQLSSNFGAISSVLNDILSRLDPPEAEVQIDRLITGRLQSLQTYVTQQLIRAAEIRASANLAATKMSECVLGQSKRVDFCGKGYHLMSFPQSAPHGVVFLHVTYVPAQEKNFTTAPAICHDGKAHFPREGVFVSNGTHWFVTQRNFYEPQIITTDNTFVSGNCDVVIGIVNNTVYDPLQPELDSGGGGSDIDPYKEFGSSYQLLNFLPLDFFPDLNALVDTATALYEEELTGREHCSPHHTAIRQALVCWDELTKLIAWMSSNITSEQVRTIIVNHVNDTWGLKVRQSLWFHLSCLTFGQHTVQEFLVSFGVWIRTPAPYRPPNAPILSTLPEHTVIC

SEQ ID NO: 10732 - protein, 1301 aa, Artificial Sequence
  SARS-CoV-2/France/IDF0372/2020__EPI_ISL_406596 spike protein (1-1147)(K986P_V987P) WhcAg construct
MFVFLVLLPLVSSQCVNLTTRTQLPPAYTNSFTRGVYYPDKVFRSSVLHSTQDLFLPFFSNVTWFHAIHVSGTNGTKRFDNPVLPFNDGVYFASTEKSNIIRGWIFGTTLDSKTQSLLIVNNATNVVIKVCEFQFCNDPFLGVYYHKNNKSWMESEFRVYSSANNCTFEYVSQPFLMDLEGKQGNFKNLREFVFKNIDGYFKIYSKHTPINLVRDLPQGFSALEPLVDLPIGINITRFQTLLALHRSYLTPGDSSSGWTAGAAAYYVGYLQPRTFLLKYNENGTITDAVDCALDPLSETKCTLKSFTVEKGIYQTSNFRVQPTESIVRFPNITNLCPFGEVFNATRFASVYAWNRKRISNCVADYSFLYNSASFSTFKCYGVSPTKLNDLCFTNVYADSFVIRGDEVRQIAPGQTGKIADYNYKLPDDFTGCVIAWNSNNLDSKVGGNYNYLYRLFRKSNLKPFERDISTEIYQAGSTPCNGVEGFNCYFPLQSYGFQPTNGVGYQPYRVVVLSFELLHAPATVCGPKKSTNLVKNKCVNFNFNGLTGTGVLTESNKKFLPFQQFGRDIADTTDAVRDPQTLEILDITPCSFGGVSVITPGTNTSNQVAVLYQDVNCTEVPVAIHADQLTPTWRVYSTGSNVFQTRAGCLIGAEHVNNSYECDIPIGAGICASYQTQTNSPRRARSVASQSIIAYTMSLGAENSVAYSNNSIAIPTNFTISVTTEILPVSMTKTSVDCTMYICGDSTECSNLLLQYGSFCTQLNRALTGIAVEQDKNTQEVFAQVKQIYKTPPIKDFGGFNFSQILPDPSKPSKRSFIEDLLFNKVTLADAGFIKQYGDCLGDIAARDLICAQKFNGLTVLPPLLTDEMIAQYTSALLAGTITSGWTFGAGAALQIPFAMQMAYRFNGIGVTQNVLYENQKLIANQFNSAIGKIQDSLSSTASALGKLQDVVNQNAQALNTLVKQLSSNFGAISSVLNDILSRLDPPEAEVQIDRLITGRLQSLQTYVTQQLIRAAEIRASANLAATKMSECVLGQSKRVDFCGKGYHLMSFPQSAPHGVVFLHVTYVPAQEKNFTTAPAICHDGKAHFPREGVFVSNGTHWFVTQRNFYEPQIITTDNTFVSGNCDVVIGIVNNTVYDPLQPELDSGGGGSDIDPYKEFGSSYQLLNFLPLDFFPDLNALVDTATALYEEELTGREHCSPHHTAIRQALVCWDELTKLIAWMSSNITSEQVRTIIVNHVNDTWGLKVRQSLWFHLSCLTFGQHTVQEFLVSFGVWIRTPAPYRPPNAPILSTLPEHTVIC

SEQ ID NO: 10733 - protein, 1301 aa, Artificial Sequence
  SARS-CoV-2/Australia/VIC01/2020__EPI_ISL_406844 spike protein (1-1147)(K986P_V987P) WhcAg construct
MFVFLVLLPLVSSQCVNLTTRTQLPPAYTNSFTRGVYYPDKVFRSSVLHSTQDLFLPFFSNVTWFHAIHVSGTNGTKRFDNPVLPFNDGVYFASTEKSNIIRGWIFGTTLDSKTQSLLIVNNATNVVIKVCEFQFCNDPFLGVYYHKNNKSWMESEFRVYSSANNCTFEYVSQPFLMDLEGKQGNFKNLREFVFKNIDGYFKIYSKHTPINLVRDLPQGFSALEPLVDLPIGINITRFQTLLALHRRYLTPGDSSSGWTAGAAAYYVGYLQPRTFLLKYNENGTITDAVDCALDPLSETKCTLKSFTVEKGIYQTSNFRVQPTESIVRFPNITNLCPFGEVFNATRFASVYAWNRKRISNCVADYSVLYNSASFSTFKCYGVSPTKLNDLCFTNVYADSFVIRGDEVRQIAPGQTGKIADYNYKLPDDFTGCVIAWNSNNLDSKVGGNYNYLYRLFRKSNLKPFERDISTEIYQAGSTPCNGVEGFNCYFPLQSYGFQPTNGVGYQPYRVVVLSFELLHAPATVCGPKKSTNLVKNKCVNFNFNGLTGTGVLTESNKKFLPFQQFGRDIADTTDAVRDPQTLEILDITPCSFGGVSVITPGTNTSNQVAVLYQDVNCTEVPVAIHADQLTPTWRVYSTGSNVFQTRAGCLIGAEHVNNSYECDIPIGAGICASYQTQTNSPRRARSVASQSIIAYTMSLGAENSVAYSNNSIAIPTNFTISVTTEILPVSMTKTSVDCTMYICGDSTECSNLLLQYGSFCTQLNRALTGIAVEQDKNTQEVFAQVKQIYKTPPIKDFGGFNFSQILPDPSKPSKRSFIEDLLFNKVTLADAGFIKQYGDCLGDIAARDLICAQKFNGLTVLPPLLTDEMIAQYTSALLAGTITSGWTFGAGAALQIPFAMQMAYRFNGIGVTQNVLYENQKLIANQFNSAIGKIQDSLSSTASALGKLQDVVNQNAQALNTLVKQLSSNFGAISSVLNDILSRLDPPEAEVQIDRLITGRLQSLQTYVTQQLIRAAEIRASANLAATKMSECVLGQSKRVDFCGKGYHLMSFPQSAPHGVVFLHVTYVPAQEKNFTTAPAICHDGKAHFPREGVFVSNGTHWFVTQRNFYEPQIITTDNTFVSGNCDVVIGIVNNTVYDPLQPELDSGGGGSDIDPYKEFGSSYQLLNFLPLDFFPDLNALVDTATALYEEELTGREHCSPHHTAIRQALVCWDELTKLIAWMSSNITSEQVRTIIVNHVNDTWGLKVRQSLWFHLSCLTFGQHTVQEFLVSFGVWIRTPAPYRPPNAPILSTLPEHTVIC

SEQ ID NO: 10734 - protein, 1301 aa, Artificial Sequence
  SARS-CoV-2/Germany/BavPat1/2020__EPI_ISL_406862 spike protein (1-1147)(K986P_V987P) WhcAg construct
MFVFLVLLPLVSSQCVNLTTRTQLPPAYTNSFTRGVYYPDKVFRSSVLHSTQDLFLPFFSNVTWFHAIHVSGTNGTKRFDNPVLPFNDGVYFASTEKSNIIRGWIFGTTLDSKTQSLLIVNNATNVVIKVCEFQFCNDPFLGVYYHKNNKSWMESEFRVYSSANNCTFEYVSQPFLMDLEGKQGNFKNLREFVFKNIDGYFKIYSKHTPINLVRDLPQGFSALEPLVDLPIGINITRFQTLLALHRSYLTPGDSSSGWTAGAAAYYVGYLQPRTFLLKYNENGTITDAVDCALDPLSETKCTLKSFTVEKGIYQTSNFRVQPTESIVRFPNITNLCPFGEVFNATRFASVYAWNRKRISNCVADYSVLYNSASFSTFKCYGVSPTKLNDLCFTNVYADSFVIRGDEVRQIAPGQTGKIADYNYKLPDDFTGCVIAWNSNNLDSKVGGNYNYLYRLFRKSNLKPFERDISTEIYQAGSTPCNGVEGFNCYFPLQSYGFQPTNGVGYQPYRVVVLSFELLHAPATVCGPKKSTNLVKNKCVNFNFNGLTGTGVLTESNKKFLPFQQFGRDIADTTDAVRDPQTLEILDITPCSFGGVSVITPGTNTSNQVAVLYQGVNCTEVPVAIHADQLTPTWRVYSTGSNVFQTRAGCLIGAEHVNNSYECDIPIGAGICASYQTQTNSPRRARSVASQSIIAYTMSLGAENSVAYSNNSIAIPTNFTISVTTEILPVSMTKTSVDCTMYICGDSTECSNLLLQYGSFCTQLNRALTGIAVEQDKNTQEVFAQVKQIYKTPPIKDFGGFNFSQILPDPSKPSKRSFIEDLLFNKVTLADAGFIKQYGDCLGDIAARDLICAQKFNGLTVLPPLLTDEMIAQYTSALLAGTITSGWTFGAGAALQIPFAMQMAYRFNGIGVTQNVLYENQKLIANQFNSAIGKIQDSLSSTASALGKLQDVVNQNAQALNTLVKQLSSNFGAISSVLNDILSRLDPPEAEVQIDRLITGRLQSLQTYVTQQLIRAAEIRASANLAATKMSECVLGQSKRVDFCGKGYHLMSFPQSAPHGVVFLHVTYVPAQEKNFTTAPAICHDGKAHFPREGVFVSNGTHWFVTQRNFYEPQIITTDNTFVSGNCDVVIGIVNNTVYDPLQPELDSGGGGSDIDPYKEFGSSYQLLNFLPLDFFPDLNALVDTATALYEEELTGREHCSPHHTAIRQALVCWDELTKLIAWMSSNITSEQVRTIIVNHVNDTWGLKVRQSLWFHLSCLTFGQHTVQEFLVSFGVWIRTPAPYRPPNAPILSTLPEHTVIC

SEQ ID NO: 10735 - protein, 1301 aa, Artificial Sequence
  SARS-CoV-2/Wuhan/HBCDC-HB-02/2020__EPI_ISL_412978 spike protein (1-1147)(K986P_V987P) WhcAg construct
MFVFLVLLPLVSSQCVNLTTRTQLPPAYTNSFTRGVYYPDKVFRSSVLHSTQDLFLPFFSNVTWFHAIHVSGTNGTKRFDNPVLPFNDGVYFASTEKSNIIRGWIFGTTLDSKTQSLLIVNNATNVVIKVCEFQFCNDPFLGVYYHKNNKSWMESEFRVYSSANNCTFEYVSQPFLMDLEGKQGNFKNLREFVFKNIDGYFKIYSKHTPINLVRDLPQGFSALEPLVDLPIGINITRFQTLLALHRSYLTPGDSSSGWTAGAAAYYVGYLQPRTFLLKYNENGTITDAVDCALDPLSETKCTLKSFTVEKGIYQTSNFRVQPTESIVRFPNITNLCPFGEVFNATRFASVYAWNRKRISNCVADYSVLYNSASFSTFKCYGVSPTKLNDLCFTNVYADSFVIRGDEVRQIAPGQTGKIADYNYKLPDDFTGCVIAWNSNNLDSKVGGNYNYLYRLFRKSNLKPFERDISTEIYQAGSTPCNGVEGFNCYFPLQSYGFQPTNGVGYQPYRVVVLSFELLHAPATVCGPKKSTNLVKNKCVNFNFNGLTGTGVLTESNKKFLPFQQFGRDIADTTDAVRDPQTLEILDITPCSFGGVSVITPGTNTSNQVAVLYQDVNCTEVPVAIHADQLTPTWRVYSTGSNVFQTRAGCLIGAEHVNNSYECDIPIGAGICASYQTQTNSPRRARSVASQSIIAYTMSLGAENSVAYSNNSIAIPTNFTISVTTEILPVSMTKTSVDCTMYICGDSTECSNFLLQYGSFCTQLNRALTGIAVEQDKNTQEVFAQVKQIYKTPPIKDFGGFNFSQILPDPSKPSKRSFIEDLLFNKVTLADAGFIKQYGDCLGDIAARDLICAQKFNGLTVLPPLLTDEMIAQYTSALLAGTITSGWTFGAGAALQIPFAMQMAYRFNGIGVTQNVLYENQKLIANQFNSAIGKIQDSLSSTASALGKLQDVVNQNAQALNTLVKQLSSNFGAISSVLNDILSRLDPPEAEVQIDRLITGRLQSLQTYVTQQLIRAAEIRASANLAATKMSECVLGQSKRVDFCGKGYHLMSFPQSAPHGVVFLHVTYVPAQEKNFTTAPAICHDGKAHFPREGVFVSNGTHWFVTQRNFYEPQIITTDNTFVSGNCDVVIGIVNNTVYDPLQPELDSGGGGSDIDPYKEFGSSYQLLNFLPLDFFPDLNALVDTATALYEEELTGREHCSPHHTAIRQALVCWDELTKLIAWMSSNITSEQVRTIIVNHVNDTWGLKVRQSLWFHLSCLTFGQHTVQEFLVSFGVWIRTPAPYRPPNAPILSTLPEHTVIC

SEQ ID NO: 10736 - protein, 1301 aa, Artificial Sequence
  SARS-CoV-2/Australia/QLD02/2020__EPI_ISL_407896 spike protein (1-1147)(K986P_V987P) WhcAg construct
MFVFLVLLPLVSSQCVNLTTRTQLPPAYTNSFTRGVYYPDKVFRSSVLHSTQDLFLPFFSNVTWFHAIHVSGTNGTKRFDNPVLPFNDGVYFASTEKSNIIRGWIFGTTLDSKTQSLLIVNNATNVVIKVCEFQFCNDPFLGVYYHKNNKSWMESEFRVYSSANNCTFEYVSQPFLMDLEGKQGNFKNLREFVFKNIDGYFKIYSKHTPINLVRDLPQGFSALEPLVDLPIGINITRFQTLLALHRSYLTPGDSSSGWTAGAAAYYVGYLQPRTFLLKYNENGTITDAVDCALDPLSETKCTLKSFTVEKGIYQTSNFRVQPTESIVRFPNITNLCPFGEVFNATRFASVYAWNRKRISNCVADYSVLYNSASFSTFKCYGVSPTKLNDLCFTNVYADSFVIRGDEVRQIAPGQTGKIADYNYKLPDDFTGCVIAWNSNNLDSKVGGNYNYLYRLFRKSNLKPFERDISTEIYQAGSTPCNGVEGFNCYFPLQSYGFQPTNGVGYQPYRVVVLSFELLHAPATVCGPKKSTNLVKNKCVNFNFNGLTGTGVLTESNKKFLPFQQFGRDIADTTDAVRDPQTLEILDITPCSFGGVSVITPGTNTSNQVAVLYQDVNCTEVPVAIHADQLTPTWRVYSTGSNVFQTRAGCLIGAEHVNNSYECDIPIGAGICASYQTQTNSPRRARSVASQSIIAYTMSLGAENSVAYSNNSIAIPTNFTISVTTEILPVSMTKTSVDCTMYICGDSTECSNLLLQYGSFCTQLNRALTGIAVEQDKNTQEVFAQVKQIYKTPPIKDFGGFNFSQILPDPSKPSKRSFIEDLLFNKVTLADAGFIKQYGDCLGDIAARDLICAQKFNGLTVLPPLLTDEMIAQYTSALLAGTITSGWTFGAGAALQIPFAMQMAYRFNGIGVTQNVLYENQKLIANQFNSAIGKIQDSLSSTASALGKLQDVVNQNAQALNTLVKQLSSNFGAISSVLNDILSRLDPPEAEVQIDRLITGRLQSLQTYVTQQLIRAAEIRASANLAATKMSECVLGQSKRVDFCGKGYHLMSFPQSAPHGVVFLHVTYVPAQEKNFTTAPAICHDGKAHFPREGVFVSNGTHWFVTQRNFYEPQIITTDNTFVSGNCDVVIGIVNNTVYDPLQLELDSGGGGSDIDPYKEFGSSYQLLNFLPLDFFPDLNALVDTATALYEEELTGREHCSPHHTAIRQALVCWDELTKLIAWMSSNITSEQVRTIIVNHVNDTWGLKVRQSLWFHLSCLTFGQHTVQEFLVSFGVWIRTPAPYRPPNAPILSTLPEHTVIC

SEQ ID NO: 10737 - protein, 1301 aa, Artificial Sequence
  SARS-CoV-2/India/1-31/2020__EPI_ISL_413523 spike protein (1-1147)(K986P_V987P) WhcAg construct
MFVFLVLLPLVSSQCVNLTTRTQLPPAYTNSFTRGVYYPDKVFRSSVLHSTQDLFLPFFSNVTWFHAIHVSGTNGTKRFDNPVLPFNDGVYFASTEKSNIIRGWIFGTTLDSKTQSLLIVNNATNVVIKVCEFQFCNDPFLGVYYHKNNKSWMESEFRVYSSANNCTFEYVSQPFLMDLEGKQGNFKNLREFVFKNIDGYFKIYSKHTPINLVRDLPQGFSALEPLVDLPIGINITRFQTLLALHRSYLTPGDSSSGWTAGAAAYYVGYLQPRTFLLKYNENGTITDAVDCALDPLSETKCTLKSFTVEKGIYQTSNFRVQPTESIVRFPNITNLCPFGEVFNATRFASVYAWNRKRISNCVADYSVLYNSASFSTFKCYGVSPTKLNDLCFTNVYADSFVIRGDEVRQIAPGQTGKIADYNYKLPDDFTGCVIAWNSNNLDSKVGGNYNYLYRLFRKSNLKPFERDISTEIYQAGSTPCNGVEGFNCYFPLQSYGFQPTNGVGYQPYRVVVLSFELLHAPATVCGPKKSTNLVKNKCVNFNFNGLTGTGVLTESNKKFLPFQQFGRDIADTTDAVRDPQTLEILDITPCSFGGVSVITPGTNTSNQVAVLYQDVNCTEVPVAIHADQLTPTWRVYSTGSNVFQTRAGCLIGAEHVNNSYECDIPIGAGICASYQTQTNSPRRARSVASQSIIAYTMSLGAENSVAYSNNSIAIPTNFTISVTTEILPVSMTKTSVDCTMYICGDSTECSNLLLQYGSFCTQLNRALTGIAVEQDKNTQEVFAQVKQIYKTPPIKDFGGFNFSQILPDPSKPSKRSFIEDLLFNKVTLADAGFIKQYGDCLGDIAARDLICAQKFNGLTVLPPLLTDEMIAQYTSALLAGTITSGWTFGAGAALQIPFAMQMAYRFNGIGVTQNVLYENQKLIANQFNSVIGKIQDSLSSTASALGKLQDVVNQNAQALNTLVKQLSSNFGAISSVLNDILSRLDPPEAEVQIDRLITGRLQSLQTYVTQQLIRAAEIRASANLAATKMSECVLGQSKRVDFCGKGYHLMSFPQSAPHGVVFLHVTYVPAQEKNFTTAPAICHDGKAHFPREGVFVSNGTHWFVTQRNFYEPQIITTDNTFVSGNCDVVIGIVNNTVYDPLQPELDSGGGGSDIDPYKEFGSSYQLLNFLPLDFFPDLNALVDTATALYEEELTGREHCSPHHTAIRQALVCWDELTKLIAWMSSNITSEQVRTIIVNHVNDTWGLKVRQSLWFHLSCLTFGQHTVQEFLVSFGVWIRTPAPYRPPNAPILSTLPEHTVIC

SEQ ID NO: 10738 - protein, 1301 aa, Artificial Sequence
  SARS-CoV-2/Guangdong/GD2020087-P0008/2020__EPI_ISL_413863 spike protein (1-1147)(K986P_V987P) WhcAg construct
MFVFLVLLPLVSSQCVNLTTRTQLPPAYTNSFTRGVYYPDKVFRSSVLHSTQDLFLPFFSNVTWFHAIHVSGTNGTKRFDNPVLPFNDGVYFASTEKSNIIRGWIFGTTLDSKTQSLLIVNNATNVVIKVCEFQFCNDPFLGVYYHKNNKSWMESEFRVYSSANNCTFEYVSQPFLMDLEGKQGNFKNLREFVFKNIDGYFKIYSKHTPINLVRDLPQGFSALEPLVDLPIGINITRFQTLLALHRSYLTPGDSSSGWTAGAAAYYVGYLQPRTFLLKYNENGTITDAVDCALDPLSETKCTLKSFTVEKGIYQTSNFRVQPTESIVRFPNITNLCPFGEVFNATRFASVYAWNRKRISNCVADYSVLYNSASFSTFKCYGVSPTKLNDLCFTNVYADSFVIRGDEVREIAPGQTGKIADYNYKLPDDFTGCVIAWNSNNLDSKVGGNYNYLYRLFRKSNLKPFERDISTEIYQAGSTPCNGVEGFNCYFPLQSYGFQPTNGVGYQPYRVVVLSFELLHAPATVCGPKKSTNLVKNKCVNFNFNGLTGTGVLTESNKKFLPFQQFGRDIADTTDAVRDPQTLEILDITPCSFGGVSVITPGTNTSNQVAVLYQDVNCTEVPVAIHADQLTPTWRVYSTGSNVFQTRAGCLIGAEHVNNSYECDIPIGAGICASYQTQTNSPRRARSVASQSIIAYTMSLGAENSVAYSNNSIAIPTNFTISVTTEILPVSMTKTSVDCTMYICGDSTECSNLLLQYGSFCTQLNRALTGIAVEQDKNTQEVFAQVKQIYKTPPIKDFGGFNFSQILPDPSKPSKRSFIEDLLFNKVTLADAGFIKQYGDCLGDIAARDLICAQKFNGLTVLPPLLTDEMIAQYTSALLAGTITSGWTFGAGAALQIPFAMQMAYRFNGIGVTQNVLYENQKLIANQFNSAIGKIQDSLSSTASALGKLQDVVNQNAQALNTLVKQLSSNFGAISSVLNDILSRLDPPEAEVQIDRLITGRLQSLQTYVTQQLIRAAEIRASANLAATKMSECVLGQSKRVDFCGKGYHLMSFPQSAPHGVVFLHVTYVPAQEKNFTTAPAICHDGKAHFPREGVFVSNGTHWFVTQRNFYEPQIITTDNTFVSGNCDVVIGIVNNTVYDPLQPELDSGGGGSDIDPYKEFGSSYQLLNFLPLDFFPDLNALVDTATALYEEELTGREHCSPHHTAIRQALVCWDELTKLIAWMSSNITSEQVRTIIVNHVNDTWGLKVRQSLWFHLSCLTFGQHTVQEFLVSFGVWIRTPAPYRPPNAPILSTLPEHTVIC

SEQ ID NO: 10739 - protein, 1301 aa, Artificial Sequence
  SARS-CoV-2/Sweden/01/2020__EPI_ISL_411951 spike protein (1-1147)(K986P_V987P) WhcAg construct
MFVFLVLLPLVSSQCVNLTTRTQLPPAYTNSFTRGVYYPDKVFRSSVLHSTQDLFLPFFSNVTWFHAIHVSGTNGTKRFDNPVLPFNDGVYFASTEKSNIIRGWIFGTTLDSKTQSLLIVNNATNVVIKVCEFQFCNDPFLGVYYHKNNKSWMESEFRVYSSANNCTFEYVSQPFLMDLEGKQGNFKNLREFVFKNIDGYFKIYSKHTPINLVRDLPQGFSALEPLVDLPIGINITRFQTLLALHRSYLTPGDSSSGWTAGAAAYYVGYLQPRTFLLKYNENGTITDAVDCALDPLSETKCTLKSFTVEKGIYQTSNFRVQPTESIVRFPNITNLCPFGEVFNATRFASVYAWNRKRISNCVADYSVLYNSASFSTFKCYGVSPTKLNDLCFTNVYADSFVIRGDEVRQIAPGQTGKIADYNYKLPDDFTGCVIAWNSNNLDSKVGGNYNYLYRLFRKSNLKPFERDISTEIYQAGSTPCNGVEGFNCYFPLQSYGFQPTNGVGYQPYRVVVLSFELLHAPATVCGPKKSTNLVKNKCVNFNFNGLTGTGVLTESNKKFLPFQQFGRDIADTTDAVRDPQTLEILDITPCSFGGVSVITPGTNTSNQVAVLYQDVNCTEVPVAIHADQLTPTWRVYSTGSNVFQTRAGCLIGAEHVNNSYECDIPIGAGICASYQTQTNSPRRARSVASQSIIAYTMSLGAENSVAYSNNSIAIPTNFTISVTTEILPVSMTKTSVDCTMYICGDSTECSNLLLQYGSFCTQLNRALTGIAVEQDKNTQEVFAQVKQIYKTPPIKDCGGFNFSQILPDPSKPSKRSFIEDLLFNKVTLADAGFIKQYGDCLGDIAARDLICAQKFNGLTVLPPLLTDEMIAQYTSALLAGTITSGWTFGAGAALQIPFAMQMAYRFNGIGVTQNVLYENQKLIANQFNSAIGKIQDSLSSTASALGKLQDVVNQNAQALNTLVKQLSSNFGAISSVLNDILSRLDPPEAEVQIDRLITGRLQSLQTYVTQQLIRAAEIRASANLAATKMSECVLGQSKRVDFCGKGYHLMSFPQSAPHGVVFLHVTYVPAQEKNFTTAPAICHDGKAHFPREGVFVSNGTHWFVTQRNFYEPQIITTDNTFVSGNCDVVIGIVNNTVYDPLQPELDSGGGGSDIDPYKEFGSSYQLLNFLPLDFFPDLNALVDTATALYEEELTGREHCSPHHTAIRQALVCWDELTKLIAWMSSNITSEQVRTIIVNHVNDTWGLKVRQSLWFHLSCLTFGQHTVQEFLVSFGVWIRTPAPYRPPNAPILSTLPEHTVIC

SEQ ID NO: 10740 - protein, 1301 aa, Artificial Sequence
  SARS-CoV-2/Tianmen/HBCDC-HB-07/2020__EPI_ISL_412983 spike protein (1-1147)(K986P_V987P) WhcAg construct
MFVFLVLLPLVSSQCVNLTTRTQLPPAYTNSFTRGVYYPDKVFRSSVLHSTQDLFLPFFSNVTWFHAIHVSGTNGTKRFDNPVLPFNDGVYFASTEKSNIIRGWIFGTTLDSKTQSLLIVNNATNVVIKVCEFQFCNDPFLGVYYHKNNKSWMESEFRVYSSANNCTFEYVSQPFLMDLEGKQGNFKNLREFVFKNIDGYFKIYSKHTPINLVRDLPQGFSALEPLVDLPIGINITRFQTLLALHRSYLTPGDSSSGWTAGAAAYYVGYLQPRTFLLKYNENGTITDAVDCALDPLSETKCTLKSFTVEKGIYQTSNFRVQPTESIVRFPNITNLCPFGEVFNATRFASVYAWNRKRISNCVADYSVLYNSASFSTFKCYGVSPTKLNDLCFTNVYADSFVIRGDEVRQIAPGQTGKIADYNYKLPDDFTGCVIAWNSNNLDSKVGGNYNYLYRLFRKSNLKPFERDISTEIYQAGSTPCNGVEGFNCYFPLQSYGFQPTNGVGYQPYRVVVLSFELLHAPATVCGPKKSTNLVKNKCVNFNFNGLTGTGVLTESNKKFLPFQQFGRDIADTTDAVRDPQTLEILDITPCSFGGVSVITPGTNTSNQVAVLYQDLNCTEVPVAIHADQLTPTWRVYSTGSNVFQTRAGCLIGAEHVNNSYECDIPIGAGICASYQTQTNSPRRARSVASQSIIAYTMSLGAENSVAYSNNSIAIPTNFTISVTTEILPVSMTKTSVDCTMYICGDSTECSNLLLQYGSFCTQLNRALTGIAVEQDKNTQEVFAQVKQIYKTPPIKDFGGFNFSQILPDPSKPSKRSFIEDLLFNKVTLADAGFIKQYGDCLGDIAARDLICAQKFNGLTVLPPLLTDEMIAQYTSALLAGTITSGWTFGAGAALQIPFAMQMAYRFNGIGVTQNVLYENQKLIANQFNSAIGKIQDSLSSTASALGKLQDVVNQNAQALNTLVKQLSSNFGAISSVLNDILSRLDPPEAEVQIDRLITGRLQSLQTYVTQQLIRAAEIRASANLAATKMSECVLGQSKRVDFCGKGYHLMSFPQSAPHGVVFLHVTYVPAQEKNFTTAPAICHDGKAHFPREGVFVSNGTHWFVTQRNFYEPQIITTDNTFVSGNCDVVIGIVNNTVYDPLQPELDSGGGGSDIDPYKEFGSSYQLLNFLPLDFFPDLNALVDTATALYEEELTGREHCSPHHTAIRQALVCWDELTKLIAWMSSNITSEQVRTIIVNHVNDTWGLKVRQSLWFHLSCLTFGQHTVQEFLVSFGVWIRTPAPYRPPNAPILSTLPEHTVIC

SEQ ID NO: 10741 - protein, 1301 aa, Artificial Sequence
  SARS-CoV-2/Hong Kong/case42_VM20002493/2020__EPI_ISL_414527 spike protein (1-1147)(K986P_V987P) WhcAg construct
MFVFLVLLPLVSSQCVNLTTRTQLPPAYTNSFTRGVYYPDKVFRSSVLHSTQDLFLPFFSNVTWFHAIHVSGTNGTKRFDNPVLPFNDGVYFASTEKSNIIRGWIFGTTLDSKTQSLLIVNNATNVVIKVCEFQFCNDPFLGVYYHKNNKSWMESEFRVYSSANNCTFEYVSQPFLMDLEGKQGNFKNLREFVFKNIDGYFKIYSKHTPINLVRDLPQGFSALEPLVDLPIGINITRFQTLLALHRSYLTPGDSSSGWTAGAAAYYVGYLQPRTFLLKYNENGTITDAVDCALDPLSETKCTLKSFTVEKGIYQTSNFRVQPTESIVRFPNITNLCPFGEVFNATRFASVYAWNRKRISNCVADYSVLYNSASFSTFKCYGVSPTKLNDLCFTNVYADSFVIRGDEVRQIAPGQTGKIADYNYKLPDDFTGCVIAWNSNNLDSKVGGNYNYLYRLFRKSNLKPFERDISTEIYQAGSTPCNGVEGFNCYFPLQSYGFQPTNGVGYQPYRVVVLSFELLHAPATVCGPKKSTNLVKNKCVNFNFNGLTGTGVLTESNKKFLPFQQFGRDIADTTDAVRDPQTLEILDITPCSFGGVSVITPGTNTSNQVAVLYQDVNCTEVPVAIHADQLTPTWRVYSTGSNVFQTRAGCLIGAEHVNNSYECDIPIGAGICASYQTQTNSPRRARSVASQSIIAYTMSLGAENSVAYSNNSIAIPTNFAISVTTEILPVSMTKTSVDCTMYICGDSTECSNLLLQYGSFCTQLNRALTGIAVEQDKNTQEVFAQVKQIYKTPPIKDFGGFNFSQILPDPSKPSKRSFIEDLLFNKVTLADAGFIKQYGDCLGDIAARDLICAQKFNGLTVLPPLLTDEMIAQYTSALLAGTITSGWTFGAGAALQIPFAMQMAYRFNGIGVTQNVLYENQKLIANQFNSAIGKIQDSLSSTASALGKLQDVVNQNAQALNTLVKQLSSNFGAISSVLNDILSRLDPPEAEVQIDRLITGRLQSLQTYVTQQLIRAAEIRASANLAATKMSECVLGQSKRVDFCGKGYHLMSFPQSAPHGVVFLHVTYVPAQEKNFTTAPAICHDGKAHFPREGVFVSNGTHWFVTQRNFYEPQIITTDNTFVSGNCDVVIGIVNNTVYDPLQPELDSGGGGSDIDPYKEFGSSYQLLNFLPLDFFPDLNALVDTATALYEEELTGREHCSPHHTAIRQALVCWDELTKLIAWMSSNITSEQVRTIIVNHVNDTWGLKVRQSLWFHLSCLTFGQHTVQEFLVSFGVWIRTPAPYRPPNAPILSTLPEHTVIC

SEQ ID NO: 10742 - protein, 1301 aa, Artificial Sequence
  SARS-CoV-2/USA/CruiseA-23/2020__EPI_ISL_414482 spike protein (1-1147)(K986P_V987P) WhcAg construct
MFVFLVLLPLVSSQCVNLTTRTQLPPAYTNSFTRGVYYPDKVFRSSVLHSTQDLFLPFFSNVTWFHAIHVSGTNGTKRFDNPVLPFNDGVYFASTEKSNIIRGWIFGTTLDSKTQSLLIVNNATNVVIKVCEFQFCNDPFLGVYYHKNNKSWMESEFRVYSSANNCTFEYVSQPFLMDLEVKQGNFKNLREFVFKNIDGYFKIYSKHTPINLVRDLPQGFSALEPLVDLPIGINITRFQTLLALHRSYLTPGDSSSGWTAGAAAYYVGYLQPRTFLLKYNENGTITDAVDCALDPLSETKCTLKSFTVEKGIYQTSNFRVQPTESIVRFPNITNLCPFGEVFNATRFASVYAWNRKRISNCVADYSVLYNSASFSTFKCYGVSPTKLNDLCFTNVYADSFVIRGDEVRQIAPGQTGKIADYNYKLPDDFTGCVIAWNSNNLDSKVGGNYNYLYRLFRKSNLKPFERDISTEIYQAGSTPCNGVEGFNCYFPLQSYGFQPTNGVGYQPYRVVVLSFELLHAPATVCGPKKSTNLVKNKCVNFNFNGLTGTGVLTESNKKFLPFQQFGRDIADTTDAVRDPQTLEILDITPCSFGGVSVITPGTNTSNQVAVLYQDVNCTEVPVAIHADQLTPTWRVYSTGSNVFQTRAGCLIGAEHVNNSYECDIPIGAGICASYQTQTNSPRRARSVASQSIIAYTMSLGAENSVAYSNNSIAIPTNFTISVTTEILPVSMTKTSVDCTMYICGDSTECSNLLLQYGSFCTQLNRALTGIAVEQDKNTQEVFAQVKQIYKTPPIKDFGGFNFSQILPDPSKPSKRSFIEDLLFNKVTLADAGFIKQYGDCLGDIAARDLICAQKFNGLTVLPPLLTDEMIAQYTSALLAGTITSGWTFGAGAALQIPFAMQMAYRFNGIGVTQNVLYENQKLIANQFNSAIGKIQDSLSSTASALGKLQDVVNQNAQALNTLVKQLSSNFGAISSVLNDILSRLDPPEAEVQIDRLITGRLQSLQTYVTQQLIRAAEIRASANLAATKMSECVLGQSKRVDFCGKGYHLMSFPQSAPHGVVFLHVTYVPAQEKNFTTAPAICHDGKAHFPREGVFVSNGTHWFVTQRNFYEPQIITTDNTFVSGNCDVVIGIVNNTVYDPLQPELDSGGGGSDIDPYKEFGSSYQLLNFLPLDFFPDLNALVDTATALYEEELTGREHCSPHHTAIRQALVCWDELTKLIAWMSSNITSEQVRTIIVNHVNDTWGLKVRQSLWFHLSCLTFGQHTVQEFLVSFGVWIRTPAPYRPPNAPILSTLPEHTVIC

SEQ ID NO: 10743 - protein, 1301 aa, Artificial Sequence
  SARS-CoV-2/Hong Kong/case85_VM20002868/2020__EPI_ISL_414519 spike protein (1-1147)(K986P_V987P) WhcAg construct
MFVFLVLVPLVSSQCVNLTTRTQLPPAYTNSFTRGVYYPDKVFRSSVLHSTQDLFLPFFSNVTWFHAIHVSGTNGTKRFDNPVLPFNDGVYFASTEKSNIIRGWIFGTTLDSKTQSLLIVNNATNVVIKVCEFQFCNDPFLGVYYHKNNKSWMESEFRVYSSANNCTFEYVSQPFLMDLEGKQGNFKNLREFVFKNIDGYFKIYSKHTPINLVRDLPQGFSALEPLVDLPIGINITRFQTLLALHRSYLTPGDSSSGWTAGAAAYYVGYLQPRTFLLKYNENGTITDAVDCALDPLSETKCTLKSFTVEKGIYQTSNFRVQPTESIVRFPNITNLCPFGEVFNATRFASVYAWNRKRISNCVADYSVLYNSASFSTFKCYGVSPTKLNDLCFTNVYADSFVIRGDEVRQIAPGQTGKIADYNYKLPDDFTGCVIAWNSNNLDSKVGGNYNYLYRLFRKSNLKPFERDISTEIYQAGSTPCNGVEGFNCYFPLQSYGFQPTNGVGYQPYRVVVLSFELLHAPATVCGPKKSTNLVKNKCVNFNFNGLTGTGVLTESNKKFLPFQQFGRDIADTTDAVRDPQTLEILDITPCSFGGVSVITPGTNTSNQVAVLYQDVNCTEVPVAIHADQLTPTWRVYSTGSNVFQTRAGCLIGAEHVNNSYECDIPIGAGICASYQTQTNSPRRARSVASQSIIAYTMSLGAENSVAYSNNSIAIPTNFTISVTTEILPVSMTKTSVDCTMYICGDSTECSNLLLQYGSFCTQLNRALTGIAVEQDKNTQEVFAQVKQIYKTPPIKDFGGFNFSQILPDPSKPSKRSFIEDLLFNKVTLADAGFIKQYGDCLGDIAARDLICAQKFNGLTVLPPLLTDEMIAQYTSALLAGTITSGWTFGAGAALQIPFAMQMAYRFNGIGVTQNVLYENQKLIANQFNSAIGKIQDSLSSTASALGKLQDVVNQNAQALNTLVKQLSSNFGAISSVLNDILSRLDPPEAEVQIDRLITGRLQSLQTYVTQQLIRAAEIRASANLAATKMSECVLGQSKRVDFCGKGYHLMSFPQSAPHGVVFLHVTYVPAQEKNFTTAPAICHDGKAHFPREGVFVSNGTHWFVTQRNFYEPQIITTDNTFVSGNCDVVIGIVNNTVYDPLQPELDSGGGGSDIDPYKEFGSSYQLLNFLPLDFFPDLNALVDTATALYEEELTGREHCSPHHTAIRQALVCWDELTKLIAWMSSNITSEQVRTIIVNHVNDTWGLKVRQSLWFHLSCLTFGQHTVQEFLVSFGVWIRTPAPYRPPNAPILSTLPEHTVIC

SEQ ID NO: 10744 - protein, 1301 aa, Artificial Sequence; identical to SEQ ID NO: 10734
  SARS-CoV-2/England/200990660/2020__EPI_ISL_414523 spike protein (1-1147)(K986P_V987P) WhcAg construct

SEQ ID NO: 10745 - protein, 1301 aa, Artificial Sequence
  SARS-CoV-2/Australia/NSW09/2020__EPI_ISL_413595 spike protein (1-1147)(K986P_V987P) WhcAg construct
MFVFLVLLPLVSSQCVNLTTRTQLPPAYTNSFTRGVYYPDKVFRSSVLHSTQDLFLPFFSNVTWFHAIHVSGTNGTKRFDNPVLPFNDGVYFASTEKSNIIRGWIFGTTLDSKTQSLLIVNNATNVVIKVCEFQFCNDPFLGVYYHKNNKSWMESEFRVYSSANNCTFEYVSQPFLMDLEGKQGNFKNLREFVFKNIDGYFKIYSKHTPINLVRDLPQGFSALEPLVDLPIGINITRFQTLLALHRSYLTPGDSSSGWTAGAAAYYVGYLQPRTFLLKYNENGTITDAVDCALDPLSETKCTLKSFTVEKGIYQTSNFRVQPTESIVRFPNITNLCPFGEVFNATRFASVYAWNRKRISNCVADYSVLYNSASFSTFKCYGVSPTKLNDLCFTNVYADSFVIRGDEVRQIAPGQTGKIADYNYKLPDDFTGCVIAWNSNNLDSKVGGNYNYLYRLFRKSNLKPFERDISTEIYQAGSTPCNGVEGFNCYFPLQSYGFQPTNGVGYQPYRVVVLSFELLHAPATVCGPKKSTNLVKNKCVNFNFNGLTGTGVLTESNKKFLPFQQFGRDIADTTDAVRDPQTLEILDITPCSFGGVSVITPGTNTSNQVAVLYQDVNCTEVPVAIHADQLTPTWRVYSTGSNVFQTRAGCLIGAEHVNNSYECDIPIGAGICASYQTQTNSPRRARSVASQSIIAYTMSLGAENSVAYSNNSIAIPTNFTISVTTEILPVSMTKTSVDCTMYICGDSTECSNLLLQYGSFCTQLNRALTGIAVEQDKNTQEVFAQVKQIYKTPPIKDFGGFNFSQILPDPSKPSKRSFIEDLLFNKVTLADAGFIKQYGDCLGDIAARDLICAQKFNGLTVLPPLLTDEMIAQYTSALLAGTITSGWTFGAGAALQIPFAMQMAYRFNGIGVTQNVLYENQKLIANQFNSAIGKIQDSLSFTASALGKLQDVVNQNAQALNTLVKQLSSNFGAISSVLNDILSRLDPPEAEVQIDRLITGRLQSLQTYVTQQLIRAAEIRASANLAATKMSECVLGQSKRVDFCGKGYHLMSFPQSAPHGVVFLHVTYVPAQEKNFTTAPAICHDGKAHFPREGVFVSNGTHWFVTQRNFYEPQIITTDNTFVSGNCDVVIGIVNNTVYDPLQPELDSGGGGSDIDPYKEFGSSYQLLNFLPLDFFPDLNALVDTATALYEEELTGREHCSPHHTAIRQALVCWDELTKLIAWMSSNITSEQVRTIIVNHVNDTWGLKVRQSLWFHLSCLTFGQHTVQEFLVSFGVWIRTPAPYRPPNAPILSTLPEHTVIC

SEQ ID NO: 10746 - protein, 1301 aa, Artificial Sequence; identical to SEQ ID NO: 10726
  SARS-CoV-2/Australia/NSW10/2020__EPI_ISL_413596 spike protein (1-1147)(K986P_V987P) WhcAg construct

SEQ ID NO: 10747 - protein, 1301 aa, Artificial Sequence
  SARS-CoV-2/Switzerland/1000477797/2020__EPI_ISL_413023 spike protein (1-1147)(K986P_V987P) WhcAg construct
MFVFLVLLPLVSSQCVNLTTRTQLPPAYTNSFTRGVYYPDKVFRSSVLHSTQDLFLPFFSNVTWFHAIHVSGTNGTKRFDNPVLPFNDGVYFASTEKSNIIRGWIFGTTLDSKTQSLLIVNNATNVVIKVCEFQFCNDPFLGVYYHKNNKSWMESEFRVYSSANNCTFEYVSQPFLMDLEGKQGNFKNLREFVFKNIDGYFNIYSKHTPINLVRDLPQGFSALEPLVDLPIGINITRFQTLLALHRSYLTPGDSSSGWTAGAAAYYVGYLQPRTFLLKYNENGTITDAVDCALDPLSETKCTLKSFTVEKGIYQTSNFRVQPTESIVRFPNITNLCPFGEVFNATRFASVYAWNRKRISNCVADYSVLYNSASFSTFKCYGVSPTKLNDLCFTNVYADSFVIRGDEVRQIAPGQTGKIADYNYKLPDDFTGCVIAWNSNNLDSKVGGNYNYLYRLFRKSNLKPFERDISTEIYQAGSTPCNGVEGFNCYFPLQSYGFQPTNGVGYQPYRVVVLSFELLHAPATVCGPKKSTNLVKNKCVNFNFNGLTGTGVLTESNKKFLPFQQFGRDIADTTDAVRDPQTLEILDITPCSFGGVSVITPGTNTSNQVAVLYQGVNCTEVPVAIHADQLTPTWRVYSTGSNVFQTRAGCLIGAEHVNNSYECDIPIGAGICASYQTQTNSPRRARSVASQSIIAYTMSLGAENSVAYSNNSIAIPTNFTISVTTEILPVSMTKTSVDCTMYICGDSTECSNLLLQYGSFCTQLNRALTGIAVEQDKNTQEVFAQVKQIYKTPPIKDFGGFNFSQILPDPSKPSKRSFIEDLLFNKVTLADAGFIKQYGDCLGDIAARDLICAQKFNGLTVLPPLLTDEMIAQYTSALLAGTITSGWTFGAGAALQIPFAMQMAYRFNGIGVTQNVLYENQKLIANQFNSAIGKIQDSLSSTASALGKLQDVVNQNAQALNTLVKQLSSNFGAISSVLNDILSRLDPPEAEVQIDRLITGRLQSLQTYVTQQLIRAAEIRASANLAATKMSECVLGQSKRVDFCGKGYHLMSFPQSAPHGVVFLHVTYVPAQEKNFTTAPAICHDGKAHFPREGVFVSNGTHWFVTQRNFYEPQIITTDNTFVSGNCDVVIGIVNNTVYDPLQPELDSGGGGSDIDPYKEFGSSYQLLNFLPLDFFPDLNALVDTATALYEEELTGREHCSPHHTAIRQALVCWDELTKLIAWMSSNITSEQVRTIIVNHVNDTWGLKVRQSLWFHLSCLTFGQHTVQEFLVSFGVWIRTPAPYRPPNAPILSTLPEHTVIC

SEQ ID NO: 10748 - protein, 1301 aa, Artificial Sequence
  SARS-CoV-2/Belgium/BA-02291/2020__EPI_ISL_415159 spike protein (1-1147)(K986P_V987P) WhcAg construct
MFVFLVLLPLVSSQCVNLTTRTQLPPAYTNSFTRGVYYPDKVFRSSVLHSTQDLFLPFFSNVTWFHAIHVSGTNGTKRFDNPVLPFNDGVYFASTEKSNIIRGWIFGTTLDSKTQSLLIVNNATNVVIKVCEFQFCNDPFLGVYYHKNNKSWMESEFRVYSSANNCTFEYVSQPFLMDLEGKQGNFKNLREFVFKNIDGYFKIYSKHTPINLVRDLPQGFSALEPLVDLPIGINITRFQTLLALHRSYLTPGDSSSGWTAGAAAYYVGYLQPRTFLLKYNENGTITDAVDCALDPLSETKCTLKSFTVEKGIYQTSNFRVQPTESIVRFPNITNLCPFGEVFNATRFASVYAWNRKRISNCVADYSVLYNSASFSTFKCYGVSPTKLNDLCFTNVYADSFVIRGDEVRQIAPGQTGKIADYNYKLPDDFTGCVIAWNSNNLDSKVGGNYNYLYRLFRRSNLKPFERDISTEIYQAGSTPCNGVEGFNCYFPLQSYGFQPTNGVGYQPYRVVVLSFELLPAPATVCGPKKSTNLVKNKCVNFNFNGLTGTGVLTESNKKFLPFQQFGRDIADTTDAVRDPQTLEILDITPCSFGGVSVITPGTNTSNQVAVLYQGVNCTEVPVAIHADQLTPTWRVYSTGSNVFQTRAGCLIGAEHVNNSYECDIPIGAGICASYQTQTNSPRRARSVASQSIIAYTMSLGAENSVAYSNNSIAIPTNFTISVTTEILPVSMTKTSVDCTMYICGDSTECSNLLLQYGSFCTQLNRALTGIAVEQDKNTQEVFAQVKQIYKTPPIKDFGGFNFSQILPDPSKPSKRSFIEDLLFNKVTLADAGFIKQYGDCLGDIAARDLICAQKFNGLTVLPPLLTDEMIAQYTSALLAGTITSGWTFGAGAALQIPFAMQMAYRFNGIGVTQNVLYENQKLIANQFNSAIGKIQDSLSSAAPALGKLQDVVNQNAQALNTLVKQLSSNFGAISSVLNDILSRLDPPEAEVQIDRLITGRLQSLQTYVTQQLIRAAEIRASANLAATKMSECVLGQSKRVDFCGKGYHLMSFPQSAPHGVVFLHVTYVPAQEKNFTTAPAICHDGKAHFPREGVFVSNGTHWFVTQRNFYEPQIITTDNTFVSGNCDVVIGIVNNTVYDPLQPELDSGGGGSDIDPYKEFGSSYQLLNFLPLDFFPDLNALVDTATALYEEELTGREHCSPHHTAIRQALVCWDELTKLIAWMSSNITSEQVRTIIVNHVNDTWGLKVRQSLWFHLSCLTFGQHTVQEFLVSFGVWIRTPAPYRPPNAPILSTLPEHTVIC

SEQ ID NO: 10749 - protein, 1301 aa, Artificial Sequence
  SARS-CoV-2/USA/WA8-UW5/2020__EPI_ISL_413486 spike protein (1-1147)(K986P_V987P) WhcAg construct
MFVFLVLLPLVSSQCVNLTTRTQLPPAYTNSFTRGVYYPDKVFRSSVLHSTQDLFLPFFSNVTWFHAIHVSGTNGTKRFDNPVLPFNDGVYFASTEKSNIIRGWIFGTTLDSKTQSLLIVNNATNVVIKVCEFQFCNDPFLGVYYHKNNKSWMESEFRVYSSANNCTFEYVSQPFLMDLEGKQGNFKNLREFVFKNIDGYFKIYSKHTPINLVRDLPQGFSALEPLVDLPIGINITRFQTLLALHRSYLTPGDSSSGWTAGAAAYYVGYLQPRTFLLKYNENGTITDAVDCALDPLSETKCTLKSFTVEKGIYQTSNFRVQPTESIVRFPNITNLCPFGEVFNATRFASVYAWNRKRISNCVADYSVLYNSASFSTFKCYGVSPTKLNDLCFTNVYADSFVIRGDEVRQIAPGQTGKIADYNYKLPDDFTGCVIAWNSNNLDSKVGGNYNYLYRLFRKSNLKPFERDISTEIYQAGSTPCNGVEGFNCYFPLQSYGFQPTNGVGYQPYRVVVLSFELLHAPATVCGPKKSTNLVKNKCVNFNFNGLTGTGVLTESNKKFLPFQQFGRDIADTTDAVRDPQTLEILDITPCSFGGVSVITPGTNTSNQVAVLYQDVNCTEVPVAIHADQLTPTWRVYSTGSNVFQTRAGCLIGAEYVNNSYECDIPIGAGICASYQTQTNSPRRARSVASQSIIAYTMSLGAENSVAYSNNSIAIPTNFTISVTTEILPVSMTKTSVDCTMYICGDSTECSNLLLQYGSFCTQLNRALTGIAVEQDKNTQEVFAQVKQIYKTPPIKDFGGFNFSQILPDPSKPSKRSFIEDLLFNKVTLADAGFIKQYGDCLGDIAARDLICAQKFNGLTVLPPLLTDEMIAQYTSALLAGTITSGWTFGAGAALQIPFAMQMAYRFNGIGVTQNVLYENQKLIANQFNSAIGKIQDSLSSTASALGKLQDVVNQNAQALNTLVKQLSSNFGAISSVLNDILSRLDPPEAEVQIDRLITGRLQSLQTYVTQQLIRAAEIRASANLAATKMSECVLGQSKRVDFCGKGYHLMSFPQSAPHGVVFLHVTYVPAQEKNFTTAPAICHDGKAHFPREGVFVSNGTHWFVTQRNFYEPQIITTDNTFVSGNCDVVIGIVNNTVYDPLQPELDSGGGGSDIDPYKEFGSSYQLLNFLPLDFFPDLNALVDTATALYEEELTGREHCSPHHTAIRQALVCWDELTKLIAWMSSNITSEQVRTIIVNHVNDTWGLKVRQSLWFHLSCLTFGQHTVQEFLVSFGVWIRTPAPYRPPNAPILSTLPEHTVIC

SEQ ID NO: 10750 - protein, 1301 aa, Artificial Sequence
  SARS-CoV-2/England/20102000506/2020__EPI_ISL_415147 spike protein (1-1147)(K986P_V987P) WhcAg construct
MFVFLVLLPLVSSQCVNLTTRTQLPPAYTNSFTRGVYYPDKVFRSSVLHSTQDLFLPFFSNVTWFHAIHVSGTNGTKRFDNPVLPFNDGVYFASTEKSNIIRGWIFGTTLDSKTQSLLIVNNATNVVIKVCEFQFCNDPFLGVYYHKNNKSWMESEFRVYSSANNCTFEYVSQPFLMDLEGKQGNFKNLREFVFKNIDGYFKIYSKHTPINLVRDLPQGFSALEPLVDLPIGINITRFQTLLALHRSYLTPGDSSSGWTAGAAAYYVGYLQPRTFLLKYNENGTITDAVDCALDPLSETKCTLKSFTVEKGIYQTSNFRVQPTESIVRFPNITNLCPFGEVFNATRFASVYAWNRKRISNCVADYSVLYNSASFSTFKCYGVSPTKLNDLCFTNVYADSFVIRGDEVRQIAPGQTGKIADYNYKLPDDFTGCVIAWNSNNLDSKVGGNYNYLYRLFRKSNLKPFERDISTEIYQAGSTPCNGVEGFNCYFPLQSYGFQPTNGVGYQPYRVVVLSFELLHAPATVCGPKKSTNLVKNKCVNFNFNGLTGTGVLTESNKKFLPFQQFGRDIADTTDAVRDPQTLEILDITPCSFGGVSVITPGTNTSNQVAVLYQGVNCTEVPVAIHADQLTPTWRVYSTGSNVFQTRAGCLIGAEHVNNSYECDIPIGAGICASYQTQTNSPRRARSVASQSIIAYTMSLGAENSVAYSNNSIAIPTNFTISVTTEILPVSMTKTSVDCTMYICGDSTECSNLLLQYGSFCTQLNRALTGIAVEQDKNTQEVFAQVKQIYKTPPIKDFGGFNFSQILPDPSKPSKRSFIEDLLFNKVTLADAGFIKQYGYCLGDIAARDLICAQKFNGLTVLPPLLTDEMIAQYTSALLAGTITSGWTFGAGAALQIPFAMQMAYRFNGIGVTQNVLYENQKLIANQFNSAIGKIQDSLSSTASALGKLQDVVNQNAQALNTLVKQLSSNFGAISSVLNDILSRLDPPEAEVQIDRLITGRLQSLQTYVTQQLIRAAEIRASANLAATKMSECVLGQSKRVDFCGKGYHLMSFPQSAPHGVVFLHVTYVPAQEKNFTTAPAICHDGKAHFPREGVFVSNGTHWFVTQRNFYEPQIITTDNTFVSGNCDVVIGIVNNTVYDPLQPELDSGGGGSDIDPYKEFGSSYQLLNFLPLDFFPDLNALVDTATALYEEELTGREHCSPHHTAIRQALVCWDELTKLIAWMSSNITSEQVRTIIVNHVNDTWGLKVRQSLWFHLSCLTFGQHTVQEFLVSFGVWIRTPAPYRPPNAPILSTLPEHTVIC

SEQ ID NO: 10751 - protein, 1301 aa, Artificial Sequence
  SARS-CoV-2/Belgium/VAG-03013/2020__EPI_ISL_415155 spike protein (1-1147)(K986P_V987P) WhcAg construct
MFVFLVLLPLVSSQCVNLTTRTQLPPAYTNSFTRGVYYPDKVFRSSVLHSTQDLFLPFFSNVTWFHAIHVSGTNGTKRFDNPVLPFNDGVYFASTEKSNIIRGWIFGTTLDSKTQSLLIVNNATNVVIKVCEFQFCNDPFLGVYYHKNNKSWMESEFRVYSSANNCTFEYVSQPFLMDLEGKQGNFKNLREFVFKNIDGYFKIYSKHTPINLVRDLPQGFSALEPLVDLPIGINITRFQTLLALHRSYLTPGDSSSGWTAGAAAYYVGYLQPRTFLLKYNENGTITDAVDCALDPLSETKCTLKSFTVEKGIYQTSNFRVQPTESIVRFPNITNLCPFGEVFNATRFASVYAWNRKRISNCVADYSVLYNSASFSTFKCYGVSPTKLNDLCFTNVYADSFVIRGDEVRQIAPGQTGKIADYNYKLPDDFTGCVIAWNSNNLDSKVGGNYNYLYRLFRKSNLKPFERDISTEIYQAGSTPCNGVEGFNCYFPLQSYGFQPTNGVGYQPYRVVVLSFELLHAPATVCGPKKSTNLVKNKCVNFNFNGLTGTGVLTESNKKFLPFQQFGRDIADTTDAVRDPQTLEILDITPCSFGGVSVITPGTNTSNQVAVLYQGVNCTEVPVAIHADQLTPTWRVYSTGSNVFQTRAGCLIGAEHVNNSYECDIPIGAGICASYQTQTNSPRRARSVASQSIIAYTMSLGAENSVAYSNNSIAIPTNFTISVTTEILPVSMTKTSVDCTMYICGDSTECSNLLLQYGSFCTQLNRALTGIAVEQDKNTQEVFAQVKQIYKTPPIKDFGGFNFSQILPDPSKPSKRSFIEDLLFNKVTLADAGFIKQYGDCLGDIAARDLICAQKFNGLTVLPPLLTDEMIAQYTSALLAGTITSGWTFGAGAALQIPFAMQMAYRFNGIGVTQNVLYENQKLIANQFNSAIGKIQDSLSSTATALGKLQDVVNQNAQALNTLVKQLSSNFGAISSVLNDILSRLDPPEAEVQIDRLITGRLQSLQTYVTQQLIRAAEIRASANLAATKMSECVLGQSKRVDFCGKGYHLMSFPQSAPHGVVFLHVTYVPAQEKNFTTAPAICHDGKAHFPREGVFVSNGTHWFVTQRNFYEPQIITTDNTFVSGNCDVVIGIVNNTVYDPLQPELDSGGGGSDIDPYKEFGSSYQLLNFLPLDFFPDLNALVDTATALYEEELTGREHCSPHHTAIRQALVCWDELTKLIAWMSSNITSEQVRTIIVNHVNDTWGLKVRQSLWFHLSCLTFGQHTVQEFLVSFGVWIRTPAPYRPPNAPILSTLPEHTVIC

SEQ ID NO: 10752 - protein, 1301 aa, Artificial Sequence
  SARS-CoV-2/Belgium/BC-03016/2020__EPI_ISL_415157 spike protein (1-1147)(K986P_V987P) WhcAg construct
MFVFLVLLPLVSSQCVNLTTRTQLPPAYTNSFTRGVYYPDKVFRSSVLHSTQDLFLPFFSNVTWFHAIHVSGTNGTKRFDNPVLPFNDGVYFASTEKSNIIRGWIFGTTLDSKTQSLLIVNNATNVVIKVCEFQFCNDPFLGVYYHKNNKSWMESEFRVYSSANNCTFEYVSQPFLMDLEGKQGNFKNLREFVFKNIDGYFKIYSKHTPINLVRDLPQGFSALEPLVDLPIGINITRFQTLLALHRSYLTPGDSSSGWTAGAAAYYVGYLQPRTFLLKYNENGTITDAVDCALDPLSETKCTLKSFTVEKGIYQTSNFRVQPTESIVRFPNITNLCPFGEVFNATRFASVYAWNRKRISNCVADYSVLYNSASFSTFKCYGVSPTKLNDLCFTNVYADSFVIRGDEVRQIAPGQTGKIADYNYKLPDDFTGCVIAWNSNNLDSKVGGNYNYLYRLFRKSNLKPFERDISTEIYQAGSTPCNGVEGFNCYFPLQSYGFQPTNGVGYQPYRVVVLSFELLHAPATVCGPKKSTNLVKNKCVNFNFNGLTGTGVLTESNKKFLPFQQFGRDIADTTDAVRDPQTLEILDITPCSFGGVSVITPGTNTSNQVAVLYQGVNCTEVPVAIHADQLTPTWRVYSTGSNVFQTRAGCLIGAEHVNNSYECDIPIGAGICASYQTQTNSPRRARSVASQSIIAYTMSLGAENSVAYSNNSIAIPTNFTISVTTEILPVSMTKTSVDCTMYICGDSTECSNLLLQYGSFCTQLNRALTGIAVEQDKNTQEVFAQVKQIYKTPPIKDFGGFNFSQILPDPSKPSKRSFIEDLLFNKVTLADAGFIKQYGDCLGDIAARDLICAQKFNGLTVLPPLLTDEMIAQYTSALLAGTITSGWTFGAGAALQIPFAMQMAYRFNGIGVTQNVLYENQKLIANQFNSAIGKIQDSLSSTAPALGKLQDVVNQNAQALNTLVKQLSSNFGAISSVLNDILSRLDPPEAEVQIDRLITGRLQSLQTYVTQQLIRAAEIRASANLAATKMSECVLGQSKRVDFCGKGYHLMSFPQSAPHGVVFLHVTYVPAQEKNFTTAPAICHDGKAHFPREGVFVSNGTHWFVTQRNFYEPQIITTDNTFVSGNCDVVIGIVNNTVYDPLQPELDSGGGGSDIDPYKEFGSSYQLLNFLPLDFFPDLNALVDTATALYEEELTGREHCSPHHTAIRQALVCWDELTKLIAWMSSNITSEQVRTIIVNHVNDTWGLKVRQSLWFHLSCLTFGQHTVQEFLVSFGVWIRTPAPYRPPNAPILSTLPEHTVIC

SEQ ID NO: 10753 - protein, 1301 aa, Artificial Sequence
  SARS-CoV-2/Germany/BavPat3/2020__EPI_ISL_414521 spike protein (1-1147)(K986P_V987P) WhcAg construct
MFVFLVLLPLVSSQCVNLTTRTQLPPAYTNSFTRGVYYPDKVFRSSVLHSTQDLFLPFFSNVTWFHAIHVSGTNGTKRFDNPVLPFNDGVYFASTEKSNIIRGWIFGTTLDSKTQSLLIVNNATNVVIKVCEFQFCNDPFLGVYYHKNNKSWMESEFRVYSSANNCTFEYVSQPFLMDLEGKQGNFKNLREFVFKNIDGYFKIYSKHTPINLVRDLPQGFSALEPLVDLPIGINITRFQTLLALHRSYLTPGDSSSGWTAGAAAYYVGYLQPRTFLLKYNENGTITDAVDCALDPLSETKCTLKSFTVEKGIYQTSNFRVQPTESIVRFPNITNLCPFGEVFNATRFASVYAWNRKRISNCVADYSVLYNSASFSTFKCYGVSPTKLNDLCFTNVYADSFVIRGDEVRQIAPGQTGKIADYNYKLPDDFTGCVIAWNSNNLDSKVGGNYNYLYRLFRKSNLKPFERDISTEIYQAGSTPCNGVEGFNCYFPLQSYGFQPTNGVGYQPYRVVVLSFELLHAPATVCGPKKSTNLVKNKCVNFNFNGLTGTGVLTESNKKFLPFQQFGRDIADTTDAVRDPQTLEILDITPCSFGGVSVITPGTNTSNQVAVLYQDVNCTEVPVAIHADQLTPTWRVYSTGSNVFQTRAGCLIGAEHVNNSYECDIPIGAGICASYQTQTNSPRRARSVASQSIIAYTMSLGAENSVAYSNNSIAIPTNFTISVTTEILPVSMTKTSVDCTMYICGDSTECSNLLLQYGSFCTQLNRALTGIAVEQDKNTQQVFAQVKQIYKTPPIKDFGGFNFSQILPDPSKPSKRSFIEDLLFNKVTLADAGFIKQYGDCLGDIAARDLICAQKFNGLTVLPPLLTDEMIAQYTSALLAGTITSGWTFGAGAALQIPFAMQMAYRFNGIGVTQNVLYENQKLIANQFNSAIGKIQDSLSSTASALGKLQDVVNQNAQALNTLVKQLSSNFGAISSVLNDILSRLDPPEAEVQIDRLITGRLQSLQTYVTQQLIRAAEIRASANLAATKMSECVLGQSKRVDFCGKGYHLMSFPQSAPHGVVFLHVTYVPAQEKNFTTAPAICHDGKAHFPREGVFVSNGTHWFVTQRNFYEPQIITTDNTFVSGNCDVVIGIVNNTVYDPLQPELDSGGGGSDIDPYKEFGSSYQLLNFLPLDFFPDLNALVDTATALYEEELTGREHCSPHHTAIRQALVCWDELTKLIAWMSSNITSEQVRTIIVNHVNDTWGLKVRQSLWFHLSCLTFGQHTVQEFLVSFGVWIRTPAPYRPPNAPILSTLPEHTVIC

SEQ ID NO: 10754 - protein, 1301 aa, Artificial Sequence
  SARS-CoV-2/France/HF1805/2020__EPI_ISL_414628 spike protein (1-1147)(K986P_V987P) WhcAg construct
MFVFLVLLPLVSSQCVNLTTRTQLPPAYTNSFTRGVYYPDKVFRSSVLHSTQDLFLPFFSNVTWFHAIHVSGTNGTKRFDNPVLPFNDGVYFASTEKSNIIRGWIFGTTLDSKTQSLLIVNNATNVVIKVCEFQFCNDPFLGVYYHKNNKSWMESEFRVYSSANNCTFEYVSQPFLMDLEGKQGNFKNLREFVFKNIDGYFKIYSKHTPINLVRDLPQGFSALEPLVDLPIGINITRFQTLLALHRSYLTPGDSSSGWTAGAAAYYVGYLQPRTFLLKYNENGTITDAVDCALDPLSETKCTLKSFTVEKGIYQTSNFRVQPTESIVRFPNITNLCPFGEVFNATRFASVYAWNRKRISNCVADYSVLYNSASFSTFKCYGVSPTKLNDLCFTNVYADSFVIRGDEVRQIAPGQTGKIADYNYKLPDDFTGCVIAWNSNNLDSKVGGNYNYLYRLFRKSNLKPFERDISTEIYQAGSTPCNGVEGFNCYFPLQSYGFQPTNGVGYQPYRVVVLSFELLHAPATVCGPKKSTNLVKNKCVNFNFNGLTGTGVLTESNKKFLPFQQFGRDIADTTDAVRDPQTLEILDITPCSFGGVSVITPGTNTSNQVAVLYQGVNCTEVPVAIHADQLTPTWRVYSTGSNVFQTRAGCLIGAEHVNNSYECDIPIGAGICASYQTQTNSPRRARSVASQSIIAYTMSLGAENSVAYSNNSIAIPTNFTISVTTEILPVSMTKTSVDCTMYICGDSTECSNLLLQYGSFCTQLNRALTGIAVEQDKNTQEVFAQVKQIYKTPPIKDFGGFNFSQILPDPSKPSKRSFIEDLLFNKVTLADAGFIKQYGDCLGDIAARDLICAQKFNGLTVLPPLLTDEMIAQYTSALLAGTITSGWTFGAGAALQIPFAMQMAYRFNGIGVTQNVLYENQKLIANQFNSAIGKIQDSLSSTASALGKLQDVVNQNAQALNTLVKQLSSNFGAISSVLNDILSRLDPPEAEVQIDRLITGRLQSLQTYVTQQLIRAAEIRASANLAATKMSECVLGQSKRVDFCGKGYHLMSFPQSAPHGVVFLHVTYVPAQEKNFTTAPAICHDGKAHFPREGVFVSNGTHWFVTQRNFYEPQIITTDNTFVSGNCDVVIGVVNNTVYDPLQPELDSGGGGSDIDPYKEFGSSYQLLNFLPLDFFPDLNALVDTATALYEEELTGREHCSPHHTAIRQALVCWDELTKLIAWMSSNITSEQVRTIIVNHVNDTWGLKVRQSLWFHLSCLTFGQHTVQEFLVSFGVWIRTPAPYRPPNAPILSTLPEHTVIC

SEQ ID NO: 10755 - protein, 1301 aa, Artificial Sequence
  SARS-CoV-2/Netherlands/ZuidHolland_9/2020__EPI_ISL_414445 spike protein (1-1147)(K986P_V987P) WhcAg construct
MFVFLVLLPLVSSQCVNLTTRTQLPPAYTNSFTRGVYYPDKVFRSSVLHSTQDLFLPFFSNVTWFHAIHVSGTNGTKRFDNPVLPFNDGVYFASTEKSNIIRGWIFGTTLDSKTQSLLIVNNATNVVIKVCEFQFCNDPFLGVYYHKNNKSWMESEFRVYSSANNCTFEYVSQPFLMDLEGKQGNFKNLREFVFKNIDGYFKIYSKHTPINLVRDLPQGFSALEPLVDLPIGINITRFQTLLALHRSYLTPGDSSSGWTAGAAAYYVGYLQPRTFLLKYNENGTITDAVDCALDPLSETKCTLKSFTVEKGIYQTSNFRVQPTESIVRFPNITNLCPFGEVFNATRFASVYAWNRKRISNCVADYSVLYNSASFSTFKCYGVSPTKLNDLCFTNVYADSFVIRGDEVRQIAPGQTGKIADYNYKLPDDFTGCVIAWNSNNLDSKVGGNYNYLYRLFRKSNLKPFERDISTEIYQAGSTPCNGVEGFNCYFPLQSYGFQPTNGVGYQPYRVVVLSFELLHAPATVCGPKKSTNLVKNKCVNFNFNGLTGTGVLTESNKKFLPFQQFGRDIADTTDAVRDPQTLEILDITPCSFGGVSVITPGTNTSNQVAVLYQGVNCTEVPVAIHADQLTPTWRVYSTGSNVFQTRAGCLIGAEHVNNSYECDIPIGAGICASYQTQTNSPRRARSVASQSIIAYTMSLGAENSVAYSNNSIAIPTNFTISVTTEILPVSMTKTSVDCTMYICGDSTECSNLLLQYGSFCTQLNRALTGIAVEQDKNTQEVFAQVKQIYKTPPIKDFGGFNFSQILPDPSKPSKRSFIEDLLFNKVTLADAGFIKQYGDCLGDIAARDLICVQKFNGLTVLPPLLTDEMIAQYTSALLAGTITSGWTFGAGAALQIPFAMQMAYRFNGIGVTQNVLYENQKLIANQFNSAIGKIQDSLSSTASALGKLQDVVNQNAQALNTLVKQLSSNFGAISSVLNDILSRLDPPEAEVQIDRLITGRLQSLQTYVTQQLIRAAEIRASANLAATKMSECVLGQSKRVDFCGKGYHLMSFPQSAPHGVVFLHVTYVPAQEKNFTTAPAICHDGKAHFPREGVFVSNGTHWFVTQRNFYEPQIITTDNTFVSGNCDVVIGIVNNTVYDPLQPELDSGGGGSDIDPYKEFGSSYQLLNFLPLDFFPDLNALVDTATALYEEELTGREHCSPHHTAIRQALVCWDELTKLIAWMSSNITSEQVRTIIVNHVNDTWGLKVRQSLWFHLSCLTFGQHTVQEFLVSFGVWIRTPAPYRPPNAPILSTLPEHTVIC

SEQ ID NO: 10756 - protein, 1301 aa, Artificial Sequence
  SARS-CoV-2/Finland/FIN03032020A/2020__EPI_ISL_413602 spike protein (1-1147)(K986P_V987P) WhcAg construct
MFVFLVLLPLVSSQCVNLTTRTQLPPAYTNSFTRGVYYPDKVFRSSVLHSTQDLFLPFFSNVTWFHAIHVSGTNGTKRFDNPVLPFNDGVYFASTEKSNIIRGWIFGTTLDSKTQSLLIVNNATNVVIKVCEFQFCNDPFLGVYYHKNNKSWMESEFRVYSSANNCTFEYVSQPFLMDLEGKQGNFKNLREFVFKNIDGYFKIYSKHTPINLVRDLPQGFSALEPLVDLPIGINITRFQTLLALHRSYLTPGDSSSGWTAGAAAYYVGYLQPRTFLLKYNENGTITDAVDCALDPLSETKCTLKSFTVEKGIYQTSNFRVQPTESIVRFPNITNLCPFGEVFNATRFASVYAWNRKRISNCVADYSVLYNSASFSTFKCYGVSPTKLNDLCFTNVYADSFVIRGDEVRQIAPGQTGKIADYNYKLPDDFTGCVISWNSNNLDSKVGGNYNYLYRLFRKSNLKPFERDISTEIYQAGSTPCNGVEGFNCYFPLQSYGFQPTNGVGYQPYRVVVLSFELLHAPATVCGPKKSTNLVKNKCVNFNFNGLTGTGVLTESNKKFLPFQQFGRDIADTTDAVRDPQTLEILDITPCSFGGVSVITPGTNTSNQVAVLYQGVNCTEVPVAIHADQLTPTWRVYSTGSNVFQTRAGCLIGAEHVNNSYECDIPIGAGICASYQTQTNSPRRARSVASQSIIAYTMSLGAENSVAYSNNSIAIPTNFTISVTTEILPVSMTKTSVDCTMYICGDSTECSNLLLQYGSFCTQLNRALTGIAVEQDKNTQEVFAQVKQIYKTPPIKDFGGFNFSQILPDPSKPSKRSFIEDLLFNKVTLADAGFIKQYGDCLGDIAARDLICAQKFNGLTVLPPLLTDEMIAQYTSALLAGTITSGWTFGAGAALQIPFAMQMAYRFNGIGVTQNVLYENQKLIANQFNSAIGKIQDSLSSTASALGKLQDVVNQNAQALNTLVKQLSSNFGAISSVLNDILSRLDPPEAEVQIDRLITGRLQSLQTYVTQQLIRAAEIRASANLAATKMSECVLGQSKRVDFCGKGYHLMSFPQSAPHGVVFLHVTYVPAQEKNFTTAPAICHDGKAHFPREGVFVSNGTHWFVTQRNFYEPQIITTDNTFVSGNCDVVIGIVNNTVYDPLQPELDSGGGGSDIDPYKEFGSSYQLLNFLPLDFFPDLNALVDTATALYEEELTGREHCSPHHTAIRQALVCWDELTKLIAWMSSNITSEQVRTIIVNHVNDTWGLKVRQSLWFHLSCLTFGQHTVQEFLVSFGVWIRTPAPYRPPNAPILSTLPEHTVIC

SEQ ID NO: 10757 - protein, 1301 aa, Artificial Sequence
  SARS-CoV-2/France/GE1977/2020__EPI_ISL_414632 spike protein (1-1147)(K986P_V987P) WhcAg construct
MFVFLVLLPLVSSQCVNLTTRTQLPPAYTNSFTRGVYYPDKVFRSSVLHSTQDLFLPFFSNVTWFHAIHVSGTNGTKRFDNPVLPFNDGVYFASTEKSNIIRGWIFGTTLDSKTQSLLIVNNATNVVIKVCEFQFCNDPFLGVYYHKNNKSWMESEFRVYSSANNCTFEYVSQPFLMDLEGKQGNFKNLREFVFKNIDGYFKIYSKHTPINLVRDLPQGFSALEPLVDLPIGINITRFQTLLALHRSYLTPGDSSSGWTAGAAAYYVGYLQPRTFLLKYNENGTITDAVDCALDPLSETKCTLKSFTVEKGIYQTSNFRVQPTESIVRFPNITNLCPFGEVFNATRFASVYAWNRKRISNCVADYSVLYNSASFSTFKCYGVSPTKLNDLCFTNVYADSFVIRGDEVRQIAPGQTGKIADYNYKLPDDFTGCVIAWNSNNLDSKVGGNYNYLYRLFRKSNLKPFERDISTEIYQAGSTPCNGVEGFNCYFPLQSYGFQPTNGVGYQPYRVVVLSFELLHAPATVCGPKKSTNLVKNKCVNFNFNGLTGTGVLTESNKKFLPFQQFGRDIADTTDAVRDPQTLEILDITPCSFGGVSVITPGTNTSNQVAVLYQGVNCTEVPVAIHADQLTPTWRVYSTGSNVFQTRAGCLIGAEHVNNSYECDIPIGAGICASYQTQTNSPRRARSVASQSIIAYTMSLGAENSVAYSNNSIAIPTNFTISVTTEILPVSMTKTSVDCTMYICGDSTECSNLLLQYGSFCTQLNRALTGIAVEQDKNTQEVFAQVKQIYKTPPIKDFGGFNFSQILPDPSKPSKRSFIEDLLFNKVTLADAGFIKQYGDCLGDIAARDLICAQKFNGLTVLPPLLTDEMIAQYTSALLAGTITSGWTFGAGAALQIPFAMQMAYRFNGIGVTQNVLYENQKLIANQFNSAIGKIQDSLFSTASALGKLQDVVNQNAQALNTLVKQLSSNFGAISSVLNDILSRLDPPEAEVQIDRLITGRLQSLQTYVTQQLIRAAEIRASANLAATKMSECVLGQSKRVDFCGKGYHLMSFPQSAPHGVVFLHVTYVPAQEKNFTTAPAICHDGKAHFPREGVFVSNGTHWFVTQRNFYEPQIITTDNTFVSGNCDVVIGIVNNTVYDPLQPELDSGGGGSDIDPYKEFGSSYQLLNFLPLDFFPDLNALVDTATALYEEELTGREHCSPHHTAIRQALVCWDELTKLIAWMSSNITSEQVRTIIVNHVNDTWGLKVRQSLWFHLSCLTFGQHTVQEFLVSFGVWIRTPAPYRPPNAPILSTLPEHTVIC

SEQ ID NO: 10758 - protein, 1301 aa, Artificial Sequence
  SARS-CoV-2/Finland/FIN-313/2020__EPI_ISL_414641 spike protein (1-1147)(K986P_V987P) WhcAg construct
MFVFLVLLPLVSSQCVNLTTRTQLPPAYTNSFTRGVYYPDKVFRSSVLHSTQDLFLPFFSNVTWFHAIHVSGTNGTKRFDNPVLPFNDGVYFASTEKSNIIRGWIFGTTLDSKTQSLLIVNNATNVVIKVCEFQFCNDPFLGVYYHKNNKSWMESEFRVYSSANNCTFEYVSQPFLMDLEGKQGNFKNLREFVFKNIDGYFKIYSKHTPINLVRDLPQGFSALEPLVDLPIGINITRFKTLLALHRSYLTPGDSSSGWTAGAAAYYVGYLQPRTFLLKYNENGTITDAVDCALDPLSETKCTLKSFTVEKGIYQTSNFRVQPTESIVRFPNITNLCPFGEVFNATRFASVYAWNRKRISNCVADYSVLYNSASFSTFKCYGVSPTKLNDLCFTNVYADSFVIRGDEVRQIAPGQTGKIADYNYKLPDDFTGCVIAWNSNNLDSKVGGNYNYLYRLFRKSNLKPFERDISTEIYQAGSTPCNGVEGFNCYFPLQSYGFQPTNGVGYQPYRVVVLSFELLHAPATVCGPKKSTNLVKNKCVNFNFNGLTGTGVLTESNKKFLPFQQFGRDIADTTDAVRDPQTLEILDITPCSFGGVSVITPGTNTSNQVAVLYQGVNCTEVPVAIHADQLTPTWRVYSTGSNVFQTRAGCLIGAEHVNNSYECDIPIGAGICASYQTQTNSPRRARSVASQSIIAYTMSLGAENSVAYSNNSIAIPTNFTISVTTEILPVSMTKTSVDCTMYICGDSTECSNLLLQYGSFCTQLNRALTGIAVEQDKNTQEVFAQVKQIYKTPPIKDFGGFNFSQILPDPSKPSKRSFIEDLLFNKVTLADAGFIKQYGDCLGDIAARDLICAQKFNGLTVLPPLLTDEMIAQYTSALLAGTITSGWTFGAGAALQIPFAMQMAYRFNGIGVTQNVLYENQKLIANQFNSAIGKIQDSLSSTASALGKLQDVVNQNAQALNTLVKQLSSNFGAISSVLNDILSRLDPPEAEVQIDRLITGRLQSLQTYVTQQLIRAAEIRASANLAATKMSECVLGQSKRVDFCGKGYHLMSFPQSAPHGVVFLHVTYVPAQEKNFTTAPAICHDGKAHFPREGVFVSNGTHWFVTQRNFYEPQIITTDNTFVSGNCDVVIGIVNNTVYDPLQPELDSGGGGSDIDPYKEFGSSYQLLNFLPLDFFPDLNALVDTATALYEEELTGREHCSPHHTAIRQALVCWDELTKLIAWMSSNITSEQVRTIIVNHVNDTWGLKVRQSLWFHLSCLTFGQHTVQEFLVSFGVWIRTPAPYRPPNAPILSTLPEHTVIC

SEQ ID NO: 10759 - protein, 1301 aa, Artificial Sequence
  SARS-CoV-2/Netherlands/ZuidHolland_2/2020__EPI_ISL_414556 spike protein (1-1147)(K986P_V987P) WhcAg construct
MFVFLVLLPLVSSQCVNLTTRTQLPPAYTNSFTRGVYYPDKVFRSSVLHSTQDLFLPFFSNVTWFHAIHVSGTNGTKRFDNPVLPFNDGVYFASTEKSNIIRGWIFGTTLDSKTQSLLIVNNATNVVIKVCEFQFCNDPFLGVYYHKNNKSWMESEFRVYSSANNCTFEYVSQPFLMDLEGKQGNFKNLREFVFKNIDGYFKIYSKHTPINLVRDLPQGFSALEPLVDLPIGINITRFQTLLALHRSYLTPGDSSSGWTAGAAAYYVGYLQPRTFLLKYNENGTITDAVDCALDPLSETKCTLKSFTVEKGIYQTSNFRVQPTESIVRFPNITNLCPFGEVFNATRFASVYAWNRKRISNCVADYSVLYNSASFSTFKCYGVSPTKLNDLCFTNVYADSFVIRGDEVRQIAPGQTGKIADYNYKLPDDFTGCVIAWNSNNLDSKVGGNYNYLYRLFRKSNLKPFERDISTEIYQAGSTPCNGVEGFNCYFPLQSYGFQPTNGVGYQPYRVVVLSFELLHAPATVCGPKKSTNLVKNKCVNFNFNGLTGTGVLTESNKKFLPFQQFGRDIADTTDAVRDPQTLEILDITPCSFGGVSVITPGTNTSNQVAVLYQGVNCTEVPVAIHADQLTPTWRVYSTGSNVFQTRAGCLIGAEHVNNSYECDIPIGAGICASYQTQTNSPRRARSVASQSIIAYTMSLGAENSVAYSNNSIAIPTNFTISVTTEILPVSMTKTSVDCTMYICGDSTECSNLLLQYGSFCTQLNRALTGIALEQDKNTQEVFAQVKQIYKTPPIKDFGGFNFSQILPDPSKPSKRSFIEDLLFNKVTLADAGFIKQYGDCLGDIAARDLICAQKFNGLTVLPPLLTDEMIAQYTSALLAGTITSGWTFGAGAALQIPFAMQMAYRFNGIGVTQNVLYENQKLIANQFNSAIGKIQDSLSSTASALGKLQDVVNQNAQALNTLVKQLSSNFGAISSVLNDILSRLDPPEAEVQIDRLITGRLQSLQTYVTQQLIRAAEIRASANLAATKMSECVLGQSKRVDFCGKGYHLMSFPQSAPHGVVFLHVTYVPAQEKNFTTAPAICHDGKAHFPREGVFVSNGTHWFVTQRNFYEPQIITTDNTFVSGNCDVVIGIVNNTVYDPLQPELDSGGGGSDIDPYKEFGSSYQLLNFLPLDFFPDLNALVDTATALYEEELTGREHCSPHHTAIRQALVCWDELTKLIAWMSSNITSEQVRTIIVNHVNDTWGLKVRQSLWFHLSCLTFGQHTVQEFLVSFGVWIRTPAPYRPPNAPILSTLPEHTVIC

SEQ ID NO: 10760 - protein, 1301 aa, Artificial Sequence
  SARS-CoV-2/USA/WA-UW31/2020__EPI_ISL_414618 spike protein (1-1147)(K986P_V987P) WhcAg construct
MFVFLVLLPLVSSQCVNLTTRTQLPPAYTNSFTRGVYYPDKVFRSSVLHSTQDLFLPFFSNVTWFHAIHVSGTNGTKRFDNPVLPFNDGVYFASTEKSNIIRGWIFGTTLDSKTQSLLIVNNATNVVIKVCEFQFCNDPFLGVYYHKNNKSWMESEFRVYSSANNCTFEYVSQPFLMDLEGKQGNFKNLREFVFKNIDGYFKIYSKHTPINLVRDLPQGFSALEPLVDLPIGINITRFQTLLALHRSYLTPGDSSSGWTAGAAAYYVGYLQPRTFLLKYNENGTITDAVDCALDPLSETKCTLKSFTVEKGIYQTSNFRVQPTESIVRFPNITNLCPFGEVFNATRFASVYAWNRKRISNCVADYSVLYNSASFSTFKCYGVSPTKLNDLCFTNVYADSFVIRGDEVRQIAPGQTGKIADYNYKLPDDFTGCVIAWNSNNLDSKVGGNYNYLYRLFRKSNLKPFERDISTEIYQAGSTPCNGAEGFNCYFPLQSYGFQPTNGVGYQPYRVVVLSFELLHAPATVCGPKKSTNLVKNKCVNFNFNGLTGTGVLTESNKKFLPFQQFGRDIADTTDAVRDPQTLEILDITPCSFGGVSVITPGTNTSNQVAVLYQDVNCTEVPVAIHADQLTPTWRVYSTGSNVFQTRAGCLIGAEHVNNSYECDIPIGAGICASYQTQTNSPRRARSVASQSIIAYTMSLGAENSVAYSNNSIAIPTNFTISVTTEILPVSMTKTSVDCTMYICGDSTECSNLLLQYGSFCTQLNRALTGIAVEQDKNTQEVFAQVKQIYKTPPIKDFGGFNFSQILPDPSKPSKRSFIEDLLFNKVTLADAGFIKQYGDCLGDIAARDLICAQKFNGLTVLPPLLTDEMIAQYTSALLAGTITSGWTFGAGAALQIPFAMQMAYRFNGIGVTQNVLYENQKLIANQFNSAIGKIQDSLSSTASALGKLQDVVNQNAQALNTLVKQLSSNFGAISSVLNDILSRLDPPEAEVQIDRLITGRLQSLQTYVTQQLIRAAEIRASANLAATKMSECVLGQSKRVDFCGKGYHLMSFPQSAPHGVVFLHVTYVPAQEKNFTTAPAICHDGKAHFPREGVFVSNGTHWFVTQRNFYEPQIITTDNTFVSGNCDVVIGIVNNTVYDPLQPELDSGGGGSDIDPYKEFGSSYQLLNFLPLDFFPDLNALVDTATALYEEELTGREHCSPHHTAIRQALVCWDELTKLIAWMSSNITSEQVRTIIVNHVNDTWGLKVRQSLWFHLSCLTFGQHTVQEFLVSFGVWIRTPAPYRPPNAPILSTLPEHTVIC

SEQ ID NO: 10761 - protein, 1301 aa, Artificial Sequence
  SARS-CoV-2/South Korea/SNU01/2020__EPI_ISL_411929 spike protein (1-1147)(K986P_V987P) WhcAg construct
MFVFLVLLPLVSSQCVNLTTRTQLPPAYTNSFTRGVYYPDKVFRSSVLHSTQDLFLPFFSNVTWFHAIHVSGTNGTKRFDNPVLPFNDGVYFASTEKSNIIRGWIFGTTLDSKTQSLLIVNNATNVVIKVCEFQFCNDPFLGVYYHKNNKSWMESEFRVYSSANNCTFEYVSQPFLMDLEGKQGNFKNLREFVFKNIDGYFKIYSKHTPINLVRDLPQGFWALEPLVDLPIGINITRFQTLLALHRSYLTPGDSSSGWTAGAAAYYVGYLQPRTFLLKYNENGTITDAVDCALDPLSETKCTLKSFTVEKGIYQTSNFRVQPTESIVRFPNITNLCPFGEVFNATRFASVYAWNRKRISNCVADYSVLYNSASFSTFKCYGVSPTKLNDLCFTNVYADSFVIRGDEVRQIAPGQTGKIADYNYKLPDDFTGCVIAWNSNNLDSKVGGNYNYLYRLFRKSNLKPFERDISTEIYQAGSTPCNGVEGFNCYFPLQSYGFQPTNGVGYQPYRVVVLSFELLHAPATVCGPKKSTNLVKNKCVNFNFNGLTGTGVLTESNKKFLPFQQFGRDIADTTDAVRDPQTLEILDITPCSFGGVSVITPGTNTSNQVAVLYQDVNCTEVPVAIHADQLTPTWRVYSTGSNVFQTRAGCLIGAEHVNNSYECDIPIGAGICASYQTQTNSPRRARSVASQSIIAYTMSLGAENSVAYSNNSIAIPTNFTISVTTEILPVSMTKTSVDCTMYICGDSTECSNLLLQYGSFCTQLNRALTGIAVEQDKNTQEVFAQVKQIYKTPPIKDFGGFNFSQILPDPSKPSKRSFIEDLLFNKVTLADAGFIKQYGDCLGDIAARDLICAQKFNGLTVLPPLLTDEMIAQYTSALLAGTITSGWTFGAGAALQIPFAMQMAYRFNGIGVTQNVLYENQKLIANQFNSAIGKIQDSLSSTASALGKLQDVVNQNAQALNTLVKQLSSNFGAISSVLNDILSRLDPPEAEVQIDRLITGRLQSLQTYVTQQLIRAAEIRASANLAATKMSECVLGQSKRVDFCGKGYHLMSFPQSAPHGVVFLHVTYVPAQEKNFTTAPAICHDGKAHFPREGVFVSNGTHWFVTQRNFYEPQIITTDNTFVSGNCDVVIGIVNNTVYDPLQPELDSGGGGSDIDPYKEFGSSYQLLNFLPLDFFPDLNALVDTATALYEEELTGREHCSPHHTAIRQALVCWDELTKLIAWMSSNITSEQVRTIIVNHVNDTWGLKVRQSLWFHLSCLTFGQHTVQEFLVSFGVWIRTPAPYRPPNAPILSTLPEHTVIC

SEQ ID NO: 10762 - protein, 1301 aa, Artificial Sequence
  SARS-CoV-2/China/WF0004/2020__EPI_ISL_413694 spike protein (1-1147)(K986P_V987P) WhcAg construct
MFVFLVLLPLVSSQCVNLTTRTQLPPAYTNSFTRGVYYPDKVFRSSVLHSTQDLFLPFFSNVTWFHAIHVSGTNGTKRFDNPVLPFNDGVYFASTEKSNIIRGWIFGTTLDSKTQSLLIVNNATNVVIKVCEFQFCNDPFLGVYYHKNNKSWTESEFRVYSSANNCTFEYVSQPFLMDLEGKQGNFKNLREFVFKNIDGYFKIYSKHTPINLVRDLPQGFSALEPLVDLPIGINITRFQTLLALHRSYLTPGDSSSGWTAGAAAYYVGYLQPRTFLLKYNENGTITDAVDCALDPLSETKCTLKSFTVEKGIYQTSNFRVQPTESIVRFPNITNLCPFGEVFNATRFASVYAWNRKRISNCVADYSVLYNSASFSTFKCYGVSPTKLNDLCFTNVYADSFVIRGDEVRQIAPGQTGKIADYNYKLPDDFTGCVIAWNSNNLDSKVGGNYNYLYRLFRKSNLKPFERDISTEIYQAGSTPCNGVEGFNCYFPLQSYGFQPTNGVGYQPYRVVVLSFELLHAPATVCGPKKSTNLVKNKCVNFNFNGLTGTGVLTESNKKFLPFQQFGRDIADTTDAVRDPQTLEILDITPCSFGGVSVITPGTNTSNQVAVLYQDVNCTEVPVAIHADQLTPTWRVYSTGSNVFQTRAGCLIGAEHVNNSYECDIPIGAGICASYQTQTNSPRRARSVASQSIIAYTMSLGAENSVAYSNNSIAIPTNFTISVTTEILPVSMTKTSVDCTMYICGDSTECSNLLLQYGSFCTQLNRALTGIAVEQDKNTQEVFAQVKQIYKTPPIKDFGGFNFSQILPDPSKPSKRSFIEDLLFNKVTLADAGFIKQYGDCLGDIAARDLICAQKFNGLTVLPPLLTDEMIAQYTSALLAGTITSGWTFGAGAALQIPFAMQMAYRFNGIGVTQNVLYENQKLIANQFNSAIGKIQDSLSSTASALGKLQDVVNQNAQALNTLVKQLSSNFGAISSVLNDILSRLDPPEAEVQIDRLITGRLQSLQTYVTQQLIRAAEIRASANLAATKMSECVLGQSKRFDFCGKGYHLMSFPQSAPHGVVFLHVTYVPAQEKNFTTAPAICHDGKAHFPREGVFVSNGTHWFVTQRNFYEPQIITTDNTFVSGNCDVVIGIVNNTVYDPLQPELDSGGGGSDIDPYKEFGSSYQLLNFLPLDFFPDLNALVDTATALYEEELTGREHCSPHHTAIRQALVCWDELTKLIAWMSSNITSEQVRTIIVNHVNDTWGLKVRQSLWFHLSCLTFGQHTVQEFLVSFGVWIRTPAPYRPPNAPILSTLPEHTVIC

SEQ ID NO: 10763 - protein, 1301 aa, Artificial Sequence
  SARS-CoV-2/China/WF0028/2020__EPI_ISL_413791 spike protein (1-1147)(K986P_V987P) WhcAg construct
MFVFLVLLPLVSSQCVNLTTRTQLPPAYTNSFTRGVYYPDKVFRSSVLHSTQDLFLPFFSNVTWFHAIHVSGTNGTKRFDNPVLPFNDGVYFASTEKSNIIRGWIFGTTLDSKTQSLLIVNNATNVVIKVCEFQFCNDPFLGVYYHKNNKSWMESEFRVYSSANNCTFEYVSQPFLMDLEGKQGNFKNLREFVFKNIDGYFKIYSKHTPINLVRDLPQGFSALEPLVDLPIGINITRFQTLLALHRSYLTPGDSSSGWTAGAAAYYVGYLQPRTFLLKYNENGTITDAVDCALDPLSETKCTLKSFTVEKGIYQTSNFRVQPTESIVRFPNITNLCPFGEVFNATRFASVYAWNRKRISNCVADYSVLYNSASFSTFKCYGVSPTKLNDLCFTNVYADSFVIRGDEVRQIAPGQTGKIADYNYKLPDDFTGCVIAWNSNNLDSKVGGNYNYLYRLFRKSNLKPFERDISTEIYQAGSTPCNGVEGFNCYFPLQSYGFQPTNGVGYQPYRVVVLSFELLHAPATVCGPKKSTNLVKNKCVNFNFNGLTGTGVLTESNKKFLPFQQFGRDIADTTDAVRDPQTLEILDITPCSFGGVSVITPGTNTSNQVAVLYQDVNCTEVPVAIHADQLTPTWRVYSTGSNVFQTRAGCLIGAEHVNNSYECDIPIGAGICASYQTQTNSPRRARSVASQSIIAYTMSLGAENSVAYSNNSIAIPTNFTISVTTEILPVSMTKTSVDCTMYICGDSTECSNLLLQYGSFCTQLNRALTGIAVEQDKNTQEVFAQVKQIYKTPPIKDFGGFNFSQILPDPSKPSKRSFIEDLLFNKVTLADAGFIKQYGDCLGDIAARDLICAQKFNGLTVLPPLLTDEMIAQYTSALLAGTITSGWTFGAGAALQIPFAMQMAYRFNGIGVTQNVLYENQKLIANQFNSAIGKIQDSLSSTASALGKLQDVVNQNAQALNTLVKQLSSNFGAISSVLNDILSRLDPPEAEVQIDRLITGRLQSLQTYVTQQLIRAAEIRASANLAATKMSECVLGQSKRVDFCGKGYHLMSFPQSAPHGVVFLHVTYVPAQEKNFTTAPAICHDGKAHFPREGVFVSNGTHWFVTQRNFYEPQIITTDNTFVSGNCDVVIGIVNNTVYDPLQPELESGGGGSDIDPYKEFGSSYQLLNFLPLDFFPDLNALVDTATALYEEELTGREHCSPHHTAIRQALVCWDELTKLIAWMSSNITSEQVRTIIVNHVNDTWGLKVRQSLWFHLSCLTFGQHTVQEFLVSFGVWIRTPAPYRPPNAPILSTLPEHTVIC

SEQ ID NO: 10764 - protein, 1301 aa, Artificial Sequence
  SARS-CoV-2/2019-nCoV/USA-CruiseA-18/2020__MT159716.1 spike protein (1-1147)(K986P_V987P) WhcAg construct
MFVFLVLLPLVSSQCVNLTTRTQLPPAYTNSFTRGVYYPDKVFRSSVLHSTQDLFLPFFSNVTWFHAIHVSGTNGTKRFDNPVLPFNDGVYFASTEKSNIIRGWIFGTTLDSKTQSLLIVNNATNVVIKVCEFQFCNDPFLGVYYHKNNKSWMESELRVYSSANNCTFEYVSQPFLMDLEGKQGNFKNLREFVFKNIDGYFKIYSKHTPINLVRDLPQGFSALEPLVDLPIGINITRFQTLLALHRSYLTPGDSSSGWTAGAAAYYVGYLQPRTFLLKYNENGTITDAVDCALDPLSETKCTLKSFTVEKGIYQTSNFRVQPTESIVRFPNITNLCPFGEVFNATRFASVYAWNRKRISNCVADYSVLYNSASFSTFKCYGVSPTKLNDLCFTNVYADSFVIRGDEVRQIAPGQTGKIADYNYKLPDDFTGCVIAWNSNNLDSKVGGNYNYLYRLFRKSNLKPFERDISTEIYQAGSTPCNGVEGFNCYFPLQSYGFQPTNGVGYQPYRVVVLSFELLHAPATVCGPKKSTNLVKNKCVNFNFNGLTGTGVLTESNKKFLPFQQFGRDIADTTDAVRDPQTLEILDITPCSFGGVSVITPGTNTSNQVAVLYQDVNCTEVPVAIHADQLTPTWRVYSTGSNVFQTRAGCLIGAEHVNNSYECDIPIGAGICASYQTQTNSPRRARSVASQSIIAYTMSLGAENSVAYSNNSIAIPTNFTISVTTEILPVSMTKTSVDCTMYICGDSTECSNLLLQYGSFCTQLNRALTGIAVEQDKNTQEVFAQVKQIYKTPPIKDFGGFNFSQILPDPSKPSKRSFIEDLLFNKVTLADAGFIKQYGDCLGDIAARDLICAQKFNGLTVLPPLLTDEMIAQYTSALLAGTITSGWTFGAGAALQIPFAMQMAYRFNGIGVTQNVLYENQKLIANQFNSAIGKIQDSLSSTASALGKLQDVVNQNAQALNTLVKQLSSNFGAISSVLNDILSRLDPPEAEVQIDRLITGRLQSLQTYVTQQLIRAAEIRASANLAATKMSECVLGQSKRVDFCGKGYHLMSFPQSAPHGVVFLHVTYVPAQEKNFTTAPAICHDGKAHFPREGVFVSNGTHWFVTQRNFYEPQIITTDNTFVSGNCDVVIGIVNNTVYDPLQPELDSGGGGSDIDPYKEFGSSYQLLNFLPLDFFPDLNALVDTATALYEEELTGREHCSPHHTAIRQALVCWDELTKLIAWMSSNITSEQVRTIIVNHVNDTWGLKVRQSLWFHLSCLTFGQHTVQEFLVSFGVWIRTPAPYRPPNAPILSTLPEHTVIC

SEQ ID NO: 10765 - protein, 1301 aa, Artificial Sequence
  SARS-CoV-2/SARS-CoV-2/Yunnan-01/human/2020/CHN__MT049951.1 spike protein (1-1147)(K986P_V987P) WhcAg construct
MFVFLVLLPLVSSQCVNLTTRTQLPPANTNSFTRGVYYPDKVFRSSVLHSTQDLFLPFFSNVTWFHAIHVSGTNGTKRFDNPVLPFNDGVYFASTEKSNIIRGWIFGTTLDSKTQSLLIVNNATNVVIKVCEFQFCNDPFLGVYYHKNNKSWMESEFRVYSSANNCTFEYVSQPFLMDLEGKQGNFKNLREFVFKNIDGYFKIYSKHTPINLVRDLPQGFSALEPLVDLPIGINITRFQTLLALHRSYLTPGDSSSGWTAGAAAYYVGYLQPRTFLLKYNENGTITDAVDCALDPLSETKCTLKSFTVEKGIYQTSNFRVQPTESIVRFPNITNLCPFGEVFNATRFASVYAWNRKRISNCVADYSVLYNSASFSTFKCYGVSPTKLNDLCFTNVYADSFVIRGDEVRQIAPGQTGKIADYNYKLPDDFTGCVIAWNSNNLDSKVGGNYNYLYRLFRKSNLKPFERDISTEIYQAGSTPCNGVEGFNCYFPLQSYGFQPTNGVGYQPYRVVVLSFELLHAPATVCGPKKSTNLVKNKCVNFNFNGLTGTGVLTESNKKFLPFQQFGRDIADTTDAVRDPQTLEILDITPCSFGGVSVITPGTNTSNQVAVLYQDVNCTEVPVAIHADQLTPTWRVYSTGSNVFQTRAGCLIGAEHVNNSYECDIPIGAGICASYQTQTNSPRRARSVASQSIIAYTMSLGAENSVAYSNNSIAIPTNFTISVTTEILPVSMTKTSVDCTMYICGDSTECSNLLLQYGSFCTQLNRALTGIAVEQDKNTQEVFAQVKQIYKTPPIKDFGGFNFSQILPDPSKPSKRSFIEDLLFNKVTLADAGFIKQYGDCLGDIAARDLICAQKFNGLTVLPPLLTDEMIAQYTSALLAGTITSGWTFGAGAALQIPFAMQMAYRFNGIGVTQNVLYENQKLIANQFNSAIGKIQDSLSSTASALGKLQDVVNQNAQALNTLVKQLSSNFGAISSVLNDILSRLDPPEAEVQIDRLITGRLQSLQTYVTQQLIRAAEIRASANLAATKMSECVLGQSKRVDFCGKGYHLMSFPQSAPHGVVFLHVTYVPAQEKNFTTAPAICHDGKAHFPREGVFVSNGTHWFVTQRNFYEPQIITTDNTFVSGNCDVVIGIVNNTVYDPLQPELDSGGGGSDIDPYKEFGSSYQLLNFLPLDFFPDLNALVDTATALYEEELTGREHCSPHHTAIRQALVCWDELTKLIAWMSSNITSEQVRTIIVNHVNDTWGLKVRQSLWFHLSCLTFGQHTVQEFLVSFGVWIRTPAPYRPPNAPILSTLPEHTVIC

SEQ ID NO: 10766 - protein, 1301 aa, Artificial Sequence
  SARS-CoV-2/USA/WA-UW292/2020__EPI_ISL_418077 spike protein (1-1147)(K986P_V987P) WhcAg construct
MFVFLVLLPLVSSQCVNLTTRTQLPPAYTNSFTRGVYYPDKVFRSSVLHSTQDLFLPFFSNVTWFHAIHVSGTNGTKRFDNPVLPFNDGVYFASTEKSNIIRGWIFGTTLDSKTQSLLIVNNATNVVIKVCEFQFCNDPFLGVYYHKNNKSWMESEFRVYSSANNCTFEYVSQPFLMDLEGKQGNFKNLREFVFKNIDGYFKIYSKHTPINLVRDLPQGFSALEPLVDLPIGINITRFQTLLALHRSYLTPGDSSSGWTAGAAAYYVGYLQPRTFLLKYNENGTITDAVDCALDPLSETKCTLKSFTVEKGIYQTSNFRVQPTESIVRFPNITNLCPFGEVFNATRFASVYAWNRKRISNCVADYSVLYNSASFSTFKCYGVSPTKLNDLCFTNVYADSFVIRGDEVRQIAPGQTGKIADYNYKLPDDFTGCVIAWNSNNLDSKVGGNYNYLYRLFRKSNLKPFERDISTEIYQASSTPCNGVEGFNCYFPLQSYGFQPTNGVGYQPYRVVVLSFELLHAPATVCGPKKSTNLVKNKCVNFNFNGLTGTGVLTESNKKFLPFQQFGRDIADTTDAVRDPQTLEILDITPCSFGGVSVITPGTNTSNQVAVLYQDVNCTEVPVAIHADQLTPTWRVYSTGSNVFQTRAGCLIGAEHVNNSYECDIPIGAGICASYQTQTNSPRRARSVASQSIIAYTMSLGAENSVAYSNNSIAIPTNFTISVTTEILPVSMTKTSVDCTMYICGDSTECSNLLLQYGSFCTQLNRALTGIAVEQDKNTQEVFAQVKQIYKTPPIKDFGGFNFSQILPDPSKPSKRSFIEDLLFNKVTLADAGFIKQYGDCLGDIAARDLICAQKFNGLTVLPPLLTDEMIAQYTSALLAGTITSGWTFGAGAALQIPFAMQMAYRFNGIGVTQNVLYENQKLIANQFNSAIGKIQDSLSSTASALGKLQDVVNQNAQALNTLVKQLSSNFGAISSVLNDILSRLDPPEAEVQIDRLITGRLQSLQTYVTQQLIRAAEIRASANLAATKMSECVLGQSKRVDFCGKGYHLMSFPQSAPHGVVFLHVTYVPAQEKNFTTAPAICHDGKAHFPREGVFVSNGTHWFVTQRNFYEPQIITTDNTFVSGNCDVVIGIVNNTVYDPLQPELDSGGGGSDIDPYKEFGSSYQLLNFLPLDFFPDLNALVDTATALYEEELTGREHCSPHHTAIRQALVCWDELTKLIAWMSSNITSEQVRTIIVNHVNDTWGLKVRQSLWFHLSCLTFGQHTVQEFLVSFGVWIRTPAPYRPPNAPILSTLPEHTVIC

SEQ ID NO: 10767 - protein, 1301 aa, Artificial Sequence
  SARS-CoV-2/Iceland/192/2020__EPI_ISL_417819 spike protein (1-1147)(K986P_V987P) WhcAg construct
MFVFFVLLPLVSSQCVNLTTRTQLPPAYTNSFTRGVYYPDKVFRSSVLHSTQDLFLPFFSNVTWFHAIHVSGTNGTKRFDNPVLPFNDGVYFASTEKSNIIRGWIFGTTLDSKTQSLLIVNNATNVVIKVCEFQFCNDPFLGVYYHKNNKSWMESEFRVYSSANNCTFEYVSQPFLMDLEGKQGNFKNLREFVFKNIDGYFKIYSKHTPINLVRDLPQGFSALEPLVDLPIGINITRFQTLLALHRSYLTPGDSSSGWTAGAAAYYVGYLQPRTFLLKYNENGTITDAVDCALDPLSETKCTLKSFTVEKGIYQTSNFRVQPTESIVRFPNITNLCPFGEVFNATRFASVYAWNRKRISNCVADYSVLYNSASFSTFKCYGVSPTKLNDLCFTNVYADSFVIRGDEVRQIAPGQTGKIADYNYKLPDDFTGCVIAWNSNNLDSKVGGNYNYLYRLFRKSNLKPFERDISTEIYQAGSTPCNGVEGFNCYFPLQSYGFQPTNGVGYQPYRVVVLSFELLHAPATVCGPKKSTNLVKNKCVNFNFNGLTGTGVLTESNKKFLPFQQFGRDIADTTDAVRDPQTLEILDITPCSFGGVSVITPGTNTSNQVAVLYQGVNCTEVPVAIHADQLTPTWRVYSTGSNVFQTRAGCLIGAEHVNNSYECDIPIGAGICASYQTQTNSPRRARSVASQSIIAYTMSLGAENSVAYSNNSIAIPTNFTISVTTEILPVSMTKTSVDCTMYICGDSTECSNLLLQYGSFCTQLNRALTGIAVEQDKNTQEVFAQVKQIYKTPPIKDFGGFNFSQILPDPSKPSKRSFIEDLLFNKVTLADAGFIKQYGDCLGDIAARDLICAQKFNGLTVLPPLLTDEMIAQYTSALLAGTITSGWTFGAGAALQIPFAMQMAYRFNGIGVTQNVLYENQKLIANQFNSAIGKIQDSLSSTASALGKLQDVVNQNAQALNTLVKQLSSNFGAISSVLNDILSRLDPPEAEVQIDRLITGRLQSLQTYVTQQLIRAAEIRASANLAATKMSECVLGQSKRVDFCGKGYHLMSFPQSAPHGVVFLHVTYVPAQEKNFTTAPAICHDGKAHFPREGVFVSNGTHWFVTQRNFYEPQIITTDNTFVSGNCDVVIGIVNNTVYDPLQPELDSGGGGSDIDPYKEFGSSYQLLNFLPLDFFPDLNALVDTATALYEEELTGREHCSPHHTAIRQALVCWDELTKLIAWMSSNITSEQVRTIIVNHVNDTWGLKVRQSLWFHLSCLTFGQHTVQEFLVSFGVWIRTPAPYRPPNAPILSTLPEHTVIC

SEQ ID NO: 10768 - protein, 1301 aa, Artificial Sequence
  SARS-CoV-2/Belgium/ULG-6939/2020__EPI_ISL_417020 spike protein (1-1147)(K986P_V987P) WhcAg construct
MFVFLVLLPLVSSQCVNLTTRTQLPPAYTNSFTRGVYYPDKVFRSSVLHSTQDLFLPFFSNVTWFHAIHVSGTNGTKRFDNPVLPFNDGVYFASTEKSNIIRGWIFGTTLDSKTQSLLIVNNATNVVIKVCEFQFCNDPFLGVYYHKNNKSWMESEFRVYSSANNCTFEYVSQPFLMDLEGKQGNFKNLREFVFKNIDGYFKIYSKHTPINLVRDLPQGFSALEPLVDLPIGINITRFQTLLALHRSYLTPGDSSSGWTAGAAAYYVGYLQPRTFLLKYNENGTITDAVDCALDPLSETKCTLKSFTVEKGIYQTSNFRVQPTESIVRFPNITNLCPFGEVFNATRFASVYAWNRKRISNCVADYSVLYNSASFSTFKCYGVSPTKLNDLCFTNVYADSFVIRGDEVRQIAPGQTGKIADYNYKLPDDFTGCVIAWNSNNLDSKVGGNYNYLYRLFRKSNLKPFERDISTEIYQAGSTPCNGVEGFNCYFPLQSYGFQPTNGVGYQPYRVVVLSFELLHAPATVCGPKKSTNLVKNKCVNFNFNGLTGTGVLTESNKKFLPFQQFGRDIADTTDAVRDPQTLEILDITPCSFGGVSVITPGTNTSNQVAVLYQGVNCTEVPVAIHADQLTPTWRVYSTGSNVFQTRAGCLIGAEHVNNSYECDIPIGAGICASYQTQTNSPRRARSVASQSIIAYTMSLGAENSVVYSNNSIAIPTNFTISVTTEILPVSMTKTSVDCTMYICGDSTECSNLLLQYGSFCTQLNRALTGIAVEQDKNTQEVFAQVKQIYKTPPIKDFGGFNFSQILPDPSKPSKRSFIEDLLFNKVTLADAGFIKQYGDCLGDIAARDLICAQKFNGLTVLPPLLTDEMIAQYTSALLAGTITSGWTFGAGAALQIPFAMQMAYRFNGIGVTQNVLYENQKLIANQFNSAIGKIQDSLSSTASALGKLQDVVNQNAQALNTLVKQLSSNFGAISSVLNDILSRLDPPEAEVQIDRLITGRLQSLQTYVTQQLIRAAEIRASANLAATKMSECVLGQSKRVDFCGKGYHLMSFPQSAPHGVVFLHVTYVPAQEKNFTTAPAICHDGKAHFPREGVFVSNGTHWFVTQRNFYEPQIITTDNTFVSGNCDVVIGIVNNTVYDPLQPELDSGGGGSDIDPYKEFGSSYQLLNFLPLDFFPDLNALVDTATALYEEELTGREHCSPHHTAIRQALVCWDELTKLIAWMSSNITSEQVRTIIVNHVNDTWGLKVRQSLWFHLSCLTFGQHTVQEFLVSFGVWIRTPAPYRPPNAPILSTLPEHTVIC

SEQ ID NO: 10769 - protein, 1301 aa, Artificial Sequence
  SARS-CoV-2/France/HF2496/2020__EPI_ISL_418231 spike protein (1-1147)(K986P_V987P) WhcAg construct
MFVFLVLLPLVSSQCVNLTTRTQLPPAYTNSFTRGVYYPDKVFRSSVLHSTQDLFLPFFSNVTWFHAIHVSGTNGTKRFDNPVLPFNDGVYFASTEKSNIIRGWIFGTTLDSKTQSLLIVNNATNVVIKVCEFQFCNDPFLGVYYHKNNKSWMESEFRVYSSANNCTFEYVSQPFLMDLEGKQGNFKNLREFVFKNIDGYFKIYSKHTPINLVRDLPQGFSALEPLVDLPIGINITRFQTLLALHRSYLTPGDSSSGWTAGAAAYYVGYLQPRTFLLKYNENGTITDAVDCALDPLSETKCTLKSFTVEKGIYQTSNFRVQPTESIVRFPNITNLCPFGEVFNATRFASVYAWNRKRISNCVADYSVLYNSASFSTFKCYGVSPTKLNDLCFTNVYADSFVIRGDEVRQIAPGQTGKIADYNYKLPDDFTGCVIAWNSNNLDSKVGGNYNYLYRLFRKSNLKPFERDISTEIYQAGSTPCNGVEGFNCYFPLQSYGFQPTNGVGYQPYRVVVLSFELLHAPATVCGPKKSTNLVKNKCVNFNFNGLTGTGVLTESNKKFLPFQQFGRDIADTTDAVRDPQTLEILDITPCSFGGVSVITPGTNTSNQVAVLYQGVNCTEVPVAIHADQLTPTWRVYSTGSNVFQTRAGCLIGAEHVNNSYECDIPIGAGICASYQTQTNSPRRARSVASQSIIAYTMSLGAENSVAYSNNSIAIPTNFTISVTTEILPVSMTKTSVDCTMYICGDSTECSNLLLQYGSFCTQLNRALTGIAVEQDKNTQEVFAQVKQIYKTPPIKDFGGFNFSQILPDPSKPSKRSFIEDLLFNKVTLADAGFIKQYGDCLGDIVARDLICAQKFNGLTVLPPLLTDEMIAQYTSALLAGTITSGWTFGAGAALQIPFAMQMAYRFNGIGVTQNVLYENQKLIANQFNSAIGKIQDSLSSTASALGKLQDVVNQNAQALNTLVKQLSSNFGAISSVLNDILSRLDPPEAEVQIDRLITGRLQSLQTYVTQQLIRAAEIRASANLAATKMSECVLGQSKRVDFCGKGYHLMSFPQSAPHGVVFLHVTYVPAQEKNFTTAPAICHDGKAHFPREGVFVSNGTHWFVTQRNFYEPQIITTDNTFVSGNCDVVIGIVNNTVYDPLQPELDSGGGGSDIDPYKEFGSSYQLLNFLPLDFFPDLNALVDTATALYEEELTGREHCSPHHTAIRQALVCWDELTKLIAWMSSNITSEQVRTIIVNHVNDTWGLKVRQSLWFHLSCLTFGQHTVQEFLVSFGVWIRTPAPYRPPNAPILSTLPEHTVIC

SEQ ID NO: 10770 - protein, 1301 aa, Artificial Sequence
  SARS-CoV-2/USA/WA-UW291/2020__EPI_ISL_418076 spike protein (1-1147)(K986P_V987P) WhcAg construct
MFVFLVLLPLVSSQCVNLTTRTQLPPAYTNSFTRGVYYPDKVFRSSVLHSTQDLFLPFFSNVTWFHAIHVSGTNGTKRFDNPVLPFNDGVYFASTEKSNIIRGWIFGTTLDSKTQSLLIVNNATNVVIKVCEFQFCNDPFLGVYYHKNNKSWMESEFRVYSSANNCTFEYVSQPFLMDLEGKQGNFKNLREFVFKNIDGYFKIYSKHTPINLVRDLPQGFSALEPLVDLPIGINITRFQTLLALHRSYLTPGDSSSGWTAGAAAYYVGYLQPRTFLLKYNENGTITDAVDCALDPLSETKCTLKSFTVEKGIYQTSNFRVQPTESIVRFPNITNLCPFGEVFNATRFASVYAWNRKRISNCVADYSVLYNSASFSTFKCYGVSPTKLNDLCFTNVYADSFVIRGDEVRQIAPGQTGKIADYNYKLPDDFTGCVIAWNSNNLDSKVGGNYNYLYRLFRKSNLKPFERDISTEIYQAGSTPCNGVEGFNCYFPLQSYGFQPTNGVGYQPYRVVVLSFELLHAPATVCGPKKSTNLVKNKCVNFNFNGLTGTGVLTESNKKFLPFQQFGRDIADTTDAVRDPQTLEILDITPCSFGGVSVITPGTNTSNQVAVLYQGVNCTEVPVAIHADQLTPTWRVYSTGSNVFQTRAGCLIGAEHVNNSYECDIPIGAGICASYQTQTNSPRRARSVASQSIIAYTMSLGAENSVAYSNNSIAIPTNFTISVTTEILPVSMTKTSVDCTMYICGDSTECSNLLLQYGSFCTQLNRALTGIAVEQDKNTQEVFAQVKQIYKTPPIKDFGGFNFSQILPDPSKPSKRSFIEDLLFNKVTLADAGFIKQYGDCLGDIAARDLICAQKFNGLTVLPPLLTDEMIAQYTSALLAGTITSGWTFGAGAALQIPFAMQMAYRFNGIGVTQNVLYENQKLIANQFNSAIGKIQYSLSSTASALGKLQDVVNQNAQALNTLVKQLSSNFGAISSVLNDILSRLDPPEAEVQIDRLITGRLQSLQTYVTQQLIRAAEIRASANLAATKMSECVLGQSKRVDFCGKGYHLMSFPQSAPHGVVFLHVTYVPAQEKNFTTAPAICHDGKAHFPREGVFVSNGTHWFVTQRNFYEPQIITTDNTFVSGNCDVVIGIVNNTVYDPLQPELDSGGGGSDIDPYKEFGSSYQLLNFLPLDFFPDLNALVDTATALYEEELTGREHCSPHHTAIRQALVCWDELTKLIAWMSSNITSEQVRTIIVNHVNDTWGLKVRQSLWFHLSCLTFGQHTVQEFLVSFGVWIRTPAPYRPPNAPILSTLPEHTVIC

SEQ ID NO: 10771 - protein, 1301 aa, Artificial Sequence; identical to SEQ ID NO: 10734
  SARS-CoV-2/Portugal/PT0034/2020__EPI_ISL_418019 spike protein (1-1147)(K986P_V987P) WhcAg construct

SEQ ID NO: 10772 - protein, 1301 aa, Artificial Sequence; identical to SEQ ID NO: 10726
  SARS-CoV-2/Iceland/202/2020__EPI_ISL_417750 spike protein (1-1147)(K986P_V987P) WhcAg construct

SEQ ID NO: 10773 - protein, 1301 aa, Artificial Sequence
  SARS-CoV-2/USA/WA-UW261/2020__EPI_ISL_418046 spike protein (1-1147)(K986P_V987P) WhcAg construct
MFVFLVLLPLVSSQCVNLTTRTQLPPAYTNSFTRGVYYPDKVFRSSVLHSTQDLFLPFFSNVTWFHAIHVSGTNGTKRFDNPVLPFNDGVYFASTEKSNIIRGWIFGTTLDSKTQSLLIVNNATNVVIKVCEFQFCNDPFLGVYYHKNNKSWMESEFRVYSSANNCTFEYVSQPFLMDLEGKQGNFKNLREFVFKNIDGYFKIYSKHTPINLVRDLPQGFSALEPLVDLPIGINITRFQTLLALHRSYLTPGDSSSGWTAGAAAYYVGYLQPRTFLLKYNENGTITDAVDCALDPLSETKCTLKSFTVEKGIYQTSNFRVQPTESIVRFPNITNLCPFGEVFNATRFTSVYAWNRKRISNCVADYSVLYNSASFSTFKCYGVSPTKLNDLCFTNVYADSFVIRGDEVRQIAPGQTGKIADYNYKLPDDFTGCVIAWNSNNLDSKVGGNYNYLYRLFRKSNLKPFERDISTEIYQAGSTPCNGVEGFNCYFPLQSYGFQPTNGVGYQPYRVVVLSFELLHAPATVCGPKKSTNLVKNKCVNFNFNGLTGTGVLTESNKKFLPFQQFGRDIADTTDAVRDPQTLEILDITPCSFGGVSVITPGTNTSNQVAVLYQDVNCTEVPVAIHADQLTPTWRVYSTGSNVFQTRAGCLIGAEHVNNSYECDIPIGAGICASYQTQTNSPRRARSVASQSIIAYTMSLGAENSVAYSNNSIAIPTNFTISVTTEILPVSMTKTSVDCTMYICGDSTECSNLLLQYGSFCTQLNRALTGIAVEQDKNTQEVFAQVKQIYKTPPIKDFGGFNFSQILPDPSKPSKRSFIEDLLFNKVTLADAGFIKQYGDCLGDIAARDLICAQKFNGLTVLPPLLTDEMIAQYTSALLAGTITSGWTFGAGAALQIPFAMQMAYRFNGIGVTQNVLYENQKLIANQFNSAIGKIQDSLSSTASALGKLQDVVNQNAQALNTLVKQLSSNFGAISSVLNDILSRLDPPEAEVQIDRLITGRLQSLQTYVTQQLIRAAEIRASANLAATKMSECVLGQSKRVDFCGKGYHLMSFPQSAPHGVVFLHVTYVPAQEKNFTTAPAICHDGKAHFPREGVFVSNGTHWFVTQRNFYEPQIITTDNTFVSGNCDVVIGIVNNTVYDPLQPELDSGGGGSDIDPYKEFGSSYQLLNFLPLDFFPDLNALVDTATALYEEELTGREHCSPHHTAIRQALVCWDELTKLIAWMSSNITSEQVRTIIVNHVNDTWGLKVRQSLWFHLSCLTFGQHTVQEFLVSFGVWIRTPAPYRPPNAPILSTLPEHTVIC

SEQ ID NO: 10774 - protein, 1301 aa, Artificial Sequence
  SARS-CoV-2/Portugal/PT0035/2020__EPI_ISL_418020 spike protein (1-1147)(K986P_V987P) WhcAg construct
MFVFLVLLPLVSSQCVNLTTRTQLPPAYTNSFTRGVYYPDKVFRSSVLHSTQDLFLPFFSNVTWFHAIHVSGTNGTKRFDNPVLPFNDGVYFASTEKSNIIRGWIFGTTLDSKTQSLLIVNNATNVVIKVCEFQFCNDPFLGVYYHKNNKSWMESEFRVYSSANNCTFEYVSQPFLMDLEGKQGNFKNLREFVFKNIDGYFKIYSKHTPINLVRDLPQGFSALEPLVDLPIGINITRFQTLLALHRSYLTPGDSSSGWTAGAAAYYVGYLQPRTFLLKYNENGTITDAVDCALDPLSETKCTLKSFTVEKGIYQTSNFRVQPTESIVRFPNITNLCPFGEVFNATRFASVYAWNRKRISNCVADYSVLYNSASFSTFKCYGVSPTKLNDLCFTNVYADSFVIRGDEVRQIAPGQTGKIADYNYKLPDDFTGCVIAWNSNNLDSKVGGNYNYLYRLFRKSNLKPFERDISTEIYQAGSTPCNGVEGFNCYFPLQSYGFQPTNGVGYQPYRVVVLSFELLHAPATVCGPKKSTNLVKNKCVNFNFNGLTGTGVLTESNKKFLPFQQFGRDIADTTDAVRDPQTLEILDITPCSFGGVSVITPGTNTSNQVAVLYQDVNCTEVPVAIHADQLTPTWRVYSTGSNVFQTRAGCLIGAEHVNNSYECDIPIGAGICASYQTQTNSPRRARSVASQSIIAYTMSLGAENSVAYSNNSIAIPTNFTISVTTEILPVSMTKTSVDCTMYICGDSTECSNLLLQYGSFCTQLNRALTGIAVEQDKNTQEVFAQVKQIYKTPPIKDFGGFNFSQILPDPSKPSKRSFIEDLLFNKVTLADAGFIKQYGDCLGDISARDLICAQKFNGLTVLPPLLTDEMIAQYTSALLAGTITSGWTFGAGAALQIPFAMQMAYRFNGIGVTQNVLYENQKLIANQFNSAIGKIQDSLSSTASALGKLQDVVNQNAQALNTLVKQLSSNFGAISSVLNDILSRLDPPEAEVQIDRLITGRLQSLQTYVTQQLIRAAEIRASANLAATKMSECVLGQSKRVDFCGKGYHLMSFPQSAPHGVVFLHVTYVPAQEKNFTTAPAICHDGKAHFPREGVFVSNGTHWFVTQRNFYEPQIITTDNTFVSGNCDVVIGIVNNTVYDPLQPELDSGGGGSDIDPYKEFGSSYQLLNFLPLDFFPDLNALVDTATALYEEELTGREHCSPHHTAIRQALVCWDELTKLIAWMSSNITSEQVRTIIVNHVNDTWGLKVRQSLWFHLSCLTFGQHTVQEFLVSFGVWIRTPAPYRPPNAPILSTLPEHTVIC

SEQ ID NO: 10775 - protein, 1301 aa, Artificial Sequence
  SARS-CoV-2/USA/NY-NYUMC7/2020__EPI_ISL_418192 spike protein (1-1147)(K986P_V987P) WhcAg construct
MFVFLVLLPLVSSQCVNLTTRTQLPPAYTNSFTRGVYYPDKVFRSSVLHSTQDLFLPFFSNVTWFHAIHVSGTNGTKRFDNPVLPFNDGVYFASTEKSNIIRGWIFGTTLDSKTQSLLIVNNATNVVIKVCEFQFCNDPFLGVYHHKNNKSWMESEFRVYSSANNCTFEYVSQPFLMDLEGKQGNFKNLREFVFKNIDGYFKIYSKHTPINLVRDLPQGFSALEPLVDLPIGINITRFQTLLALHRSYLTPGDSSSGWTAGAAAYYVGYLQPRTFLLKYNENGTITDAVDCALDPLSETKCTLKSFTVEKGIYQTSNFRVQPTESIVRFPNITNLCPFGEVFNATRFASVYAWNRKRISNCVADYSVLYNSASFSTFKCYGVSPTKLNDLCFTNVYADSFVIRGDEVRQIAPGQTGKIADYNYKLPDDFTGCVIAWNSNNLDSKVGGNYNYLYRLFRKSNLKPFERDISTEIYQAGSTPCNGVEGFNCYFPLQSYGFQPTNGVGYQPYRVVVLSFELLHAPATVCGPKKSTNLVKNKCVNFNFNGLTGTGVLTESNKKFLPFQQFGRDIADTTDAVRDPQTLEILDITPCSFGGVSVITPGTNTSNQVAVLYQGVNCTEVPVAIHADQLTPTWRVYSTGSNVFQTRAGCLIGAEHVNNSYECDIPIGAGICASYQTQTNSPRRARSVASQSIIAYTMSLGAENSVAYSNNSIAIPTNFTISVTTEILPVSMTKTSVDCTMYICGDSTECSNLLLQYGSFCTQLNRALTGIAVEQDKNTQEVFAQVKQIYKTPPIKDFGGFNFSQILPDPSKPSKRSFIEDLLFNKVTLADAGFIKQYGDCLGDIAARDLICAQKFNGLTVLPPLLTDEMIAQYTSALLAGTITSGWTFGAGAALQIPFAMQMAYRFNGIGVTQNVLYENQKLIANQFNSAIGKIQDSLSSTASALGKLQDVVNQNAQALNTLVKQLSSNFGAISSVLNDILSRLDPPEAEVQIDRLITGRLQSLQTYVTQQLIRAAEIRASANLAATKMSECVLGQSKRVDFCGKGYHLMSFPQSAPHGVVFLHVTYVPAQEKNFTTAPAICHDGKAHFPREGVFVSNGTHWFVTQRNFYEPQIITTDNTFVSGNCDVVIGIVNNTVYDPLQPELDSGGGGSDIDPYKEFGSSYQLLNFLPLDFFPDLNALVDTATALYEEELTGREHCSPHHTAIRQALVCWDELTKLIAWMSSNITSEQVRTIIVNHVNDTWGLKVRQSLWFHLSCLTFGQHTVQEFLVSFGVWIRTPAPYRPPNAPILSTLPEHTVIC

SEQ ID NO: 10776 - protein, 1301 aa, Artificial Sequence
  SARS-CoV-2/Iceland/189/2020__EPI_ISL_417709 spike protein (1-1147)(K986P_V987P) WhcAg construct
MFVFLVLLPLVSSQCVNLTTRTQLPPAYTNSFTRGVYYPDKVFRSSVLHSTQDLFLPFFSNVTWFHAIHVSGTNGTKRFDNPVLPFNDGVYFASTEKSNIIRGWIFGTTLDSKTQSLLIVNNATNVVIKVCEFQFCNDPFLGVYYHKNNKSWMESEFRVYSSANNCTFEYVSQPFLMDLEGKQGNFKNLREFVFKNIDGYFKIYSKHTPINLVRDLPQGFSALEPLVDLPIGINITRFQTLLALHRSYLTPGDSSSGWTAGAAAYYVGYLQPRTFLLKYNENGTITDAVDCALDPLSETKCTLKSFTVEKGIYQTSNFRVQPTESIVRFPNITNLCPFGEVFNATRFASVYAWNRKRISNCVADYSVLYNSASFSTFKCYGVSPTKLNDLCFTNVYADSFVIRGDEVRQIAPGQTGKIADYNYKLPDDFTGCVIAWNSNNLDSKVGGNYNYLYRLFRKSNLKPFERDISTEIYQAGSTPCNGVEGFNCYFPLQSYGFQPTNGVGYQPYRVVVLSFELLHAPATVCGPKKSTNLVKNKCVNFNFNGLTGTGVLTESNKKFLPFQQFGRDIADTTDAVRDPQTLEILDITPCSFGGVSVITPGTNTSNQVAVLYQGVNCTEVPVAIHADQLTPTWRVYSTGSNVFQTRAGCLIGAEHVNNSYECDIPIGAGICASYQTQTNSPRRARSVASQSIIAYTMSLGAENSVAYSNNSIAIPTNFTISVTTEILPVSMTKTSVDCTMYICGDSTECSNLLLQYGSFCTQLNRALTGIAVEQDKNTQEVFAQVKQIYKTPPIKDFGGFNFSQILPDPSKPSKRSFIEDLLFNKVTLADAGFTKQYGDCLGDIAARDLICAQKFNGLTVLPPLLTDEMIAQYTSALLAGTITSGWTFGAGAALQIPFAMQMAYRFNGIGVTQNVLYENQKLIANQFNSAIGKIQDSLSSTASALGKLQDVVNQNAQALNTLVKQLSSNFGAISSVLNDILSRLDPPEAEVQIDRLITGRLQSLQTYVTQQLIRAAEIRASANLAATKMSECVLGQSKRVDFCGKGYHLMSFPQSAPHGVVFLHVTYVPAQEKNFTTAPAICHDGKAHFPREGVFVSNGTHWFVTQRNFYEPQIITTDNTFVSGNCDVVIGIVNNTVYDPLQPELDSGGGGSDIDPYKEFGSSYQLLNFLPLDFFPDLNALVDTATALYEEELTGREHCSPHHTAIRQALVCWDELTKLIAWMSSNITSEQVRTIIVNHVNDTWGLKVRQSLWFHLSCLTFGQHTVQEFLVSFGVWIRTPAPYRPPNAPILSTLPEHTVIC

SEQ ID NO: 10777 - protein, 1301 aa, Artificial Sequence
  SARS-CoV-2/Australia/NSW56/2020__EPI_ISL_417408 spike protein (1-1147)(K986P_V987P) WhcAg construct
MFVFLVLLPLVSSQCVNLTTRTQLPPAYTNSFTRGVYYPDKVFRSSVLHSTQDLFLPFFSNVTWFHAIHVSGTNGTKRFDNPVLPFNDGVYFASTEKSNIIRGWIFGTTLDSKTQSLLIVNNATNVVIKVCEFQFCNDPFLGVYYHKNNKSWMESEFRVYSSANNCTFEYVSQPFLMDLEGKQGNFKNLREFVFKNIDGYFKIYSKHTPINLVRDLPQGFSALEPLVDLPIGINITRFQTLLALHRSYLTPGDSSSGWTAGAAAYYVGYLQPRTFLLKYNENGTITDAVDCALDPLSETKCTLKSFTVEKGIYQTSNFRVQPTESIVRFPNITNLCPFGEVFNATRFASVYAWNRKRISNCVADYSVLYNSASFSTFKCYGVSPTKLNDLCFTNVYADSFVIRGDEVRQIAPGQTGKIADYNYKLPDDFTGCVIAWNSNNLDSKVGGNYNYLYRLFRKSNLKPFERDISTEIYQAGSTPCNGVEGFNCYFPLQSYGFQPTNGVGYQPYRVVVLSFELLHAPATVCGPKKSTNLVKNKCVNFNFNGLTGTGVLTESNKKFLPFQQFGRDIADTTDAVRDPQTLEILDITPCSFGGVSVITPGTNTSNQVAVLYQDVNCTEVPVAIHADQLTPTWRVYSTGSNVFQTRAGCLIGAEHVNNSYECDIPIGAGICASYQTQTNSPRRARSVASQSIIAYTMSLGAENSVAYSNNSIAIPTNFTISVTTEILPVSMTKTSVDCTMYICGDSTECSNLLLQYGSFCTQLNRALTGIAVEQDKNTQEVFAQVKQIYKTPPIKDFGGFNFSQILPDSSKPSKRSFIEDLLFNKVTLADAGFIKQYGDCLGDIAARDLICAQKFNGLTVLPPLLTDEMIAQYTSALLAGTITSGWTFGAGAALQIPFAMQMAYRFNGIGVTQNVLYENQKLIANQFNSAIGKIQDSLSSTASALGKLQDVVNQNAQALNTLVKQLSSNFGAISSVLNDILSRLDPPEAEVQIDRLITGRLQSLQTYVTQQLIRAAEIRASANLAATKMSECVLGQSKRVDFCGKGYHLMSFPQSAPHGVVFLHVTYVPAQEKNFTTAPAICHDGKAHFPREGVFVSNGTHWFVTQRNFYEPQIITTDNTFVSGNCDVVIGIVNNTVYDPLQPELDSGGGGSDIDPYKEFGSSYQLLNFLPLDFFPDLNALVDTATALYEEELTGREHCSPHHTAIRQALVCWDELTKLIAWMSSNITSEQVRTIIVNHVNDTWGLKVRQSLWFHLSCLTFGQHTVQEFLVSFGVWIRTPAPYRPPNAPILSTLPEHTVIC

SEQ ID NO: 10778 - protein, 1301 aa, Artificial Sequence
  SARS-CoV-2/Iceland/280/2020__EPI_ISL_417608 spike protein (1-1147)(K986P_V987P) WhcAg construct
MFVFLVLLPLVSSQCVNLTTRTQLPPAYTNSFTRGVYYPDKVFRSSVLHSTQDLFLPFFSNVTWFHAIHVSGTNGTKRFDNPVLPFNDGVYFASTEKSNIIRGWIFGTTLDSKTQSLLIVNNATNVVIKVCEFQFCNDPFLGVYYHKNNKSWMESEFRVYSSANNCTFEYVSQPFLMDLEGKQGNFKNLREFVFKNIDGYFKIYSKHTPINLVRDLPQGFSALEPLVDLPIGINITRFQTLLALHRSYLTPGDSSSGWTAGAAAYYVGYLQPRTFLLKYNENGTITDAVDCALDPLSETKCTLKSFTVEKGIYQTSNFRVQPTESIVRFPNITNLCPFGEVFNATRFASVYAWNRKRISNCVADYSVLYNSASFSTFKCYGVSPTKLNDLCFTNVYADSFVIRGDEVRQIAPGQTGKIADYNYKLPDDFTGCVIAWNSNNLDSKVGGNYNYLYRLFRKSNLKPFERDISTEIYQAGSTPCNGVEGFNCYFPLQSYGFQPTNGVGYQPYRVVVLSFELLHAPATVCGPKKSTNLVKNKCVNFNFNGLTGTGVLTESNKKFLPFQQFGRDIADTTDAVRDPQTLEILDITPCSFGGVSVITPGTNTSNQVAVLYQGVNCTEVPVAIHADQLTPTWRVYSTGSNVFQTRAGCLIGAEHVNNSYECDIPIGAGICASYHTQTNSPRRARSVASQSIIAYTMSLGAENSVAYSNNSIAIPTNFTISVTTEILPVSMTKTSVDCTMYICGDSTECSNLLLQYGSFCTQLNRALTGIAVEQDKNTQEVFAQVKQIYKTPPIKDFGGFNFSQILPDPSKPSKRSFIEDLLFNKVTLADAGFIKQYGDCLGDIAARDLICAQKFNGLTVLPPLLTDEMIAQYTSALLAGTITSGWTFGAGAALQIPFAMQMAYRFNGIGVTQNVLYENQKLIANQFNSAIGKIQDSLSSTASALGKLQDVVNQNAQALNTLVKQLSSNFGAISSVLNDILSRLDPPEAEVQIDRLITGRLQSLQTYVTQQLIRAAEIRASANLAATKMSECVLGQSKRVDFCGKGYHLMSFPQSAPHGVVFLHVTYVPAQEKNFTTAPAICHDGKAHFPREGVFVSNGTHWFVTQRNFYEPQIITTDNTFVSGNCDVVIGIVNNTVYDPLQPELDSGGGGSDIDPYKEFGSSYQLLNFLPLDFFPDLNALVDTATALYEEELTGREHCSPHHTAIRQALVCWDELTKLIAWMSSNITSEQVRTIIVNHVNDTWGLKVRQSLWFHLSCLTFGQHTVQEFLVSFGVWIRTPAPYRPPNAPILSTLPEHTVIC

SEQ ID NO: 10779 - protein, 1301 aa, Artificial Sequence; identical to SEQ ID NO: 10734
  SARS-CoV-2/Iceland/247/2020__EPI_ISL_417575 spike protein (1-1147)(K986P_V987P) WhcAg construct

SEQ ID NO: 10780 - protein, 1301 aa, Artificial Sequence
  SARS-CoV-2/Iceland/238/2020__EPI_ISL_417566 spike protein (1-1147)(K986P_V987P) WhcAg construct
MFVFLVLLPLVSSQCVNLTTRTQLPPAYTNSFTRGVYYPDKVFRSSVLHSTQDLFLPFFSNVTWFHAIHVSGTNGTKRFDNPVLPFNDGVYFASTEKSNIIRGWIFGTTLDSKTQSLLIVNNATNVVIKVCEFQFCNDPFLGVYYHKNNKSWMESEFRVYSSANNCTFEYVSQPFLMDLEGKQGNFKNLREFVFKNIDGYFKIYSKHTPINLVRDLPQGFSALEPLVDLPIGINITRFQTLLALHRSYLTPGDSSSGWTAGAAAYYVGYLQPRTFLLKYNENGTITDAVDCALDPLSETKCTLKSFTVEKGIYQTSNFRVQPTESIVRFPNITNLCPFGEVFNATRFASVYAWNRKRISNCVADYSVLYNSASFSTFKCYGVSPTKLNDLCFTNVYADSFVIRGDEVRQIAPGQTGKIADYNYKLPDDFTGCVIAWNSNNLDSKVGGNYNYLYRLFRKSNLKPFERDISTEIYQAGSTPCNGVEGFNCYFPLQSYGFQPTNGVGYQPYRVVVLSFELLHAPATVCGPKKSTNLVKNKCVNFNFNGLTGTGVLTESNKKFLPFQQFGRDIADTTDAVRDPQTLEILDITPCSFGGVSVITPGTNTSNQVAVLYQGVNCTEVPVAIHADQLTPTWRVYSTGSNVFQTRAGCLIGAEHVNNSYECDIPIGAGICASYQTQTNSPRRARSVASQSIIAYTMSLGAENSVAYSNNSIAIPTNFTISVTTEILPVSMTKTSVDCTMYICGDSTECSNLLLQYGSFCTQLNRALTGIAVEQDKNTQEVFAQVKQIYKTPPIKDFGGFNFSQILPDPSKPSKRSFIEDLLFNKVTLADVGFIKQYGDCLGDIAARDLICAQKFNGLTVLPPLLTDEMIAQYTSALLAGTITSGWTFGAGAALQIPFAMQMAYRFNGIGVTQNVLYENQKLIANQFNSAIGKIQDSLSSTASALGKLQDVVNQNAQALNTLVKQLSSNFGAISSVLNDILSRLDPPEAEVQIDRLITGRLQSLQTYVTQQLIRAAEIRASANLAATKMSECVLGQSKRVDFCGKGYHLMSFPQSAPHGVVFLHVTYVPAQEKNFTTAPAICHDGKAHFPREGVFVSNGTHWFVTQRNFYEPQIITTDNTFVSGNCDVVIGIVNNTVYDPLQPELDSGGGGSDIDPYKEFGSSYQLLNFLPLDFFPDLNALVDTATALYEEELTGREHCSPHHTAIRQALVCWDELTKLIAWMSSNITSEQVRTIIVNHVNDTWGLKVRQSLWFHLSCLTFGQHTVQEFLVSFGVWIRTPAPYRPPNAPILSTLPEHTVIC

SEQ ID NO: 10781 - protein, 1301 aa, Artificial Sequence
  SARS-CoV-2/Greece/16/2020__EPI_ISL_418265 spike protein (1-1147)(K986P_V987P) WhcAg construct
MFVFLVLLPLVSSQCVNLTTRTQLPPAYTNSFTRGVYYPDKVFRSSVLHSTQDLFLPFFSNVTWFHAIHVSGTNGTKRFDNPVLPFNDGVYFASTEKSNIIRGWIFGTTLDSKTQSLLIVNNATNVVIKVCEFQFCNDPFLGVYYHKNNKSWMESEFRVYSSANNCTFEYVSQPFLMDLEGKQGNFKNLREFVFKNVDGYFKIYSKHTPINLVRDLPQGFSALEPLVDLPIGINITRFQTLLALHRSYLTPGDSSSGWTAGAAAYYVGYLQPRTFLLKYNENGTITDAVDCALDPLSETKCTLKSFTVEKGIYQTSNFRVQPTESIVRFPNITNLCPFGEVFNATRFASVYAWNRKRISNCVADYSVLYNSASFSTFKCYGVSPTKLNDLCFTNVYADSFVIRGDEVRQIAPGQTGKIADYNYKLPDDFTGCVIAWNSNNLDSKVGGNYNYLYRLFRKSNLKPFERDISTEIYQAGSTPCNGVEGFNCYFPLQSYGFQPTNGVGYQPYRVVVLSFELLHAPATVCGPKKSTNLVKNKCVNFNFNGLTGTGVLTESNKKFLPFQQFGRDIADTTDAVRDPQTLEILDITPCSFGGVSVITPGTNTSNQVAVLYQDVNCTEVPVAIHADQLTPTWRVYSTGSNVFQTRAGCLIGAEHVNNSYECDIPIGAGICASYQTQTNSPRRARSVASQSIIAYTMSLGAENSVAYSNNSIAIPTNFTISVTTEILPVSMTKTSVDCTMYICGDSTECSNLLLQYGSFCTQLNRALTGIAVEQDKNTQEVFAQVKQIYKTPPIKDFGGFNFSQILPDPSKPSKRSFIEDLLFNKVTLADAGFIKQYGDCLGDIAARDLICAQKFNGLTVLPPLLTDEMIAQYTSALLAGTITSGWTFGAGAALQIPFAMQMAYRFNGIGVTQNVLYENQKLIANQFNSAIGKIQDSLSSTASALGKLQDVVNQNAQALNTLVKQLSSNFGAISSVLNDILSRLDPPEAEVQIDRLITGRLQSLQTYVTQQLIRAAEIRASANLAATKMSECVLGQSKRVDFCGKGYHLMSFPQSAPHGVVFLHVTYVPAQEKNFTTAPAICHDGKAHFPREGVFVSNGTHWFVTQRNFYEPQIITTDNTFVSGNCDVVIGIVNNTVYDPLQPELDSGGGGSDIDPYKEFGSSYQLLNFLPLDFFPDLNALVDTATALYEEELTGREHCSPHHTAIRQALVCWDELTKLIAWMSSNITSEQVRTIIVNHVNDTWGLKVRQSLWFHLSCLTFGQHTVQEFLVSFGVWIRTPAPYRPPNAPILSTLPEHTVIC

SEQ ID NO: 10782 - protein, 1301 aa, Artificial Sequence
  SARS-CoV-2/Iceland/319/2020__EPI_ISL_417648 spike protein (1-1147)(K986P_V987P) WhcAg construct
MFVFLVLLPLVSSQCVNLTTRTQLPPAYTNSFTRGVYYPDKVFRSSVLHSTQDLFLPFFSNVTWFHAIHVSGTNGTKRFDNPVLPFNDGVYFASTEKSNIIRGWIFGTTLDSKTQSLLIVNNATNVVIKVCEFQFCNDPFLGVYYHKNNKSWMESEFRVYSSANNCTFEYVSQPFLIDLEGKQGNFKNLREFVFKNIDGYFKIYSKHTPINLVRDLPQGFSALEPLVDLPIGINITRFQTLLALHRSYLTPGDSSSGWTAGAAAYYVGYLQPRTFLLKYNENGTITDAVDCALDPLSETKCTLKSFTVEKGIYQTSNFRVQPTESIVRFPNITNLCPFGEVFNATRFASVYAWNRKRISNCVADYSVLYNSASFSTFKCYGVSPTKLNDLCFTNVYADSFVIRGDEVRQIAPGQTGKIADYNYKLPDDFTGCVIAWNSNNLDSKVGGNYNYLYRLFRKSNLKPFERDISTEIYQAGSTPCNGVEGFNCYFPLQSYGFQPTNGVGYQPYRVVVLSFELLHAPATVCGPKKSTNLVKNKCVNFNFNGLTGTGVLTESNKKFLPFQQFGRDIADTTDAVRDPQTLEILDITPCSFGGVSVITPGTNTSNQVAVLYQGVNCTEVPVAIHADQLTPTWRVYSTGSNVFQTRAGCLIGAEHVNNSYECDIPIGAGICASYQTQTNSPRRARSVASQSIIAYTMSLGAENSVAYSNNSIAIPTNFTISVTTEILPVSMTKTSVDCTMYICGDSTECSNLLLQYGSFCTQLNRALTGIAVEQDKNTQEVFAQVKQIYKTPPIKDFGGFNFSQILPDPSKPSKRSFIEDLLFNKVTLADAGFIKQYGDCLGDIAARDLICAQKFNGLTVLPPLLTDEMIAQYTSALLAGTITSGWTFGAGAALQIPFAMQMAYRFNGIGVTQNVLYENQKLIANQFNSAIGKIQDSLSSTASALGKLQDVVNQNAQALNTLVKQLSSNFGAISSVLNDILSRLDPPEAEVQIDRLITGRLQSLQTYVTQQLIRAAEIRASANLAATKMSECVLGQSKRVDFCGKGYHLMSFPQSAPHGVVFLHVTYVPAQEKNFTTAPAICHDGKAHFPREGVFVSNGTHWFVTQRNFYEPQIITTDNTFVSGNCDVVIGIVNNTVYDPLQPELDSGGGGSDIDPYKEFGSSYQLLNFLPLDFFPDLNALVDTATALYEEELTGREHCSPHHTAIRQALVCWDELTKLIAWMSSNITSEQVRTIIVNHVNDTWGLKVRQSLWFHLSCLTFGQHTVQEFLVSFGVWIRTPAPYRPPNAPILSTLPEHTVIC

SEQ ID NO: 10783 - protein, 1301 aa, Artificial Sequence
  SARS-CoV-2/Congo/94/2020__EPI_ISL_417947 spike protein (1-1147)(K986P_V987P) WhcAg construct
MFVFLVLLPLVSSQCVNLTTRTQLPPAYTNSFTRGVYYPDKVFRSSVLHSTQDLFLPFFSNVTWFHAIHVSGTNGTKRFDNPVLPFNDGVYFASTEKSNIIRGWIFGTTLDSKTQSLLIVNNATNVVIKVCEFQFCNDPFLGVYYHKNNKSWMESEFRVYSSANNCTFEYVSQPFLMDLEGKQGNFKNLREFVFKNIDGYFKIYSKHTPINLVRDLPQGFSALEPLVDLPIGINITRFQTLLALHRSYLTPGDSSSGWTAGAAAYYVGYLQPRTFLLKYNENGTITDAVDCALDPLSETKCTLKSFTVEKGIYQTSNFRVQPTESIVRFPNITNLCPFGEVFNATRFASVYAWNRKRISNCVADYSVLYNSASFSTFKCYGVSPTKLNDLCFTNVYADSFVIRGDEVRQIAPGQTGKIADYNYKLPDDFTGCVIAWNSNNLDSKVGGNYNYLYRLFRKSNLKPFERDISTEIYQAGSTPCNGVEGFNCYFPLQSYGFQPTNGVGYQPYRVVVLSFELLHAPATVCGPKKSTNLVKNKCVNFNFNGLTGTGVLTESNKKFLPFQQFGRDIADTTDAVRDPQTLEILDITPCSFGGVSVITPGTNTSNQVAVLYQGVNCTEVPVAIHADQLTPTWRVYSTGSNVFQTRAGCLIGAEHVNNSYECDIPIGAGICASYQTQTNSPRRARSVASQSIIAYTMSLGAENSVAYSNNSIAIPTNFTISVTTEILPVSMTKTSVDCTMYICGDSTECSNLLLQYGSFCTQLNRALTGIAVEQDKNTQEVFAQVKQIYKTPPIKDFGGFNFSQILPDPSKPSKRSFIEDILFNKVTLADAGFIKQYGDCLGDIAARDLICAQKFNGLTVLPPLLTDEMIAQYTSALLAGTITSGWTFGAGAALQIPFAMQMAYRFNGIGVTQNVLYENQKLIANQFNSAIGKIQDSLSSTASALGKLQDVVNQNAQALNTLVKQLSSNFGAISSVLNDILSRLDPPEAEVQIDRLITGRLQSLQTYVTQQLIRAAEIRASANLAATKMSECVLGQSKRVDFCGKGYHLMSFPQSAPHGVVFLHVTYVPAQEKNFTTAPAICHDGKAHFPREGVFVSNGTHWFVTQRNFYEPQIITTDNTFVSGNCDVVIGIVNNTVYDPLQPELDSGGGGSDIDPYKEFGSSYQLLNFLPLDFFPDLNALVDTATALYEEELTGREHCSPHHTAIRQALVCWDELTKLIAWMSSNITSEQVRTIIVNHVNDTWGLKVRQSLWFHLSCLTFGQHTVQEFLVSFGVWIRTPAPYRPPNAPILSTLPEHTVIC

SEQ ID NO: 10784 - protein, 1301 aa, Artificial Sequence
  SARS-CoV-2/Congo/158/2020__EPI_ISL_417950 spike protein (1-1147)(K986P_V987P) WhcAg construct
MFVFLVLLPLVSSQCVNLTTRTQLPPAYTNSFTRGVYYPDKVFRSSVLHSTQDLFLPFFSNVTWFHAIHVSGTNGTKRFDNPVLPFNDGVYFASTEKSNIIRGWIFGTTLDSKTQSLLIVNNATNVVIKVCEFQFCNDPFLGVYYHKNNKSWMESEFRVYSSANNCTFEYVSQPFLMDLEGKQGNFKNLREFVFKNIDGYFKIYSKHTPINLVRDLPQGFSALEPLVDLPIGINITRFQTLLALHRSYLTPGDSSSGWTAGAAAYYVGYLQPRTFLLKYNENGTITDAVDCALDPLSETKCTLKSFTVEKGIYQTSNFRVQPTESIVRFPNITNLCPFGEVFNATRFASVYAWNRKRISNCVADYSVLYNSASFSTFKCYGVSPTKLNDLCFTNVYADSFVIRGDEVRQIAPGQTGKIADYNYKLPDDFTGCVIAWNSNNLDSKVGGNYNYLYRLFRKSNLKPFERDISTEIYQAGSTPCNGVEGFNCYFPLQSYGFQPTNGVGYQPYRVVVLSFELLHAPATVCGPKKSTNLVKNKCVNFNFNGLTGTGVLTESNKKFLPFQQFGRDIADTTDAVRDPQTLEILDITPCSFGGVSVITPGTNTSNQVAVLYQDVNCTEVPVAIHADQLTPTWRVYSTGSNVFQTRAGCLIGAEHVNNSYECDIPIGAGICASYQTQTNSPRRARSVASQSIIAYTMSLGAENSVAYSNNSIAIPTNFTISVTTEILPVSMTKTSVDCTMYICGDSTECSNLLLQYGSFCTQLNRALTGIAVEQDKNTQEVFAQVKQIYKTPPIKDFGGFNFSQILPDPSKPSKRSFIEDLLFNKVTLADAGFIKQYGDCLGDIAARDLICAQKFNGLTVLPPLLTDEMIAQYTSALLAGTITSGWTFGAGAALQIPFAMQMAYRFNGIGVTQNVLYENQKLIANQFNSAIGKIQDSLSSTASALGKLQDVVNQNAQALNTLVKQLSSNFGAISSVLNDILSRLDPPEAEVQIDRLITGRLQSLQTYVTQQLIRAAEIRASANLAATKMSECVLGQSKRVDFCGKGYHLMSFPQSAPHGVVFLHVTYVPAQEKNFTTAPAICHDGKAHFPREGVFVSNGTHWFVTQRNFYEPQIITTDNTFLSGNCDVVIGIVNNTVYDPLQPELDSGGGGSDIDPYKEFGSSYQLLNFLPLDFFPDLNALVDTATALYEEELTGREHCSPHHTAIRQALVCWDELTKLIAWMSSNITSEQVRTIIVNHVNDTWGLKVRQSLWFHLSCLTFGQHTVQEFLVSFGVWIRTPAPYRPPNAPILSTLPEHTVIC

SEQ ID NO: 10785 - protein, 1301 aa, Artificial Sequence
  SARS-CoV-2/USA/UT-00034/2020__EPI_ISL_417977 spike protein (1-1147)(K986P_V987P) WhcAg construct
MFVFLVLLPLVSSQCVNLTTRTQLPPAYTNSFTRGVYYPDKVFRSSVLHSTQDLFLPFFSNVTWFHAIHVSGTNGTKRFDNPVLPFNDGVYFASTEKSNIIRGWIFGTTLDSKTQSLLIVNNATNVVIKVCEFQFCNDPFLGVYYYKNNKSWMESEFRVYSSANNCTFEYVSQPFLMDLEGKQGNFKNLREFVFKNIDGYFKIYSKHTPINLVRDLPQGFSALEPLVDLPIGINITRFQTLLALHRSYLTPGDSSSGWTAGAAAYYVGYLQPRTFLLKYNENGTITDAVDCALDPLSETKCTLKSFTVEKGIYQTSNFRVQPTESIVRFPNITNLCPFGEVFNATRFASVYAWNRKRISNCVADYSVLYNSASFSTFKCYGVSPTKLNDLCFTNVYADSFVIRGDEVRQIAPGQTGKIADYNYKLPDDFTGCVIAWNSNNLDSKVGGNYNYLYRLFRKSNLKPFERDISTEIYQAGSTPCNGVEGFNCYFPLQSYGFQPTNGVGYQPYRVVVLSFELLHAPATVCGPKKSTNLVKNKCVNFNFNGLTGTGVLTESNKKFLPFQQFGRDIADTTDAVRDPQTLEILDITPCSFGGVSVITPGTNTSNQVAVLYQGVNCTEVPVAIHADQLTPTWRVYSTGSNVFQTRAGCLIGAEHVNNSYECDIPIGAGICASYQTQTNSPRRARSVASQSIIAYTMSLGAENSVAYSNNSIAIPTNFTISVTTEILPVSMTKTSVDCTMYICGDSTECSNLLLQYGSFCTQLNRALTGIAVEQDKNTQEVFAQVKQIYKTPPIKDFGGFNFSQILPDPSKPSKRSFIEDLLFNKVTLADAGFIKQYGDCLGDIAARDLICAQKFNGLTVLPPLLTDEMIAQYTSALLAGTITSGWTFGAGAALQIPFAMQMAYRFNGIGVTQNVLYENQKLIANQFNSAIGKIQDSLSSTASALGKLQDVVNQNAQALNTLVKQLSSNFGAISSVLNDILSRLDPPEAEVQIDRLITGRLQSLQTYVTQQLIRAAEIRASANLAATKMSECVLGQSKRVDFCGKGYHLMSFPQSAPHGVVFLHVTYVPAQEKNFTTAPAICHDGKAHFPREGVFVSNGTHWFVTQRNFYEPQIITTDNTFVSGNCDVVIGIVNNTVYDPLQPELDSGGGGSDIDPYKEFGSSYQLLNFLPLDFFPDLNALVDTATALYEEELTGREHCSPHHTAIRQALVCWDELTKLIAWMSSNITSEQVRTIIVNHVNDTWGLKVRQSLWFHLSCLTFGQHTVQEFLVSFGVWIRTPAPYRPPNAPILSTLPEHTVIC

SEQ ID NO: 10786 - protein, 1301 aa, Artificial Sequence
  SARS-CoV-2/USA/UT-00033/2020__EPI_ISL_417976 spike protein (1-1147)(K986P_V987P) WhcAg construct
MFVFLVLLPLVSSQCVNLTTRTQLPPAYTNSFTRGVYYPDKVFRSSVLHSTQDLFLPFFSNVTWFHAIHVSGTNGTKRFDNPVLPFNDGVYFASTEKSNIIRGWIFGTTLDSKTQSLLIVNNATNVVIKVCEFQFCNDPFLGVYYHKNNKSWMESEFRVYSSANNCTFEYVSQPFLMDLEGKQGNFKNLREFVFKNIDGYFKIYSKHTPINLVRDLPQGFSALEPLVDLPIGINITRFQTLLALHRSYLTPGDSSSGLTAGAAAYYVGYLQPRTFLLKYNENGTITDAVDCALDPLSETKCTLKSFTVEKGIYQTSNFRVQPTESIVRFPNITNLCPFGEVFNATRFASVYAWNRKRISNCVADYSVLYNSASFSTFKCYGVSPTKLNDLCFTNVYADSFVIRGDEVRQIAPGQTGKIADYNYKLPDDFTGCVIAWNSNNLDSKVGGNYNYLYRLFRKSNLKPFERDISTEIYQAGSTPCNGVEGFNCYFPLQSYGFQPTNGVGYQPYRVVVLSFELLHAPATVCGPKKSTNLVKNKCVNFNFNGLTGTGVLTESNKKFLPFQQFGRDIADTTDAVRDPQTLEILDITPCSFGGVSVITPGTNTSNQVAVLYQGVNCTEVPVAIHADQLTPTWRVYSTGSNVFQTRAGCLIGAEHVNNSYECDIPIGAGICASYQTQTNSPRRARSVASQSIIAYTMSLGAENSVAYSNNSIAIPTNFTISVTTEILPVSMTKTSVDCTMYICGDSTECSNLLLQYGSFCTQLNRALTGIAVEQDKNTQEVFAQVKQIYKTPPIKDFGGFNFSQILPDPSKPSKRSFIEDLLFNKVTLADAGFIKQYGDCLGDIAARDLICAQKFNGLTVLPPLLTDEMIAQYTSALLAGTITSGWTFGAGAALQIPFAMQMAYRFNGIGVTQNVLYENQKLIANQFNSAIGKIQDSLSSTASALGKLQDVVNQNAQALNTLVKQLSSNFGAISSVLNDILSRLDPPEAEVQIDRLITGRLQSLQTYVTQQLIRAAEIRASANLAATKMSECVLGQSKRVDFCGKGYHLMSFPQSAPHGVVFLHVTYVPAQEKNFTTAPAICHDGKAHFPREGVFVSNGTHWFVTQRNFYEPQIITTDNTFVSGNCDVVIGIVNNTVYDPLQPELDSGGGGSDIDPYKEFGSSYQLLNFLPLDFFPDLNALVDTATALYEEELTGREHCSPHHTAIRQALVCWDELTKLIAWMSSNITSEQVRTIIVNHVNDTWGLKVRQSLWFHLSCLTFGQHTVQEFLVSFGVWIRTPAPYRPPNAPILSTLPEHTVIC

SEQ ID NO: 10787 - protein, 1301 aa, Artificial Sequence
  SARS-CoV-2/USA/WI-13/2020__EPI_ISL_417516 spike protein (1-1147)(K986P_V987P) WhcAg construct
MFVFLVLLPLVSSQCVNLTTRTQLPPAYTNSFTRGVYYPDKVFRSSVLHSTQDLFLPFFSNVTWFHAIHVSGTNGTKRFDNPVLPFNDGVYFASTEKSNIIRGWIFGTTLDSKTQSLLIVNNATNVVIKVCEFQFCNDPFLGVYYHKNNKSWMESEFRVYSSANNCTFEYVSQPFLMDLEGKQGNFKNLREFVFKNIDGYFKIYSKHTPINLVRDLPQGFSALEPLVDLPIGINITRFQTLLALHRSYLTPGDSSSGWTAGAAAYYVGYLQPRTFLLKYNENGTITDAVDCALDPLSETKCTLKSFTVEKGIYQTSNFRVLPTESIVRFPNITNLCPFGEVFNATRFASVYAWNRKRISNCVADYSVLYNSASFSTFKCYGVSPTKLNDLCFTNVYADSFVIRGDEVRQIAPGQTGKIADYNYKLPDDFTGCVIAWNSNNLDSKVGGNYNYLYRLFRKSNLKPFERDISTEIYQAGSTPCNGVEGFNCYFPLQSYGFQPTNGVGYQPYRVVVLSFELLHAPATVCGPKKSTNLVKNKCVNFNFNGLTGTGVLTESNKKFLPFQQFGRDIADTTDAVRDPQTLEILDITPCSFGGVSVITPGTNTSNQVAVLYQGVNCTEVPVAIHADQLTPTWRVYSTGSNVFQTRAGCLIGAEHVNNSYECDIPIGAGICASYQTQTNSPRRARSVASQSIIAYTMSLGAENSVAYSNNSIAIPTNFTISVTTEILPVSMTKTSVDCTMYICGDSTECSNLLLQYGSFCTQLNRALTGIAVEQDKNTQEVFAQVKQIYKTPPIKDFGGFNFSQILPDPSKPSKRSFIEDLLFNKVTLADAGFIKQYGDCLGDIAARDLICAQKFNGLTVLPPLLTDEMIAQYTSALLAGTITSGWTFGAGAALQIPFAMQMAYRFNGIGVTQNVLYENQKLIANQFNSAIGKIQDSLSSTASALGKLQDVVNQNAQALNTLVKQLSSNFGAISSVLNDILSRLDPPEAEVQIDRLITGRLQSLQTYVTQQLIRAAEIRASANLAATKMSECVLGQSKRVDFCGKGYHLMSFPQSAPHGVVFLHVTYVPAQEKNFTTAPAICHDGKAHFPREGVFVSNGTHWFVTQRNFYEPQIITTDNTFVSGNCDVVIGIVNNTVYDPLQPELDSGGGGSDIDPYKEFGSSYQLLNFLPLDFFPDLNALVDTATALYEEELTGREHCSPHHTAIRQALVCWDELTKLIAWMSSNITSEQVRTIIVNHVNDTWGLKVRQSLWFHLSCLTFGQHTVQEFLVSFGVWIRTPAPYRPPNAPILSTLPEHTVIC

SEQ ID NO: 10788 - protein, 1300 aa, Artificial Sequence
  SARS-CoV-2/India/1-27/2020__EPI_ISL_413522 spike protein (1-1146)(K985P_V986P) WhcAg construct
MFVFLVLLPLVSSQCVNLTTRTQLPPAYTNSFTRGVYYPDKVFRSSVLHSTQDLFLPFFSNVTWFHAIHVSGTNGTKRFDNPVLPFNDGVYFASTEKSNIIRGWIFGTTLDSKTQSLLIVNNATNVVIKVCEFQFCNDPFLGVYHKNNKSWMESEFRVYSSANNCTFEYVSQPFLMDLEGKQGNFKNLREFVFKNIDGYFKIYSKHTPINLVRDLPQGFSALEPLVDLPIGINITRFQTLLALHRSYLTPGDSSSGWTAGAAAYYVGYLQPRTFLLKYNENGTITDAVDCALDPLSETKCTLKSFTVEKGIYQTSNFRVQPTESIVRFPNITNLCPFGEVFNATRFASVYAWNRKRISNCVADYSVLYNSASFSTFKCYGVSPTKLNDLCFTNVYADSFVIRGDEVIQIAPGQTGKIADYNYKLPDDFTGCVIAWNSNNLDSKVGGNYNYLYRLFRKSNLKPFERDISTEIYQAGSTPCNGVEGFNCYFPLQSYGFQPTNGVGYQPYRVVVLSFELLHAPATVCGPKKSTNLVKNKCVNFNFNGLTGTGVLTESNKKFLPFQQFGRDIADTTDAVRDPQTLEILDITPCSFGGVSVITPGTNTSNQVAVLYQDVNCTEVPVAIHADQLTPTWRVYSTGSNVFQTRAGCLIGAEHVNNSYECDIPIGAGICASYQTQTNSPRRARSVASQSIIAYTMSLGAENSVAYSNNSIAIPTNFTISVTTEILPVSMTKTSVDCTMYICGDSTECSNLLLQYGSFCTQLNRALTGIAVEQDKNTQEVFAQVKQIYKTPPIKDFGGFNFSQILPDPSKPSKRSFIEDLLFNKVTLADAGFIKQYGDCLGDIAARDLICAQKFNGLTVLPPLLTDEMIAQYTSALLAGTITSGWTFGAGAALQIPFAMQMAYRFNGIGVTQNVLYENQKLIANQFNSAIGKIQDSLSSTASALGKLQDVVNQNAQALNTLVKQLSSNFGAISSVLNDILSRLDPPEAEVQIDRLITGRLQSLQTYVTQQLIRAAEIRASANLAATKMSECVLGQSKRVDFCGKGYHLMSFPQSAPHGVVFLHVTYVPAQEKNFTTAPAICHDGKAHFPREGVFVSNGTHWFVTQRNFYEPQIITTDNTFVSGNCDVVIGIVNNTVYDPLQPELDSGGGGSDIDPYKEFGSSYQLLNFLPLDFFPDLNALVDTATALYEEELTGREHCSPHHTAIRQALVCWDELTKLIAWMSSNITSEQVRTIIVNHVNDTWGLKVRQSLWFHLSCLTFGQHTVQEFLVSFGVWIRTPAPYRPPNAPILSTLPEHTVIC

SEQ ID NO: 10789 - protein, 1295 aa, Artificial Sequence
  SARS-CoV-2/pangolin/Guangxi/P4L/2017__EPI_ISL_410538 spike protein (1-1141)(K980P_V981P) WhcAg construct
MFVFLFVLPLVSSQCVNLTTRTGIPPGYTNSSTRGVYYPDKVFRSSILHLTQDLFLPFFSNVTWFNTINYQGGFKKFDNPVLPFNDGVYFASTEKSNIIRGWIFGTTLDARTQSLLIVNNATNVVIKVCEFQFCTDPFLGVYYHNNNKTWVENEFRVYSSANNCTFEYISQPFLMDLEGKQGNFKNLREFVFKNVDGYFKIYSKHTPIDLVRDLPRGFAALEPLVDLPIGINITRFQTLLALHRSYLTPGNLESGWTTGAAAYYVGYLQQRTFLLSYNQNGTITDAVDCSLDPLSETKCTLKSLTVEKGIYQTSNFRVQPTISIVRFPNITNLCPFGEVFNASKFASVYAWNRKRISNCVADYSVLYNSTSFSTFKCYGVSPTKLNDLCFTNVYADSFVVKGDEVRQIAPGQTGVIADYNYKLPDDFTGCVIAWNSVKQDALTGGNYGYLYRLFRKSKLKPFERDISTEIYQAGSTPCNGQVGLNCYYPLERYGFHPTTGVNYQPFRVVVLSFELLNGPATVCGPKLSTTLVKDKCVNFNFNGLTGTGVLTTSKKQFLPFQQFGRDISDTTDAVRDPQTLEILDITPCSFGGVSVITPGTNTSNQVAVLYQDVNCTEVPMAIHAEQLTPAWRVYSAGANVFQTRAGCLVGAEHVNNSYECDIPVGAGICASYHSMSSLRSVNQRSIIAYTMSLGAENSVAYSNNSIAIPTNFTISVTTEILPVSMTKTSVDCTMYICGDSIECSNLLLQYGSFCTQLNRALTGIAVEQDKNTQEVFAQVKQIYKTPPIKDFGGFNFSQILPDPSKPSKRSFIEDLLFNKVTLADAGFIKQYGDCLGDIAARDLICAQKFNGLTVLPPLLTDEMIAQYTSALLAGTITSGWTFGAGAALQIPFAMQMAYRFNGIGVTQNVLYENQKLIANQFNSAIGKIQDSLSSTASALGKLQDVVNQNAQALNTLVKQLSSNFGAISSVLNDILSRLDPPEAEVQIDRLITGRLQSLQTYVTQQLIRAAEIRASANLAATKMSECVLGQSKRVDFCGKGYHLMSFPQSAPHGVVFLHVTYVPAQEKNFTTAPAICHEGKAHFPREGVFVSNGTHWFITQRNFYEPQIITTDNTFVSGSCDVVIGIVNNTVYDPLQPELDSGGGGSDIDPYKEFGSSYQLLNFLPLDFFPDLNALVDTATALYEEELTGREHCSPHHTAIRQALVCWDELTKLIAWMSSNITSEQVRTIIVNHVNDTWGLKVRQSLWFHLSCLTFGQHTVQEFLVSFGVWIRTPAPYRPPNAPILSTLPEHTVIC

SEQ ID NO: 10790 - protein, 1295 aa, Artificial Sequence
  SARS-CoV-2/pangolin/Guangxi/P5L/2017__EPI_ISL_410540 spike protein (1-1141)(K980P_V981P) WhcAg construct
MFVFLFVLPLVSSQCVNLTTRTGIPPGYTNSSTRGVYYPDKVFRSSILHLTQDLFLPFFSNVTWFNTINYQGGFKKFDNPVLPFNDGVYFASTEKSNIIRGWIFGTTLDARTQSLLIVNNATNVVIKVCEFQFCTDPFLGVYYHNNNKTWVENEFRVYSSANNCTFEYISQPFLMDLEGKQGNFKNLREFVFKNVDGYFKIYSKHTPIDLVRDLPRGFAALEPLVDLPIGINITRFQTLLALHRSYLTPGKLESGWTTGAAAYYVGYLQQRTFLLSYNQNGTITDAVDCSLDPLSETKCTLKSLTVEKGIYQTSNFRVQPTISIVRFPNITNLCPFGEVFNASKFASVYAWNRKRISNCVADYSVLYNSTSFSTFKCYGVSPTKLNDLCFTNVYADSFVVKGDEVRQIAPGQTGVIADYNYKLPDDFTGCVIAWNSVKQDALTGGNYGYLYRLFRKSKLKPFERDISTEIYQAGSTPCNGQVGLNCYYPLERYGFHPTTGVNYQPFRVVVLSFELLNGPATVCGPKLSTTLVKDKCVNFNFNGLTGTGVLTTSKKQFLPFQQFGRDISDTTDAVRDPQTLEILDITPCSFGGVSVITPGTNTSNQVAVLYQDVNCTEVPMAIHAEQLTPAWRVYSAGANVFQTRAGCLVGAEHVNNSYECDIPVGAGICASYHSMSSFRSVNQRSIIAYTMSLGAENSVAYSNNSIAIPTNFTISVTTEILPVSMTKTSVDCTMYICGDSIECSNLLLQYGSFCTQLNRALTGIAVEQDKNTQEVFAQVKQIYKTPPIKDFGGFNFSQILPDPSKPSKRSFIEDLLFNKVTLADAGFIKQYGDCLGDIAARDLICAQKFNGLTVLPPLLTDEMIAQYTSALLAGTITSGWTFGAGAALQIPFAMQMAYRFNGIGVTQNVLYENQKLIANQFNSAIGKIQDSLSSTASALGKLQDVVNQNAQALNTLVKQLSSNFGAISSVLNDILSRLDPPEAEVQIDRLITGRLQSLQTYVTQQLIRAAEIRASANLAATKMSECVLGQSKRVDFCGKGYHLMSFPQSAPHGVVFLHVTYVPAQEKNFTTAPAICHEGKAHFPREGVFVSNGTHWFITQRNFYEPQIITTDNTFVSGSCDVVIGIVNNTVYDPLQPELDSGGGGSDIDPYKEFGSSYQLLNFLPLDFFPDLNALVDTATALYEEELTGREHCSPHHTAIRQALVCWDELTKLIAWMSSNITSEQVRTIIVNHVNDTWGLKVRQSLWFHLSCLTFGQHTVQEFLVSFGVWIRTPAPYRPPNAPILSTLPEHTVIC

SEQ ID NO: 10791 - protein, 1295 aa, Artificial Sequence
  SARS-CoV-2/pangolin/Guangxi/P5E/2017__EPI_ISL_410541 spike protein (1-1141)(K980P_V981P) WhcAg construct
MFVFLFVLPLVSSQCVNLTTRTGIPPGYTNSSTRGVYYPDKVFRSSILHLTQDLFLPFFSNVTWFNTITYQGGSKKFDNPVLPFNDGVYFASTEKSNIIRGWIFGTTLDARTQSLLIVNNATNVVIKVCEFQFCTDPFLGVYYHNNNKTWVENEFRVYSSANNCTFEYISQPFLMDLEGKQGNFKNLREFVFKNVDGYFKIYSKHTPIDLVRDLPRGFAALEPLVDLPIGINITRFQTLLALHRSYLTPGKLESGWTTGAAAYYVGYLQQRTFLLSYNQNGTITDAVDCSLDPLSETKCTLKSLTVEKGIYQTSNFRVQPTISIVRFPNITNLCPFGEVFNASKFASVYAWNRKRISNCVADYSVLYNSTSFSTFKCYGVSPTKLNDLCFTNVYADSFVVKGDEVRQIAPGQTGVIADYNYKLPDDFTGCVIAWNSVKQDALTGDNYGYLYRLFRKSKLKPFERDISTEIYQAGSTPCNGQVGLNCYYPLERYGFHPTTGVNYQPFRVVVLSFELLNGPATVCGPKLSTTLVKDKCVNFNFNGLTGTGVLTTSKKQFLPFQQFGRDISDTTDAVRDPQTLEILDITPCSFGGVSVITPGTNTSNQVAVLYQDVNCTEVPMAIHAEQLTPAWRVYSAGANVFQTRAGCLVGAEHVNNSYECDIPVGAGICASYHSMSSFRSVNQRSIIAYTMSLGAENSVAYSNNSIAIPTNFTISVTTEILPVSMTKTSVDCTMYICGDSIECSNLLLQYGSFCTQLNRALTGIAVEQDKNTQEVFAQVKQIYKTPPIKDFGGFNFSQILPDPSKPSKRSFIEDLLFNKVTLADAGFIKQYGDCLGDIAARDLICAQKFNGLTVLPPLLTDEMIAQYTSALLAGTITSGWTFGAGAALQIPFAMQMAYRFNGIGVTQNVLYENQKLIANQFNSAIGKIQDSLSSTASALGKLQDVVNQNAQALNTLVKQLSSNFGAISSVLNDILSRLDPPEAEVQIDRLITGRLQSLQTYVTQQLIRAAEIRASANLAATKMSECVLGQSKRVDFCGKGYHLMSFPQSAPHGVVFLHVTYVPAQEKNFTTAPAICHEGKAHFPREGVFVSNGTHWFITQRNFYEPQIITTDNTFVSGSCDVVIGIVNNTVYDPLQPELDSGGGGSDIDPYKEFGSSYQLLNFLPLDFFPDLNALVDTATALYEEELTGREHCSPHHTAIRQALVCWDELTKLIAWMSSNITSEQVRTIIVNHVNDTWGLKVRQSLWFHLSCLTFGQHTVQEFLVSFGVWIRTPAPYRPPNAPILSTLPEHTVIC

SEQ ID NO: 10792 - protein, 1293 aa, Artificial Sequence
  SARS-CoV-2/pangolin/Guangxi/P1E/2017__EPI_ISL_410539 spike protein (1-1139)(K978P_V979P) WhcAg construct
MFVFLFVLPLVSSQCVNLTTRTGIQPGYTNSSTRGVYYPDKVFRSSILHLTQDLFLPFFSNVTWFNTINYQGGFKKFDNPVLPFNDGVYFASTEKSNIIRGWIFGTTLDARTQSLLIVNNATNVVIKVCEFQFCTDPFLGVYYHNNNKTWVENEFRVYSSANNCTFEYISQPFLMDLEGKQGNFKNLREFVFKNVDGYFKIYSKHTPIDLVRDLPRGFAALEPLVDLPIGINITRFQTLLALHRSYLTPGKLESGWTTGAAAYYVGYLQQRTFLLSYNQNGTITDAVDCSLDPLSETKCTLKSLTVEKGIYQTSNFRVQPTISIVRFPNITNLCPFGEVFNASKFASVYAWNRKRISNCVADYSVLYNSTSFSTFKCYGVSPTKLNDLCFTNVYADSFVVKGDEVRQIAPGQTGVIADYNYKLPDDFTGCVIAWNSVKQDALTGGNYLYRLFRKSKLKPFERDISTEIYQAGSTPCNGQVGLNCYYPLERYGFHPTTGVNYQPFRVVVLSFELLNGPATVCGPKLSTTLVKDKCVNFNFNGLTGTGVLTTSKKQFLPFQQFGRDISDTTDAVRDPQTLEILDITPCSFGGVSVITPGTNTSNQVAVLYQDVNCTEVPMAIHAEQLTPAWRVYSAGANVFQTRAGCLVGAEHVNNSYECDIPVGAGICASYHSMSSLRSVNQRSIIAYTMSLGAENSVAYSNNSIAIPTNFTISVTTEILPVSMTKTSVDCTMYICGDSIECSNLLLQYGSFCTQLNRALTGIAVEQDKNTQEVFAQVKQIYKTPPIKDFGGFNFSQILPDPSKPSKRSFIEDLLFNKVTLADAGFIKQYGDCLGDIAARDLICAQKFNGLTVLPPLLTDEMIAQYTSALLAGTITSGWTFGAGAALQIPFAMQMAYRFNGIGVTQNVLYENQKLIANQFNSAIGKIQDSLSSTASALGKLQDVVNQNAQALNTLVKQLSSNFGAISSVLNDILSRLDPPEAEVQIDRLITGRLQSLQTYVTQQLIRAAEIRASANLAATKMSECVLGQSKRVDFCGKGYHLMSFPQSAPHGVVFLHVTYVPAQEKNFTTAPAICHEGKAHFPREGVFVSNGTHWFITQRNFYEPQIITTDNTFVSGSCDVVIGIVNNTVYDPLQPELDSGGGGSDIDPYKEFGSSYQLLNFLPLDFFPDLNALVDTATALYEEELTGREHCSPHHTAIRQALVCWDELTKLIAWMSSNITSEQVRTIIVNHVNDTWGLKVRQSLWFHLSCLTFGQHTVQEFLVSFGVWIRTPAPYRPPNAPILSTLPEHTVIC

SEQ ID NO: 10793 - protein, 1301 aa, Artificial Sequence
  SARS-CoV-2/Wuhan/WIV05/2019__EPI_ISL_402128 spike protein (1-1147)(K986P_V987P_T887W_A1020W) WhcAg construct
MFVFLVLLPLVSSQCVNLTTRTQLPPAYTNSFTRGVYYPDKVFRSSVLHSTQDLFLPFFSNVTWFHAIHVSGTNGTKRFDNPVLPFNDGVYFASTEKSNIIRGWIFGTTLDSKTQSLLIVNNATNVVIKVCEFQFCNDPFLGVYYHKNNKSWMESEFRVYSSANNCTFEYVSQPFLMDLEGKQGNFKNLREFVFKNIDGYFKIYSKHTPINLVRDLPQGFSALEPLVDLPIGINITRFQTLLALHRSYLTPGDSSSGWTAGAAAYYVGYLQPRTFLLKYNENGTITDAVDCALDPLSETKCTLKSFTVEKGIYQTSNFRVQPTESIVRFPNITNLCPFGEVFNATRFASVYAWNRKRISNCVADYSVLYNSASFSTFKCYGVSPTKLNDLCFTNVYADSFVIRGDEVRQIAPGQTGKIADYNYKLPDDFTGCVIAWNSNNLDSKVGGNYNYLYRLFRKSNLKPFERDISTEIYQAGSTPCNGVEGFNCYFPLQSYGFQPTNGVGYQPYRVVVLSFELLHAPATVCGPKKSTNLVKNKCVNFNFNGLTGTGVLTESNKKFLPFQQFGRDIADTTDAVRDPQTLEILDITPCSFGGVSVITPGTNTSNQVAVLYQDVNCTEVPVAIHADQLTPTWRVYSTGSNVFQTRAGCLIGAEHVNNSYECDIPIGAGICASYQTQTNSPRRARSVASQSIIAYTMSLGAENSVAYSNNSIAIPTNFTISVTTEILPVSMTKTSVDCTMYICGDSTECSNLLLQYGSFCTQLNRALTGIAVEQDKNTQEVFAQVKQIYKTPPIKDFGGFNFSQILPDPSKPSKRSFIEDLLFNKVTLADAGFIKQYGDCLGDIAARDLICAQKFNGLTVLPPLLTDEMIAQYTSALLAGTITSGWWFGAGAALQIPFAMQMAYRFNGIGVTQNVLYENQKLIANQFNSAIGKIQDSLSSTASALGKLQDVVNQNAQALNTLVKQLSSNFGAISSVLNDILSRLDPPEAEVQIDRLITGRLQSLQTYVTQQLIRAAEIRWSANLAATKMSECVLGQSKRVDFCGKGYHLMSFPQSAPHGVVFLHVTYVPAQEKNFTTAPAICHDGKAHFPREGVFVSNGTHWFVTQRNFYEPQIITTDNTFVSGNCDVVIGIVNNTVYDPLQPELDSGGGGSDIDPYKEFGSSYQLLNFLPLDFFPDLNALVDTATALYEEELTGREHCSPHHTAIRQALVCWDELTKLIAWMSSNITSEQVRTIIVNHVNDTWGLKVRQSLWFHLSCLTFGQHTVQEFLVSFGVWIRTPAPYRPPNAPILSTLPEHTVIC

SEQ ID NO: 10794 - protein, 1297 aa, Artificial Sequence
  SARS-CoV-2/bat/Yunnan/RaTG13/2013__EPI_ISL_402131 spike protein (1-1143)(K982P_V983P_T883W_A1016W) WhcAg construct
MFVFLVLLPLVSSQCVNLTTRTQLPPAYTNSSTRGVYYPDKVFRSSVLHLTQDLFLPFFSNVTWFHAIHVSGTNGIKRFDNPVLPFNDGVYFASTEKSNIIRGWIFGTTLDSKTQSLLIVNNATNVVIKVCEFQFCNDPFLGVYYHKNNKSWMESEFRVYSSANNCTFEYVSQPFLMDLEGKQGNFKNLREFVFKNIDGYFKIYSKHTPINLVRDLPPGFSALEPLVDLPIGINITRFQTLLALHRSYLTPGDSSSGWTAGAAAYYVGYLQPRTFLLKYNENGTITDAVDCALDPLSETKCTLKSFTVEKGIYQTSNFRVQPTDSIVRFPNITNLCPFGEVFNATTFASVYAWNRKRISNCVADYSVLYNSTSFSTFKCYGVSPTKLNDLCFTNVYADSFVITGDEVRQIAPGQTGKIADYNYKLPDDFTGCVIAWNSKHIDAKEGGNFNYLYRLFRKANLKPFERDISTEIYQAGSKPCNGQTGLNCYYPLYRYGFYPTDGVGHQPYRVVVLSFELLNAPATVCGPKKSTNLVKNKCVNFNFNGLTGTGVLTESNKKFLPFQQFGRDIADTTDAVRDPQTLEILDITPCSFGGVSVITPGTNASNQVAVLYQDVNCTEVPVAIHADQLTPTWRVYSTGSNVFQTRAGCLIGAEHVNNSYECDIPIGAGICASYQTQTNSRSVASQSIIAYTMSLGAENSVAYSNNSIAIPTNFTISVTTEILPVSMTKTSVDCTMYICGDSTECSNLLLQYGSFCTQLNRALTGIAVEQDKNTQEVFAQVKQIYKTPPIKDFGGFNFSQILPDPSKPSKRSFIEDLLFNKVTLADAGFIKQYGDCLGDIAARDLICAQKFNGLTVLPPLLTDEMIAQYTSALLAGTITSGWWFGAGAALQIPFAMQMAYRFNGIGVTQNVLYENQKLIANQFNSAIGKIQDSLSSTASALGKLQDVVNQNAQALNTLVKQLSSNFGAISSVLNDILSRLDPPEAEVQIDRLITGRLQSLQTYVTQQLIRAAEIRWSANLAATKMSECVLGQSKRVDFCGKGYHLMSFPQSAPHGVVFLHVTYVPAQEKNFTTAPAICHDGKAHFPREGVFVSNGTHWFVTQRNFYEPQIITTDNTFVSGSCDVVIGIVNNTVYDPLQPELDSGGGGSDIDPYKEFGSSYQLLNFLPLDFFPDLNALVDTATALYEEELTGREHCSPHHTAIRQALVCWDELTKLIAWMSSNITSEQVRTIIVNHVNDTWGLKVRQSLWFHLSCLTFGQHTVQEFLVSFGVWIRTPAPYRPPNAPILSTLPEHTVIC

SEQ ID NO: 10795 - protein, 1301 aa, Artificial Sequence
  SARS-CoV-2/Wuhan/HBCDC-HB-01/2019__EPI_ISL_402132 spike protein (1-1147)(K986P_V987P_T887W_A1020W) WhcAg construct
MFVFLVLLPLVSSQCVNLTTRTQLPPAYTNSITRGVYYPDKVFRSSVLHSTQDLFLPFFSNVTWFHAIHVSGTNGTKRFDNPVLPFNDGVYFASTEKSNIIRGWIFGTTLDSKTQSLLIVNNATNVVIKVCEFQFCNDPFLGVYYHKNNKSWMESEFRVYSSANNCTFEYVSQPFLMDLEGKQGNFKNLREFVFKNIDGYFKIYSKHTPINLVRDLPQGFSALEPLVDLPIGINITRFQTLLALHRSYLTPGDSSSGWTAGAAAYYVGYLQPRTFLLKYNENGTITDAVDCALDPLSETKCTLKSFTVEKGIYQTSNFRVQPTESIVRFPNITNLCPFGEVFNATRFASVYAWNRKRISNCVADYSVLYNSASFSTFKCYGVSPTKLNDLCFTNVYADSFVIRGDEVRQIAPGQTGKIADYNYKLPDDFTGCVIAWNSNNLDSKVGGNYNYLYRLFRKSNLKPFERDISTEIYQAGSTPCNGVEGFNCYFPLQSYGFQPTNGVGYQPYRVVVLSFELLHAPATVCGPKKSTNLVKNKCVNFNFNGLTGTGVLTESNKKFLPFQQFGRDIADTTDAVRDPQTLEILDITPCSFGGVSVITPGTNTSNQVAVLYQDVNCTEVPVAIHADQLTPTWRVYSTGSNVFQTRAGCLIGAEHVNNSYECDIPIGAGICASYQTQTNSPRRARSVASQSIIAYTMSLGAENSVAYSNNSIAIPTNFTISVTTEILPVSMTKTSVDCTMYICGDSTECSNLLLQYGSFCTQLNRALTGIAVEQDKNTQEVFAQVKQIYKTPPIKDFGGFNFSQILPDPSKPSKRSFIEDLLFNKVTLADAGFIKQYGDCLGDIAARDLICAQKFNGLTVLPPLLTDEMIAQYTSALLAGTITSGWWFGAGAALQIPFAMQMAYRFNGIGVTQNVLYENQKLIANQFNSAIGKIQDSLSSTASALGKLQDVVNQNAQALNTLVKQLSSNFGAISSVLNDILSRLDPPEAEVQIDRLITGRLQSLQTYVTQQLIRAAEIRWSANLAATKMSECVLGQSKRVDFCGKGYHLMSFPQSAPHGVVFLHVTYVPAQEKNFTTAPAICHDGKAHFPREGVFVSNGTHWFVTQRNFYEPQIITTDNTFVSGNCDVVIGIVNNTVYDPLQPELDSGGGGSDIDPYKEFGSSYQLLNFLPLDFFPDLNALVDTATALYEEELTGREHCSPHHTAIRQALVCWDELTKLIAWMSSNITSEQVRTIIVNHVNDTWGLKVRQSLWFHLSCLTFGQHTVQEFLVSFGVWIRTPAPYRPPNAPILSTLPEHTVIC

SEQ ID NO: 10796 - protein, 1301 aa, Artificial Sequence
  SARS-CoV-2/Guangdong/20SF028/2020__EPI_ISL_403936 spike protein (1-1147)(K986P_V987P_T887W_A1020W) WhcAg construct
MFVFLVLLPLVSSQCVNLTTRTQLPPAYTNSFTRGVYYPDKVFRSSVLYSTQDLFLPFFSNVTWFHAIHVSGTNGTKRFDNPVLPFNDGVYFASTEKSNIIRGWIFGTTLDSKTQSLLIVNNATNVVIKVCEFQFCNDPFLGVYYHKNNKSWMESEFRVYSSANNCTFEYVSQPFLMDLEGKQGNFKNLREFVFKNIDGYFKIYSKHTPINLVRDLPQGFSALEPLVDLPIGINITRFQTLLALHRSYLTPGDSSSGWTAGAAAYYVGYLQPRTFLLKYNENGTITDAVDCALDPLSETKCTLKSFTVEKGIYQTSNFRVQPTESIVRFPNITNLCPFGEVFNATRFASVYAWNRKRISNCVADYSVLYNSASFSTFKCYGVSPTKLNDLCFTNVYADSFVIRGDEVRQIAPGQTGKIADYNYKLPDDFTGCVIAWNSNNLDSKVGGNYNYLYRLFRKSNLKPFERDISTEIYQAGSTPCNGVEGFNCYFPLQSYGFQPTNGVGYQPYRVVVLSFELLHAPATVCGPKKSTNLVKNKCVNFNFNGLTGTGVLTESNKKFLPFQQFGRDIADTTDAVRDPQTLEILDITPCSFGGVSVITPGTNTSNQVAVLYQDVNCTEVPVAIHADQLTPTWRVYSTGSNVFQTRAGCLIGAEHVNNSYECDIPIGAGICASYQTQTNSPRRARSVASQSIIAYTMSLGAENSVAYSNNSIAIPTNFTISVTTEILPVSMTKTSVDCTMYICGDSTECSNLLLQYGSFCTQLNRALTGIAVEQDKNTQEVFAQVKQIYKTPPIKDFGGFNFSQILPDPSKPSKRSFIEDLLFNKVTLADAGFIKQYGDCLGDIAARDLICAQKFNGLTVLPPLLTDEMIAQYTSALLAGTITSGWWFGAGAALQIPFAMQMAYRFNGIGVTQNVLYENQKLIANQFNSAIGKIQDSLSSTASALGKLQDVVNQNAQALNTLVKQLSSNFGAISSVLNDILSRLDPPEAEVQIDRLITGRLQSLQTYVTQQLIRAAEIRWSANLAATKMSECVLGQSKRVDFCGKGYHLMSFPQSAPHGVVFLHVTYVPAQEKNFTTAPAICHDGKAHFPREGVFVSNGTHWFVTQRNFYEPQIITTDNTFVSGNCDVVIGIVNNTVYDPLQPELDSGGGGSDIDPYKEFGSSYQLLNFLPLDFFPDLNALVDTATALYEEELTGREHCSPHHTAIRQALVCWDELTKLIAWMSSNITSEQVRTIIVNHVNDTWGLKVRQSLWFHLSCLTFGQHTVQEFLVSFGVWIRTPAPYRPPNAPILSTLPEHTVIC

SEQ ID NO: 10797 - protein, 1301 aa, Artificial Sequence
  SARS-CoV-2/Shenzhen/SZTH-001/2020__EPI_ISL_406592 spike protein (1-1147)(K986P_V987P_T887W_A1020W) WhcAg construct
MFVFLVLLPLVSSQCVNLTTRTQLPPAYTNSFTRGVYYPDKVFRSSVLHSTQDLFLPFFSNVTWFHAIHVSGTNGTKRFDNPVLPFNDGVYFASTEKSNIIRGWIFGTTLDSKTQSLLIVNNATNVVIKVCEFQFCNDPFLGVYYHKNNKSWMESEFRVYSSANNCTFEYVSQPFLMDLEGKQGNFKNLREFVFKNIDGYFKIYSKHTPINLVRDLPQGFSALEPLVDLPIGINITRFQTLLALHRSYLTPGDSSSGWTAGAAAYYVGYLQPRTFLLKYNENGTITDAVDCALDPLSETKCTLKSFTVEKGIYQTSNFRVQPTESIVRFPNITNLCPFGEVFNATRFASVYAWNRKRISNCVADYSVLYNSASFSTFKCYGVSPTKLNDLCFTNVYADSFVIRGDEVRQIAPGQTGKIADYNYKLPDDFTGCVIAWNSNNLDSKVGGNYNYLYRLFRKSNLKPFERDISTEIYQAGSTPCNGVEGFNCYFPLQSYGFQPTNGVGYQPYRVVVLSFELLHAPATVCGPKKSTNLVKNKCVNFNFNGLTGTGVLTESNKKFLPFQQFGRDIADTTDAVRDPQTLEILDITPCSFGGVSVITPGTNTSNQVAVLYQDVNCTEVPVAIHADQLTPTWRVYSTGSNVFQTRAGCLIGAEHVNNSYECDIPIGAGICASYQTQTNSPRRARSVASQSIIAYTMSLGAENSVAYSNNSIAIPTNFTISVTTEILPVSMTKTSVDCTMYICGDSTECSNLLLQYGSFCTQLNRALTGIAVEQDKNTQEVFAQVKQIYKTPPIKDFGGFNFSQILPDPSKPSKRSFIEDLLFNKVTLADAGFIKQYGDCLGDIAARDLICAQKFNGLTVLPPLLTDEMIAQYTSALLAGTITSGWWFGAGAALQIPFAMQMAYRFNGIGVTQNVLYENQKLIANQFNSAIGKIQDSLSSTASALGKLQDVVNQNAQALNTLVKQLSSNFGAISSVLNDILSRLDPPEAEVQIDRLITGRLQSLQTYVTQQLIRAAEIRWSANLAATKMSECVLGQSKRVDFCGKGYHLMSFPQSAPHGVVFLHVTYVPAQEKNFTTAPAICHDGKAHFPREGVFVSNGTHWFVTQRNFYEPQIITTDNTFVSGNCDVLIGIVNNTVYDPLQPELDSGGGGSDIDPYKEFGSSYQLLNFLPLDFFPDLNALVDTATALYEEELTGREHCSPHHTAIRQALVCWDELTKLIAWMSSNITSEQVRTIIVNHVNDTWGLKVRQSLWFHLSCLTFGQHTVQEFLVSFGVWIRTPAPYRPPNAPILSTLPEHTVIC

SEQ ID NO: 10798 - protein, 1301 aa, Artificial Sequence
  SARS-CoV-2/Shenzhen/SZTH-004/2020__EPI_ISL_406595 spike protein (1-1147)(K986P_V987P_T887W_A1020W) WhcAg construct
MFVFLVLLPLVSSQCVNLTTRTQLPPAYTNSFTRGVYYPDKVFRSSVLHSTQDLFLPFFSNVTWFHAIHVSGTNGTKRFDNPVLPFNDGVYFASTEKSNIIRGWIFGTTLDSKTQSLLIVNNATNVVIKVCEFQFCNDPFLGVYYHKNNKSWMESEFRVYSSANNCTFEYVSQPFLMDLEGKQGNFKNLREFVFKNIDGYFKIYSKHTPINLVRDLPQGFSALEPLVDLPIGINITRFQTLLALHRSYLTPGDSSSGWTAGAAAYYVGYLQPRTFLLKYNENGTITDAVDCALDPLSETKCTLKSFTVEKGIYQTSNFRVQPTESIVRFPNITNLCPFGEVFNATRFASVYAWDRKRISNCVAYYSVLYNSASFSTFKCYGVSPTKLNDLCFTNVYADSFVIRGDEVRQIAPGQTGKIADYNYKLPDDFTGCVIAWNSNNLDSKVGGNYNYLYRLFRKSNLKPFERDISTEIYQAGSTPCNGVEGFNCYFPLQSYGFQPTNGVGYQPYRVVVLSFELLHAPATVCGPKKSTNLVKNKCVNFNFNGLTGTGVLTESNKKFLPFQQFGRDIADTTDAVRDPQTLEILDITPCSFGGVSVITPGTNTSNQVAVLYQDVNCTEVPVAIHADQLTPTWRVYSTGSNVFQTRAGCLIGAEHVNNSYECDIPIGAGICASYQTQTNSPRRARSVASQSIIAYTMSLGAENSVAYSNNSIAIPTNFTISVTTEILPVSMTKTSVDCTMYICGDSTECSNLLLQYGSFCTQLNRALTGIAVEQDKNTQEVFAQVKQIYKTPPIKDFGGFNFSQILPDPSKPSKRSFIEDLLFNKVTLADAGFIKQYGDCLGDIAARDLICAQKFNGLTVLPPLLTDEMIAQYTSALLAGTITSGWWFGAGAALQIPFAMQMAYRFNGIGVTQNVLYENQKLIANQFNSAIGKIQDSLSSTASALGKLQDVVNQNAQALNTLVKQLSSNFGAISSVLNDILSRLDPPEAEVQIDRLITGRLQSLQTYVTQQLIRAAEIRWSANLAATKMSECVLGQSKRVDFCGKGYHLMSFPQSAPHGVVFLHVTYVPAQEKNFTTAPAICHDGKAHFPREGVFVSNGTHWFVTQRNFYEPQIITTDNTFVSGNCDVVIGIVNNTVYDPLQPELDSGGGGSDIDPYKEFGSSYQLLNFLPLDFFPDLNALVDTATALYEEELTGREHCSPHHTAIRQALVCWDELTKLIAWMSSNITSEQVRTIIVNHVNDTWGLKVRQSLWFHLSCLTFGQHTVQEFLVSFGVWIRTPAPYRPPNAPILSTLPEHTVIC

SEQ ID NO: 10799 - protein, 1301 aa, Artificial Sequence
  SARS-CoV-2/France/IDF0372/2020__EPI_ISL_406596 spike protein (1-1147)(K986P_V987P_T887W_A1020W) WhcAg construct
MFVFLVLLPLVSSQCVNLTTRTQLPPAYTNSFTRGVYYPDKVFRSSVLHSTQDLFLPFFSNVTWFHAIHVSGTNGTKRFDNPVLPFNDGVYFASTEKSNIIRGWIFGTTLDSKTQSLLIVNNATNVVIKVCEFQFCNDPFLGVYYHKNNKSWMESEFRVYSSANNCTFEYVSQPFLMDLEGKQGNFKNLREFVFKNIDGYFKIYSKHTPINLVRDLPQGFSALEPLVDLPIGINITRFQTLLALHRSYLTPGDSSSGWTAGAAAYYVGYLQPRTFLLKYNENGTITDAVDCALDPLSETKCTLKSFTVEKGIYQTSNFRVQPTESIVRFPNITNLCPFGEVFNATRFASVYAWNRKRISNCVADYSFLYNSASFSTFKCYGVSPTKLNDLCFTNVYADSFVIRGDEVRQIAPGQTGKIADYNYKLPDDFTGCVIAWNSNNLDSKVGGNYNYLYRLFRKSNLKPFERDISTEIYQAGSTPCNGVEGFNCYFPLQSYGFQPTNGVGYQPYRVVVLSFELLHAPATVCGPKKSTNLVKNKCVNFNFNGLTGTGVLTESNKKFLPFQQFGRDIADTTDAVRDPQTLEILDITPCSFGGVSVITPGTNTSNQVAVLYQDVNCTEVPVAIHADQLTPTWRVYSTGSNVFQTRAGCLIGAEHVNNSYECDIPIGAGICASYQTQTNSPRRARSVASQSIIAYTMSLGAENSVAYSNNSIAIPTNFTISVTTEILPVSMTKTSVDCTMYICGDSTECSNLLLQYGSFCTQLNRALTGIAVEQDKNTQEVFAQVKQIYKTPPIKDFGGFNFSQILPDPSKPSKRSFIEDLLFNKVTLADAGFIKQYGDCLGDIAARDLICAQKFNGLTVLPPLLTDEMIAQYTSALLAGTITSGWWFGAGAALQIPFAMQMAYRFNGIGVTQNVLYENQKLIANQFNSAIGKIQDSLSSTASALGKLQDVVNQNAQALNTLVKQLSSNFGAISSVLNDILSRLDPPEAEVQIDRLITGRLQSLQTYVTQQLIRAAEIRWSANLAATKMSECVLGQSKRVDFCGKGYHLMSFPQSAPHGVVFLHVTYVPAQEKNFTTAPAICHDGKAHFPREGVFVSNGTHWFVTQRNFYEPQIITTDNTFVSGNCDVVIGIVNNTVYDPLQPELDSGGGGSDIDPYKEFGSSYQLLNFLPLDFFPDLNALVDTATALYEEELTGREHCSPHHTAIRQALVCWDELTKLIAWMSSNITSEQVRTIIVNHVNDTWGLKVRQSLWFHLSCLTFGQHTVQEFLVSFGVWIRTPAPYRPPNAPILSTLPEHTVIC

SEQ ID NO: 10800 - protein, 1301 aa, Artificial Sequence
  SARS-CoV-2/Australia/VIC01/2020__EPI_ISL_406844 spike protein (1-1147)(K986P_V987P_T887W_A1020W) WhcAg construct
MFVFLVLLPLVSSQCVNLTTRTQLPPAYTNSFTRGVYYPDKVFRSSVLHSTQDLFLPFFSNVTWFHAIHVSGTNGTKRFDNPVLPFNDGVYFASTEKSNIIRGWIFGTTLDSKTQSLLIVNNATNVVIKVCEFQFCNDPFLGVYYHKNNKSWMESEFRVYSSANNCTFEYVSQPFLMDLEGKQGNFKNLREFVFKNIDGYFKIYSKHTPINLVRDLPQGFSALEPLVDLPIGINITRFQTLLALHRRYLTPGDSSSGWTAGAAAYYVGYLQPRTFLLKYNENGTITDAVDCALDPLSETKCTLKSFTVEKGIYQTSNFRVQPTESIVRFPNITNLCPFGEVFNATRFASVYAWNRKRISNCVADYSVLYNSASFSTFKCYGVSPTKLNDLCFTNVYADSFVIRGDEVRQIAPGQTGKIADYNYKLPDDFTGCVIAWNSNNLDSKVGGNYNYLYRLFRKSNLKPFERDISTEIYQAGSTPCNGVEGFNCYFPLQSYGFQPTNGVGYQPYRVVVLSFELLHAPATVCGPKKSTNLVKNKCVNFNFNGLTGTGVLTESNKKFLPFQQFGRDIADTTDAVRDPQTLEILDITPCSFGGVSVITPGTNTSNQVAVLYQDVNCTEVPVAIHADQLTPTWRVYSTGSNVFQTRAGCLIGAEHVNNSYECDIPIGAGICASYQTQTNSPRRARSVASQSIIAYTMSLGAENSVAYSNNSIAIPTNFTISVTTEILPVSMTKTSVDCTMYICGDSTECSNLLLQYGSFCTQLNRALTGIAVEQDKNTQEVFAQVKQIYKTPPIKDFGGFNFSQILPDPSKPSKRSFIEDLLFNKVTLADAGFIKQYGDCLGDIAARDLICAQKFNGLTVLPPLLTDEMIAQYTSALLAGTITSGWWFGAGAALQIPFAMQMAYRFNGIGVTQNVLYENQKLIANQFNSAIGKIQDSLSSTASALGKLQDVVNQNAQALNTLVKQLSSNFGAISSVLNDILSRLDPPEAEVQIDRLITGRLQSLQTYVTQQLIRAAEIRWSANLAATKMSECVLGQSKRVDFCGKGYHLMSFPQSAPHGVVFLHVTYVPAQEKNFTTAPAICHDGKAHFPREGVFVSNGTHWFVTQRNFYEPQIITTDNTFVSGNCDVVIGIVNNTVYDPLQPELDSGGGGSDIDPYKEFGSSYQLLNFLPLDFFPDLNALVDTATALYEEELTGREHCSPHHTAIRQALVCWDELTKLIAWMSSNITSEQVRTIIVNHVNDTWGLKVRQSLWFHLSCLTFGQHTVQEFLVSFGVWIRTPAPYRPPNAPILSTLPEHTVIC

SEQ ID NO: 10801 - protein, 1301 aa, Artificial Sequence
  SARS-CoV-2/Germany/BavPat1/2020__EPI_ISL_406862 spike protein (1-1147)(K986P_V987P_T887W_A1020W) WhcAg construct
MFVFLVLLPLVSSQCVNLTTRTQLPPAYTNSFTRGVYYPDKVFRSSVLHSTQDLFLPFFSNVTWFHAIHVSGTNGTKRFDNPVLPFNDGVYFASTEKSNIIRGWIFGTTLDSKTQSLLIVNNATNVVIKVCEFQFCNDPFLGVYYHKNNKSWMESEFRVYSSANNCTFEYVSQPFLMDLEGKQGNFKNLREFVFKNIDGYFKIYSKHTPINLVRDLPQGFSALEPLVDLPIGINITRFQTLLALHRSYLTPGDSSSGWTAGAAAYYVGYLQPRTFLLKYNENGTITDAVDCALDPLSETKCTLKSFTVEKGIYQTSNFRVQPTESIVRFPNITNLCPFGEVFNATRFASVYAWNRKRISNCVADYSVLYNSASFSTFKCYGVSPTKLNDLCFTNVYADSFVIRGDEVRQIAPGQTGKIADYNYKLPDDFTGCVIAWNSNNLDSKVGGNYNYLYRLFRKSNLKPFERDISTEIYQAGSTPCNGVEGFNCYFPLQSYGFQPTNGVGYQPYRVVVLSFELLHAPATVCGPKKSTNLVKNKCVNFNFNGLTGTGVLTESNKKFLPFQQFGRDIADTTDAVRDPQTLEILDITPCSFGGVSVITPGTNTSNQVAVLYQGVNCTEVPVAIHADQLTPTWRVYSTGSNVFQTRAGCLIGAEHVNNSYECDIPIGAGICASYQTQTNSPRRARSVASQSIIAYTMSLGAENSVAYSNNSIAIPTNFTISVTTEILPVSMTKTSVDCTMYICGDSTECSNLLLQYGSFCTQLNRALTGIAVEQDKNTQEVFAQVKQIYKTPPIKDFGGFNFSQILPDPSKPSKRSFIEDLLFNKVTLADAGFIKQYGDCLGDIAARDLICAQKFNGLTVLPPLLTDEMIAQYTSALLAGTITSGWWFGAGAALQIPFAMQMAYRFNGIGVTQNVLYENQKLIANQFNSAIGKIQDSLSSTASALGKLQDVVNQNAQALNTLVKQLSSNFGAISSVLNDILSRLDPPEAEVQIDRLITGRLQSLQTYVTQQLIRAAEIRWSANLAATKMSECVLGQSKRVDFCGKGYHLMSFPQSAPHGVVFLHVTYVPAQEKNFTTAPAICHDGKAHFPREGVFVSNGTHWFVTQRNFYEPQIITTDNTFVSGNCDVVIGIVNNTVYDPLQPELDSGGGGSDIDPYKEFGSSYQLLNFLPLDFFPDLNALVDTATALYEEELTGREHCSPHHTAIRQALVCWDELTKLIAWMSSNITSEQVRTIIVNHVNDTWGLKVRQSLWFHLSCLTFGQHTVQEFLVSFGVWIRTPAPYRPPNAPILSTLPEHTVIC

SEQ ID NO: 10802 - protein, 1301 aa, Artificial Sequence
  SARS-CoV-2/Wuhan/HBCDC-HB-02/2020__EPI_ISL_412978 spike protein (1-1147)(K986P_V987P_T887W_A1020W) WhcAg construct
MFVFLVLLPLVSSQCVNLTTRTQLPPAYTNSFTRGVYYPDKVFRSSVLHSTQDLFLPFFSNVTWFHAIHVSGTNGTKRFDNPVLPFNDGVYFASTEKSNIIRGWIFGTTLDSKTQSLLIVNNATNVVIKVCEFQFCNDPFLGVYYHKNNKSWMESEFRVYSSANNCTFEYVSQPFLMDLEGKQGNFKNLREFVFKNIDGYFKIYSKHTPINLVRDLPQGFSALEPLVDLPIGINITRFQTLLALHRSYLTPGDSSSGWTAGAAAYYVGYLQPRTFLLKYNENGTITDAVDCALDPLSETKCTLKSFTVEKGIYQTSNFRVQPTESIVRFPNITNLCPFGEVFNATRFASVYAWNRKRISNCVADYSVLYNSASFSTFKCYGVSPTKLNDLCFTNVYADSFVIRGDEVRQIAPGQTGKIADYNYKLPDDFTGCVIAWNSNNLDSKVGGNYNYLYRLFRKSNLKPFERDISTEIYQAGSTPCNGVEGFNCYFPLQSYGFQPTNGVGYQPYRVVVLSFELLHAPATVCGPKKSTNLVKNKCVNFNFNGLTGTGVLTESNKKFLPFQQFGRDIADTTDAVRDPQTLEILDITPCSFGGVSVITPGTNTSNQVAVLYQDVNCTEVPVAIHADQLTPTWRVYSTGSNVFQTRAGCLIGAEHVNNSYECDIPIGAGICASYQTQTNSPRRARSVASQSIIAYTMSLGAENSVAYSNNSIAIPTNFTISVTTEILPVSMTKTSVDCTMYICGDSTECSNFLLQYGSFCTQLNRALTGIAVEQDKNTQEVFAQVKQIYKTPPIKDFGGFNFSQILPDPSKPSKRSFIEDLLFNKVTLADAGFIKQYGDCLGDIAARDLICAQKFNGLTVLPPLLTDEMIAQYTSALLAGTITSGWWFGAGAALQIPFAMQMAYRFNGIGVTQNVLYENQKLIANQFNSAIGKIQDSLSSTASALGKLQDVVNQNAQALNTLVKQLSSNFGAISSVLNDILSRLDPPEAEVQIDRLITGRLQSLQTYVTQQLIRAAEIRWSANLAATKMSECVLGQSKRVDFCGKGYHLMSFPQSAPHGVVFLHVTYVPAQEKNFTTAPAICHDGKAHFPREGVFVSNGTHWFVTQRNFYEPQIITTDNTFVSGNCDVVIGIVNNTVYDPLQPELDSGGGGSDIDPYKEFGSSYQLLNFLPLDFFPDLNALVDTATALYEEELTGREHCSPHHTAIRQALVCWDELTKLIAWMSSNITSEQVRTIIVNHVNDTWGLKVRQSLWFHLSCLTFGQHTVQEFLVSFGVWIRTPAPYRPPNAPILSTLPEHTVIC

SEQ ID NO: 10803 - protein, 1301 aa, Artificial Sequence
  SARS-CoV-2/Australia/QLD02/2020__EPI_ISL_407896 spike protein (1-1147)(K986P_V987P_T887W_A1020W) WhcAg construct
MFVFLVLLPLVSSQCVNLTTRTQLPPAYTNSFTRGVYYPDKVFRSSVLHSTQDLFLPFFSNVTWFHAIHVSGTNGTKRFDNPVLPFNDGVYFASTEKSNIIRGWIFGTTLDSKTQSLLIVNNATNVVIKVCEFQFCNDPFLGVYYHKNNKSWMESEFRVYSSANNCTFEYVSQPFLMDLEGKQGNFKNLREFVFKNIDGYFKIYSKHTPINLVRDLPQGFSALEPLVDLPIGINITRFQTLLALHRSYLTPGDSSSGWTAGAAAYYVGYLQPRTFLLKYNENGTITDAVDCALDPLSETKCTLKSFTVEKGIYQTSNFRVQPTESIVRFPNITNLCPFGEVFNATRFASVYAWNRKRISNCVADYSVLYNSASFSTFKCYGVSPTKLNDLCFTNVYADSFVIRGDEVRQIAPGQTGKIADYNYKLPDDFTGCVIAWNSNNLDSKVGGNYNYLYRLFRKSNLKPFERDISTEIYQAGSTPCNGVEGFNCYFPLQSYGFQPTNGVGYQPYRVVVLSFELLHAPATVCGPKKSTNLVKNKCVNFNFNGLTGTGVLTESNKKFLPFQQFGRDIADTTDAVRDPQTLEILDITPCSFGGVSVITPGTNTSNQVAVLYQDVNCTEVPVAIHADQLTPTWRVYSTGSNVFQTRAGCLIGAEHVNNSYECDIPIGAGICASYQTQTNSPRRARSVASQSIIAYTMSLGAENSVAYSNNSIAIPTNFTISVTTEILPVSMTKTSVDCTMYICGDSTECSNLLLQYGSFCTQLNRALTGIAVEQDKNTQEVFAQVKQIYKTPPIKDFGGFNFSQILPDPSKPSKRSFIEDLLFNKVTLADAGFIKQYGDCLGDIAARDLICAQKFNGLTVLPPLLTDEMIAQYTSALLAGTITSGWWFGAGAALQIPFAMQMAYRFNGIGVTQNVLYENQKLIANQFNSAIGKIQDSLSSTASALGKLQDVVNQNAQALNTLVKQLSSNFGAISSVLNDILSRLDPPEAEVQIDRLITGRLQSLQTYVTQQLIRAAEIRWSANLAATKMSECVLGQSKRVDFCGKGYHLMSFPQSAPHGVVFLHVTYVPAQEKNFTTAPAICHDGKAHFPREGVFVSNGTHWFVTQRNFYEPQIITTDNTFVSGNCDVVIGIVNNTVYDPLQLELDSGGGGSDIDPYKEFGSSYQLLNFLPLDFFPDLNALVDTATALYEEELTGREHCSPHHTAIRQALVCWDELTKLIAWMSSNITSEQVRTIIVNHVNDTWGLKVRQSLWFHLSCLTFGQHTVQEFLVSFGVWIRTPAPYRPPNAPILSTLPEHTVIC

SEQ ID NO: 10804 - protein, 1301 aa, Artificial Sequence
  SARS-CoV-2/India/1-31/2020__EPI_ISL_413523 spike protein (1-1147)(K986P_V987P_T887W_A1020W) WhcAg construct
MFVFLVLLPLVSSQCVNLTTRTQLPPAYTNSFTRGVYYPDKVFRSSVLHSTQDLFLPFFSNVTWFHAIHVSGTNGTKRFDNPVLPFNDGVYFASTEKSNIIRGWIFGTTLDSKTQSLLIVNNATNVVIKVCEFQFCNDPFLGVYYHKNNKSWMESEFRVYSSANNCTFEYVSQPFLMDLEGKQGNFKNLREFVFKNIDGYFKIYSKHTPINLVRDLPQGFSALEPLVDLPIGINITRFQTLLALHRSYLTPGDSSSGWTAGAAAYYVGYLQPRTFLLKYNENGTITDAVDCALDPLSETKCTLKSFTVEKGIYQTSNFRVQPTESIVRFPNITNLCPFGEVFNATRFASVYAWNRKRISNCVADYSVLYNSASFSTFKCYGVSPTKLNDLCFTNVYADSFVIRGDEVRQIAPGQTGKIADYNYKLPDDFTGCVIAWNSNNLDSKVGGNYNYLYRLFRKSNLKPFERDISTEIYQAGSTPCNGVEGFNCYFPLQSYGFQPTNGVGYQPYRVVVLSFELLHAPATVCGPKKSTNLVKNKCVNFNFNGLTGTGVLTESNKKFLPFQQFGRDIADTTDAVRDPQTLEILDITPCSFGGVSVITPGTNTSNQVAVLYQDVNCTEVPVAIHADQLTPTWRVYSTGSNVFQTRAGCLIGAEHVNNSYECDIPIGAGICASYQTQTNSPRRARSVASQSIIAYTMSLGAENSVAYSNNSIAIPTNFTISVTTEILPVSMTKTSVDCTMYICGDSTECSNLLLQYGSFCTQLNRALTGIAVEQDKNTQEVFAQVKQIYKTPPIKDFGGFNFSQILPDPSKPSKRSFIEDLLFNKVTLADAGFIKQYGDCLGDIAARDLICAQKFNGLTVLPPLLTDEMIAQYTSALLAGTITSGWWFGAGAALQIPFAMQMAYRFNGIGVTQNVLYENQKLIANQFNSVIGKIQDSLSSTASALGKLQDVVNQNAQALNTLVKQLSSNFGAISSVLNDILSRLDPPEAEVQIDRLITGRLQSLQTYVTQQLIRAAEIRWSANLAATKMSECVLGQSKRVDFCGKGYHLMSFPQSAPHGVVFLHVTYVPAQEKNFTTAPAICHDGKAHFPREGVFVSNGTHWFVTQRNFYEPQIITTDNTFVSGNCDVVIGIVNNTVYDPLQPELDSGGGGSDIDPYKEFGSSYQLLNFLPLDFFPDLNALVDTATALYEEELTGREHCSPHHTAIRQALVCWDELTKLIAWMSSNITSEQVRTIIVNHVNDTWGLKVRQSLWFHLSCLTFGQHTVQEFLVSFGVWIRTPAPYRPPNAPILSTLPEHTVIC

SEQ ID NO: 10805 - protein, 1301 aa, Artificial Sequence
  SARS-CoV-2/Guangdong/GD2020087-P0008/2020__EPI_ISL_413863 spike protein (1-1147)(K986P_V987P_T887W_A1020W) WhcAg construct
MFVFLVLLPLVSSQCVNLTTRTQLPPAYTNSFTRGVYYPDKVFRSSVLHSTQDLFLPFFSNVTWFHAIHVSGTNGTKRFDNPVLPFNDGVYFASTEKSNIIRGWIFGTTLDSKTQSLLIVNNATNVVIKVCEFQFCNDPFLGVYYHKNNKSWMESEFRVYSSANNCTFEYVSQPFLMDLEGKQGNFKNLREFVFKNIDGYFKIYSKHTPINLVRDLPQGFSALEPLVDLPIGINITRFQTLLALHRSYLTPGDSSSGWTAGAAAYYVGYLQPRTFLLKYNENGTITDAVDCALDPLSETKCTLKSFTVEKGIYQTSNFRVQPTESIVRFPNITNLCPFGEVFNATRFASVYAWNRKRISNCVADYSVLYNSASFSTFKCYGVSPTKLNDLCFTNVYADSFVIRGDEVREIAPGQTGKIADYNYKLPDDFTGCVIAWNSNNLDSKVGGNYNYLYRLFRKSNLKPFERDISTEIYQAGSTPCNGVEGFNCYFPLQSYGFQPTNGVGYQPYRVVVLSFELLHAPATVCGPKKSTNLVKNKCVNFNFNGLTGTGVLTESNKKFLPFQQFGRDIADTTDAVRDPQTLEILDITPCSFGGVSVITPGTNTSNQVAVLYQDVNCTEVPVAIHADQLTPTWRVYSTGSNVFQTRAGCLIGAEHVNNSYECDIPIGAGICASYQTQTNSPRRARSVASQSIIAYTMSLGAENSVAYSNNSIAIPTNFTISVTTEILPVSMTKTSVDCTMYICGDSTECSNLLLQYGSFCTQLNRALTGIAVEQDKNTQEVFAQVKQIYKTPPIKDFGGFNFSQILPDPSKPSKRSFIEDLLFNKVTLADAGFIKQYGDCLGDIAARDLICAQKFNGLTVLPPLLTDEMIAQYTSALLAGTITSGWWFGAGAALQIPFAMQMAYRFNGIGVTQNVLYENQKLIANQFNSAIGKIQDSLSSTASALGKLQDVVNQNAQALNTLVKQLSSNFGAISSVLNDILSRLDPPEAEVQIDRLITGRLQSLQTYVTQQLIRAAEIRWSANLAATKMSECVLGQSKRVDFCGKGYHLMSFPQSAPHGVVFLHVTYVPAQEKNFTTAPAICHDGKAHFPREGVFVSNGTHWFVTQRNFYEPQIITTDNTFVSGNCDVVIGIVNNTVYDPLQPELDSGGGGSDIDPYKEFGSSYQLLNFLPLDFFPDLNALVDTATALYEEELTGREHCSPHHTAIRQALVCWDELTKLIAWMSSNITSEQVRTIIVNHVNDTWGLKVRQSLWFHLSCLTFGQHTVQEFLVSFGVWIRTPAPYRPPNAPILSTLPEHTVIC

SEQ ID NO: 10806 - protein, 1301 aa, Artificial Sequence
  SARS-CoV-2/Sweden/01/2020__EPI_ISL_411951 spike protein (1-1147)(K986P_V987P_T887W_A1020W) WhcAg construct
MFVFLVLLPLVSSQCVNLTTRTQLPPAYTNSFTRGVYYPDKVFRSSVLHSTQDLFLPFFSNVTWFHAIHVSGTNGTKRFDNPVLPFNDGVYFASTEKSNIIRGWIFGTTLDSKTQSLLIVNNATNVVIKVCEFQFCNDPFLGVYYHKNNKSWMESEFRVYSSANNCTFEYVSQPFLMDLEGKQGNFKNLREFVFKNIDGYFKIYSKHTPINLVRDLPQGFSALEPLVDLPIGINITRFQTLLALHRSYLTPGDSSSGWTAGAAAYYVGYLQPRTFLLKYNENGTITDAVDCALDPLSETKCTLKSFTVEKGIYQTSNFRVQPTESIVRFPNITNLCPFGEVFNATRFASVYAWNRKRISNCVADYSVLYNSASFSTFKCYGVSPTKLNDLCFTNVYADSFVIRGDEVRQIAPGQTGKIADYNYKLPDDFTGCVIAWNSNNLDSKVGGNYNYLYRLFRKSNLKPFERDISTEIYQAGSTPCNGVEGFNCYFPLQSYGFQPTNGVGYQPYRVVVLSFELLHAPATVCGPKKSTNLVKNKCVNFNFNGLTGTGVLTESNKKFLPFQQFGRDIADTTDAVRDPQTLEILDITPCSFGGVSVITPGTNTSNQVAVLYQDVNCTEVPVAIHADQLTPTWRVYSTGSNVFQTRAGCLIGAEHVNNSYECDIPIGAGICASYQTQTNSPRRARSVASQSIIAYTMSLGAENSVAYSNNSIAIPTNFTISVTTEILPVSMTKTSVDCTMYICGDSTECSNLLLQYGSFCTQLNRALTGIAVEQDKNTQEVFAQVKQIYKTPPIKDCGGFNFSQILPDPSKPSKRSFIEDLLFNKVTLADAGFIKQYGDCLGDIAARDLICAQKFNGLTVLPPLLTDEMIAQYTSALLAGTITSGWWFGAGAALQIPFAMQMAYRFNGIGVTQNVLYENQKLIANQFNSAIGKIQDSLSSTASALGKLQDVVNQNAQALNTLVKQLSSNFGAISSVLNDILSRLDPPEAEVQIDRLITGRLQSLQTYVTQQLIRAAEIRWSANLAATKMSECVLGQSKRVDFCGKGYHLMSFPQSAPHGVVFLHVTYVPAQEKNFTTAPAICHDGKAHFPREGVFVSNGTHWFVTQRNFYEPQIITTDNTFVSGNCDVVIGIVNNTVYDPLQPELDSGGGGSDIDPYKEFGSSYQLLNFLPLDFFPDLNALVDTATALYEEELTGREHCSPHHTAIRQALVCWDELTKLIAWMSSNITSEQVRTIIVNHVNDTWGLKVRQSLWFHLSCLTFGQHTVQEFLVSFGVWIRTPAPYRPPNAPILSTLPEHTVIC

SEQ ID NO: 10807 - protein, 1301 aa, Artificial Sequence
  SARS-CoV-2/Tianmen/HBCDC-HB-07/2020__EPI_ISL_412983 spike protein (1-1147)(K986P_V987P_T887W_A1020W) WhcAg construct
MFVFLVLLPLVSSQCVNLTTRTQLPPAYTNSFTRGVYYPDKVFRSSVLHSTQDLFLPFFSNVTWFHAIHVSGTNGTKRFDNPVLPFNDGVYFASTEKSNIIRGWIFGTTLDSKTQSLLIVNNATNVVIKVCEFQFCNDPFLGVYYHKNNKSWMESEFRVYSSANNCTFEYVSQPFLMDLEGKQGNFKNLREFVFKNIDGYFKIYSKHTPINLVRDLPQGFSALEPLVDLPIGINITRFQTLLALHRSYLTPGDSSSGWTAGAAAYYVGYLQPRTFLLKYNENGTITDAVDCALDPLSETKCTLKSFTVEKGIYQTSNFRVQPTESIVRFPNITNLCPFGEVFNATRFASVYAWNRKRISNCVADYSVLYNSASFSTFKCYGVSPTKLNDLCFTNVYADSFVIRGDEVRQIAPGQTGKIADYNYKLPDDFTGCVIAWNSNNLDSKVGGNYNYLYRLFRKSNLKPFERDISTEIYQAGSTPCNGVEGFNCYFPLQSYGFQPTNGVGYQPYRVVVLSFELLHAPATVCGPKKSTNLVKNKCVNFNFNGLTGTGVLTESNKKFLPFQQFGRDIADTTDAVRDPQTLEILDITPCSFGGVSVITPGTNTSNQVAVLYQDLNCTEVPVAIHADQLTPTWRVYSTGSNVFQTRAGCLIGAEHVNNSYECDIPIGAGICASYQTQTNSPRRARSVASQSIIAYTMSLGAENSVAYSNNSIAIPTNFTISVTTEILPVSMTKTSVDCTMYICGDSTECSNLLLQYGSFCTQLNRALTGIAVEQDKNTQEVFAQVKQIYKTPPIKDFGGFNFSQILPDPSKPSKRSFIEDLLFNKVTLADAGFIKQYGDCLGDIAARDLICAQKFNGLTVLPPLLTDEMIAQYTSALLAGTITSGWWFGAGAALQIPFAMQMAYRFNGIGVTQNVLYENQKLIANQFNSAIGKIQDSLSSTASALGKLQDVVNQNAQALNTLVKQLSSNFGAISSVLNDILSRLDPPEAEVQIDRLITGRLQSLQTYVTQQLIRAAEIRWSANLAATKMSECVLGQSKRVDFCGKGYHLMSFPQSAPHGVVFLHVTYVPAQEKNFTTAPAICHDGKAHFPREGVFVSNGTHWFVTQRNFYEPQIITTDNTFVSGNCDVVIGIVNNTVYDPLQPELDSGGGGSDIDPYKEFGSSYQLLNFLPLDFFPDLNALVDTATALYEEELTGREHCSPHHTAIRQALVCWDELTKLIAWMSSNITSEQVRTIIVNHVNDTWGLKVRQSLWFHLSCLTFGQHTVQEFLVSFGVWIRTPAPYRPPNAPILSTLPEHTVIC

SEQ ID NO: 10808 - protein, 1301 aa, Artificial Sequence
  SARS-CoV-2/Hong Kong/case42_VM20002493/2020__EPI_ISL_414527 spike protein (1-1147)(K986P_V987P_T887W_A1020W) WhcAg construct
MFVFLVLLPLVSSQCVNLTTRTQLPPAYTNSFTRGVYYPDKVFRSSVLHSTQDLFLPFFSNVTWFHAIHVSGTNGTKRFDNPVLPFNDGVYFASTEKSNIIRGWIFGTTLDSKTQSLLIVNNATNVVIKVCEFQFCNDPFLGVYYHKNNKSWMESEFRVYSSANNCTFEYVSQPFLMDLEGKQGNFKNLREFVFKNIDGYFKIYSKHTPINLVRDLPQGFSALEPLVDLPIGINITRFQTLLALHRSYLTPGDSSSGWTAGAAAYYVGYLQPRTFLLKYNENGTITDAVDCALDPLSETKCTLKSFTVEKGIYQTSNFRVQPTESIVRFPNITNLCPFGEVFNATRFASVYAWNRKRISNCVADYSVLYNSASFSTFKCYGVSPTKLNDLCFTNVYADSFVIRGDEVRQIAPGQTGKIADYNYKLPDDFTGCVIAWNSNNLDSKVGGNYNYLYRLFRKSNLKPFERDISTEIYQAGSTPCNGVEGFNCYFPLQSYGFQPTNGVGYQPYRVVVLSFELLHAPATVCGPKKSTNLVKNKCVNFNFNGLTGTGVLTESNKKFLPFQQFGRDIADTTDAVRDPQTLEILDITPCSFGGVSVITPGTNTSNQVAVLYQDVNCTEVPVAIHADQLTPTWRVYSTGSNVFQTRAGCLIGAEHVNNSYECDIPIGAGICASYQTQTNSPRRARSVASQSIIAYTMSLGAENSVAYSNNSIAIPTNFAISVTTEILPVSMTKTSVDCTMYICGDSTECSNLLLQYGSFCTQLNRALTGIAVEQDKNTQEVFAQVKQIYKTPPIKDFGGFNFSQILPDPSKPSKRSFIEDLLFNKVTLADAGFIKQYGDCLGDIAARDLICAQKFNGLTVLPPLLTDEMIAQYTSALLAGTITSGWWFGAGAALQIPFAMQMAYRFNGIGVTQNVLYENQKLIANQFNSAIGKIQDSLSSTASALGKLQDVVNQNAQALNTLVKQLSSNFGAISSVLNDILSRLDPPEAEVQIDRLITGRLQSLQTYVTQQLIRAAEIRWSANLAATKMSECVLGQSKRVDFCGKGYHLMSFPQSAPHGVVFLHVTYVPAQEKNFTTAPAICHDGKAHFPREGVFVSNGTHWFVTQRNFYEPQIITTDNTFVSGNCDVVIGIVNNTVYDPLQPELDSGGGGSDIDPYKEFGSSYQLLNFLPLDFFPDLNALVDTATALYEEELTGREHCSPHHTAIRQALVCWDELTKLIAWMSSNITSEQVRTIIVNHVNDTWGLKVRQSLWFHLSCLTFGQHTVQEFLVSFGVWIRTPAPYRPPNAPILSTLPEHTVIC

SEQ ID NO: 10809 - protein, 1301 aa, Artificial Sequence
  SARS-CoV-2/USA/CruiseA-23/2020__EPI_ISL_414482 spike protein (1-1147)(K986P_V987P_T887W_A1020W) WhcAg construct
MFVFLVLLPLVSSQCVNLTTRTQLPPAYTNSFTRGVYYPDKVFRSSVLHSTQDLFLPFFSNVTWFHAIHVSGTNGTKRFDNPVLPFNDGVYFASTEKSNIIRGWIFGTTLDSKTQSLLIVNNATNVVIKVCEFQFCNDPFLGVYYHKNNKSWMESEFRVYSSANNCTFEYVSQPFLMDLEVKQGNFKNLREFVFKNIDGYFKIYSKHTPINLVRDLPQGFSALEPLVDLPIGINITRFQTLLALHRSYLTPGDSSSGWTAGAAAYYVGYLQPRTFLLKYNENGTITDAVDCALDPLSETKCTLKSFTVEKGIYQTSNFRVQPTESIVRFPNITNLCPFGEVFNATRFASVYAWNRKRISNCVADYSVLYNSASFSTFKCYGVSPTKLNDLCFTNVYADSFVIRGDEVRQIAPGQTGKIADYNYKLPDDFTGCVIAWNSNNLDSKVGGNYNYLYRLFRKSNLKPFERDISTEIYQAGSTPCNGVEGFNCYFPLQSYGFQPTNGVGYQPYRVVVLSFELLHAPATVCGPKKSTNLVKNKCVNFNFNGLTGTGVLTESNKKFLPFQQFGRDIADTTDAVRDPQTLEILDITPCSFGGVSVITPGTNTSNQVAVLYQDVNCTEVPVAIHADQLTPTWRVYSTGSNVFQTRAGCLIGAEHVNNSYECDIPIGAGICASYQTQTNSPRRARSVASQSIIAYTMSLGAENSVAYSNNSIAIPTNFTISVTTEILPVSMTKTSVDCTMYICGDSTECSNLLLQYGSFCTQLNRALTGIAVEQDKNTQEVFAQVKQIYKTPPIKDFGGFNFSQILPDPSKPSKRSFIEDLLFNKVTLADAGFIKQYGDCLGDIAARDLICAQKFNGLTVLPPLLTDEMIAQYTSALLAGTITSGWWFGAGAALQIPFAMQMAYRFNGIGVTQNVLYENQKLIANQFNSAIGKIQDSLSSTASALGKLQDVVNQNAQALNTLVKQLSSNFGAISSVLNDILSRLDPPEAEVQIDRLITGRLQSLQTYVTQQLIRAAEIRWSANLAATKMSECVLGQSKRVDFCGKGYHLMSFPQSAPHGVVFLHVTYVPAQEKNFTTAPAICHDGKAHFPREGVFVSNGTHWFVTQRNFYEPQIITTDNTFVSGNCDVVIGIVNNTVYDPLQPELDSGGGGSDIDPYKEFGSSYQLLNFLPLDFFPDLNALVDTATALYEEELTGREHCSPHHTAIRQALVCWDELTKLIAWMSSNITSEQVRTIIVNHVNDTWGLKVRQSLWFHLSCLTFGQHTVQEFLVSFGVWIRTPAPYRPPNAPILSTLPEHTVIC

SEQ ID NO: 10810 - protein, 1301 aa, Artificial Sequence
  SARS-CoV-2/Hong Kong/case85_VM20002868/2020__EPI_ISL_414519 spike protein (1-1147)(K986P_V987P_T887W_A1020W) WhcAg construct
MFVFLVLVPLVSSQCVNLTTRTQLPPAYTNSFTRGVYYPDKVFRSSVLHSTQDLFLPFFSNVTWFHAIHVSGTNGTKRFDNPVLPFNDGVYFASTEKSNIIRGWIFGTTLDSKTQSLLIVNNATNVVIKVCEFQFCNDPFLGVYYHKNNKSWMESEFRVYSSANNCTFEYVSQPFLMDLEGKQGNFKNLREFVFKNIDGYFKIYSKHTPINLVRDLPQGFSALEPLVDLPIGINITRFQTLLALHRSYLTPGDSSSGWTAGAAAYYVGYLQPRTFLLKYNENGTITDAVDCALDPLSETKCTLKSFTVEKGIYQTSNFRVQPTESIVRFPNITNLCPFGEVFNATRFASVYAWNRKRISNCVADYSVLYNSASFSTFKCYGVSPTKLNDLCFTNVYADSFVIRGDEVRQIAPGQTGKIADYNYKLPDDFTGCVIAWNSNNLDSKVGGNYNYLYRLFRKSNLKPFERDISTEIYQAGSTPCNGVEGFNCYFPLQSYGFQPTNGVGYQPYRVVVLSFELLHAPATVCGPKKSTNLVKNKCVNFNFNGLTGTGVLTESNKKFLPFQQFGRDIADTTDAVRDPQTLEILDITPCSFGGVSVITPGTNTSNQVAVLYQDVNCTEVPVAIHADQLTPTWRVYSTGSNVFQTRAGCLIGAEHVNNSYECDIPIGAGICASYQTQTNSPRRARSVASQSIIAYTMSLGAENSVAYSNNSIAIPTNFTISVTTEILPVSMTKTSVDCTMYICGDSTECSNLLLQYGSFCTQLNRALTGIAVEQDKNTQEVFAQVKQIYKTPPIKDFGGFNFSQILPDPSKPSKRSFIEDLLFNKVTLADAGFIKQYGDCLGDIAARDLICAQKFNGLTVLPPLLTDEMIAQYTSALLAGTITSGWWFGAGAALQIPFAMQMAYRFNGIGVTQNVLYENQKLIANQFNSAIGKIQDSLSSTASALGKLQDVVNQNAQALNTLVKQLSSNFGAISSVLNDILSRLDPPEAEVQIDRLITGRLQSLQTYVTQQLIRAAEIRWSANLAATKMSECVLGQSKRVDFCGKGYHLMSFPQSAPHGVVFLHVTYVPAQEKNFTTAPAICHDGKAHFPREGVFVSNGTHWFVTQRNFYEPQIITTDNTFVSGNCDVVIGIVNNTVYDPLQPELDSGGGGSDIDPYKEFGSSYQLLNFLPLDFFPDLNALVDTATALYEEELTGREHCSPHHTAIRQALVCWDELTKLIAWMSSNITSEQVRTIIVNHVNDTWGLKVRQSLWFHLSCLTFGQHTVQEFLVSFGVWIRTPAPYRPPNAPILSTLPEHTVIC

SEQ ID NO: 10811 - protein, 1301 aa, Artificial Sequence; identical to SEQ ID NO: 10801
  SARS-CoV-2/England/200990660/2020__EPI_ISL_414523 spike protein (1-1147)(K986P_V987P_T887W_A1020W) WhcAg construct

SEQ ID NO: 10812 - protein, 1301 aa, Artificial Sequence
  SARS-CoV-2/Australia/NSW09/2020__EPI_ISL_413595 spike protein (1-1147)(K986P_V987P_T887W_A1020W) WhcAg construct
MFVFLVLLPLVSSQCVNLTTRTQLPPAYTNSFTRGVYYPDKVFRSSVLHSTQDLFLPFFSNVTWFHAIHVSGTNGTKRFDNPVLPFNDGVYFASTEKSNIIRGWIFGTTLDSKTQSLLIVNNATNVVIKVCEFQFCNDPFLGVYYHKNNKSWMESEFRVYSSANNCTFEYVSQPFLMDLEGKQGNFKNLREFVFKNIDGYFKIYSKHTPINLVRDLPQGFSALEPLVDLPIGINITRFQTLLALHRSYLTPGDSSSGWTAGAAAYYVGYLQPRTFLLKYNENGTITDAVDCALDPLSETKCTLKSFTVEKGIYQTSNFRVQPTESIVRFPNITNLCPFGEVFNATRFASVYAWNRKRISNCVADYSVLYNSASFSTFKCYGVSPTKLNDLCFTNVYADSFVIRGDEVRQIAPGQTGKIADYNYKLPDDFTGCVIAWNSNNLDSKVGGNYNYLYRLFRKSNLKPFERDISTEIYQAGSTPCNGVEGFNCYFPLQSYGFQPTNGVGYQPYRVVVLSFELLHAPATVCGPKKSTNLVKNKCVNFNFNGLTGTGVLTESNKKFLPFQQFGRDIADTTDAVRDPQTLEILDITPCSFGGVSVITPGTNTSNQVAVLYQDVNCTEVPVAIHADQLTPTWRVYSTGSNVFQTRAGCLIGAEHVNNSYECDIPIGAGICASYQTQTNSPRRARSVASQSIIAYTMSLGAENSVAYSNNSIAIPTNFTISVTTEILPVSMTKTSVDCTMYICGDSTECSNLLLQYGSFCTQLNRALTGIAVEQDKNTQEVFAQVKQIYKTPPIKDFGGFNFSQILPDPSKPSKRSFIEDLLFNKVTLADAGFIKQYGDCLGDIAARDLICAQKFNGLTVLPPLLTDEMIAQYTSALLAGTITSGWWFGAGAALQIPFAMQMAYRFNGIGVTQNVLYENQKLIANQFNSAIGKIQDSLSFTASALGKLQDVVNQNAQALNTLVKQLSSNFGAISSVLNDILSRLDPPEAEVQIDRLITGRLQSLQTYVTQQLIRAAEIRWSANLAATKMSECVLGQSKRVDFCGKGYHLMSFPQSAPHGVVFLHVTYVPAQEKNFTTAPAICHDGKAHFPREGVFVSNGTHWFVTQRNFYEPQIITTDNTFVSGNCDVVIGIVNNTVYDPLQPELDSGGGGSDIDPYKEFGSSYQLLNFLPLDFFPDLNALVDTATALYEEELTGREHCSPHHTAIRQALVCWDELTKLIAWMSSNITSEQVRTIIVNHVNDTWGLKVRQSLWFHLSCLTFGQHTVQEFLVSFGVWIRTPAPYRPPNAPILSTLPEHTVIC

SEQ ID NO: 10813 - protein, 1301 aa, Artificial Sequence; identical to SEQ ID NO: 10793
  SARS-CoV-2/Australia/NSW10/2020__EPI_ISL_413596 spike protein (1-1147)(K986P_V987P_T887W_A1020W) WhcAg construct

SEQ ID NO: 10814 - protein, 1301 aa, Artificial Sequence
  SARS-CoV-2/Switzerland/1000477797/2020__EPI_ISL_413023 spike protein (1-1147)(K986P_V987P_T887W_A1020W) WhcAg construct
MFVFLVLLPLVSSQCVNLTTRTQLPPAYTNSFTRGVYYPDKVFRSSVLHSTQDLFLPFFSNVTWFHAIHVSGTNGTKRFDNPVLPFNDGVYFASTEKSNIIRGWIFGTTLDSKTQSLLIVNNATNVVIKVCEFQFCNDPFLGVYYHKNNKSWMESEFRVYSSANNCTFEYVSQPFLMDLEGKQGNFKNLREFVFKNIDGYFNIYSKHTPINLVRDLPQGFSALEPLVDLPIGINITRFQTLLALHRSYLTPGDSSSGWTAGAAAYYVGYLQPRTFLLKYNENGTITDAVDCALDPLSETKCTLKSFTVEKGIYQTSNFRVQPTESIVRFPNITNLCPFGEVFNATRFASVYAWNRKRISNCVADYSVLYNSASFSTFKCYGVSPTKLNDLCFTNVYADSFVIRGDEVRQIAPGQTGKIADYNYKLPDDFTGCVIAWNSNNLDSKVGGNYNYLYRLFRKSNLKPFERDISTEIYQAGSTPCNGVEGFNCYFPLQSYGFQPTNGVGYQPYRVVVLSFELLHAPATVCGPKKSTNLVKNKCVNFNFNGLTGTGVLTESNKKFLPFQQFGRDIADTTDAVRDPQTLEILDITPCSFGGVSVITPGTNTSNQVAVLYQGVNCTEVPVAIHADQLTPTWRVYSTGSNVFQTRAGCLIGAEHVNNSYECDIPIGAGICASYQTQTNSPRRARSVASQSIIAYTMSLGAENSVAYSNNSIAIPTNFTISVTTEILPVSMTKTSVDCTMYICGDSTECSNLLLQYGSFCTQLNRALTGIAVEQDKNTQEVFAQVKQIYKTPPIKDFGGFNFSQILPDPSKPSKRSFIEDLLFNKVTLADAGFIKQYGDCLGDIAARDLICAQKFNGLTVLPPLLTDEMIAQYTSALLAGTITSGWWFGAGAALQIPFAMQMAYRFNGIGVTQNVLYENQKLIANQFNSAIGKIQDSLSSTASALGKLQDVVNQNAQALNTLVKQLSSNFGAISSVLNDILSRLDPPEAEVQIDRLITGRLQSLQTYVTQQLIRAAEIRWSANLAATKMSECVLGQSKRVDFCGKGYHLMSFPQSAPHGVVFLHVTYVPAQEKNFTTAPAICHDGKAHFPREGVFVSNGTHWFVTQRNFYEPQIITTDNTFVSGNCDVVIGIVNNTVYDPLQPELDSGGGGSDIDPYKEFGSSYQLLNFLPLDFFPDLNALVDTATALYEEELTGREHCSPHHTAIRQALVCWDELTKLIAWMSSNITSEQVRTIIVNHVNDTWGLKVRQSLWFHLSCLTFGQHTVQEFLVSFGVWIRTPAPYRPPNAPILSTLPEHTVIC

SEQ ID NO: 10815 - protein, 1301 aa, Artificial Sequence
  SARS-CoV-2/Belgium/BA-02291/2020__EPI_ISL_415159 spike protein (1-1147)(K986P_V987P_T887W_A1020W) WhcAg construct
MFVFLVLLPLVSSQCVNLTTRTQLPPAYTNSFTRGVYYPDKVFRSSVLHSTQDLFLPFFSNVTWFHAIHVSGTNGTKRFDNPVLPFNDGVYFASTEKSNIIRGWIFGTTLDSKTQSLLIVNNATNVVIKVCEFQFCNDPFLGVYYHKNNKSWMESEFRVYSSANNCTFEYVSQPFLMDLEGKQGNFKNLREFVFKNIDGYFKIYSKHTPINLVRDLPQGFSALEPLVDLPIGINITRFQTLLALHRSYLTPGDSSSGWTAGAAAYYVGYLQPRTFLLKYNENGTITDAVDCALDPLSETKCTLKSFTVEKGIYQTSNFRVQPTESIVRFPNITNLCPFGEVFNATRFASVYAWNRKRISNCVADYSVLYNSASFSTFKCYGVSPTKLNDLCFTNVYADSFVIRGDEVRQIAPGQTGKIADYNYKLPDDFTGCVIAWNSNNLDSKVGGNYNYLYRLFRRSNLKPFERDISTEIYQAGSTPCNGVEGFNCYFPLQSYGFQPTNGVGYQPYRVVVLSFELLPAPATVCGPKKSTNLVKNKCVNFNFNGLTGTGVLTESNKKFLPFQQFGRDIADTTDAVRDPQTLEILDITPCSFGGVSVITPGTNTSNQVAVLYQGVNCTEVPVAIHADQLTPTWRVYSTGSNVFQTRAGCLIGAEHVNNSYECDIPIGAGICASYQTQTNSPRRARSVASQSIIAYTMSLGAENSVAYSNNSIAIPTNFTISVTTEILPVSMTKTSVDCTMYICGDSTECSNLLLQYGSFCTQLNRALTGIAVEQDKNTQEVFAQVKQIYKTPPIKDFGGFNFSQILPDPSKPSKRSFIEDLLFNKVTLADAGFIKQYGDCLGDIAARDLICAQKFNGLTVLPPLLTDEMIAQYTSALLAGTITSGWWFGAGAALQIPFAMQMAYRFNGIGVTQNVLYENQKLIANQFNSAIGKIQDSLSSAAPALGKLQDVVNQNAQALNTLVKQLSSNFGAISSVLNDILSRLDPPEAEVQIDRLITGRLQSLQTYVTQQLIRAAEIRWSANLAATKMSECVLGQSKRVDFCGKGYHLMSFPQSAPHGVVFLHVTYVPAQEKNFTTAPAICHDGKAHFPREGVFVSNGTHWFVTQRNFYEPQIITTDNTFVSGNCDVVIGIVNNTVYDPLQPELDSGGGGSDIDPYKEFGSSYQLLNFLPLDFFPDLNALVDTATALYEEELTGREHCSPHHTAIRQALVCWDELTKLIAWMSSNITSEQVRTIIVNHVNDTWGLKVRQSLWFHLSCLTFGQHTVQEFLVSFGVWIRTPAPYRPPNAPILSTLPEHTVIC

SEQ ID NO: 10816 - protein, 1301 aa, Artificial Sequence
  SARS-CoV-2/USA/WA8-UW5/2020__EPI_ISL_413486 spike protein (1-1147)(K986P_V987P_T887W_A1020W) WhcAg construct
MFVFLVLLPLVSSQCVNLTTRTQLPPAYTNSFTRGVYYPDKVFRSSVLHSTQDLFLPFFSNVTWFHAIHVSGTNGTKRFDNPVLPFNDGVYFASTEKSNIIRGWIFGTTLDSKTQSLLIVNNATNVVIKVCEFQFCNDPFLGVYYHKNNKSWMESEFRVYSSANNCTFEYVSQPFLMDLEGKQGNFKNLREFVFKNIDGYFKIYSKHTPINLVRDLPQGFSALEPLVDLPIGINITRFQTLLALHRSYLTPGDSSSGWTAGAAAYYVGYLQPRTFLLKYNENGTITDAVDCALDPLSETKCTLKSFTVEKGIYQTSNFRVQPTESIVRFPNITNLCPFGEVFNATRFASVYAWNRKRISNCVADYSVLYNSASFSTFKCYGVSPTKLNDLCFTNVYADSFVIRGDEVRQIAPGQTGKIADYNYKLPDDFTGCVIAWNSNNLDSKVGGNYNYLYRLFRKSNLKPFERDISTEIYQAGSTPCNGVEGFNCYFPLQSYGFQPTNGVGYQPYRVVVLSFELLHAPATVCGPKKSTNLVKNKCVNFNFNGLTGTGVLTESNKKFLPFQQFGRDIADTTDAVRDPQTLEILDITPCSFGGVSVITPGTNTSNQVAVLYQDVNCTEVPVAIHADQLTPTWRVYSTGSNVFQTRAGCLIGAEYVNNSYECDIPIGAGICASYQTQTNSPRRARSVASQSIIAYTMSLGAENSVAYSNNSIAIPTNFTISVTTEILPVSMTKTSVDCTMYICGDSTECSNLLLQYGSFCTQLNRALTGIAVEQDKNTQEVFAQVKQIYKTPPIKDFGGFNFSQILPDPSKPSKRSFIEDLLFNKVTLADAGFIKQYGDCLGDIAARDLICAQKFNGLTVLPPLLTDEMIAQYTSALLAGTITSGWWFGAGAALQIPFAMQMAYRFNGIGVTQNVLYENQKLIANQFNSAIGKIQDSLSSTASALGKLQDVVNQNAQALNTLVKQLSSNFGAISSVLNDILSRLDPPEAEVQIDRLITGRLQSLQTYVTQQLIRAAEIRWSANLAATKMSECVLGQSKRVDFCGKGYHLMSFPQSAPHGVVFLHVTYVPAQEKNFTTAPAICHDGKAHFPREGVFVSNGTHWFVTQRNFYEPQIITTDNTFVSGNCDVVIGIVNNTVYDPLQPELDSGGGGSDIDPYKEFGSSYQLLNFLPLDFFPDLNALVDTATALYEEELTGREHCSPHHTAIRQALVCWDELTKLIAWMSSNITSEQVRTIIVNHVNDTWGLKVRQSLWFHLSCLTFGQHTVQEFLVSFGVWIRTPAPYRPPNAPILSTLPEHTVIC

SEQ ID NO: 10817 - protein, 1301 aa, Artificial Sequence
  SARS-CoV-2/England/20102000506/2020__EPI_ISL_415147 spike protein (1-1147)(K986P_V987P_T887W_A1020W) WhcAg construct
MFVFLVLLPLVSSQCVNLTTRTQLPPAYTNSFTRGVYYPDKVFRSSVLHSTQDLFLPFFSNVTWFHAIHVSGTNGTKRFDNPVLPFNDGVYFASTEKSNIIRGWIFGTTLDSKTQSLLIVNNATNVVIKVCEFQFCNDPFLGVYYHKNNKSWMESEFRVYSSANNCTFEYVSQPFLMDLEGKQGNFKNLREFVFKNIDGYFKIYSKHTPINLVRDLPQGFSALEPLVDLPIGINITRFQTLLALHRSYLTPGDSSSGWTAGAAAYYVGYLQPRTFLLKYNENGTITDAVDCALDPLSETKCTLKSFTVEKGIYQTSNFRVQPTESIVRFPNITNLCPFGEVFNATRFASVYAWNRKRISNCVADYSVLYNSASFSTFKCYGVSPTKLNDLCFTNVYADSFVIRGDEVRQIAPGQTGKIADYNYKLPDDFTGCVIAWNSNNLDSKVGGNYNYLYRLFRKSNLKPFERDISTEIYQAGSTPCNGVEGFNCYFPLQSYGFQPTNGVGYQPYRVVVLSFELLHAPATVCGPKKSTNLVKNKCVNFNFNGLTGTGVLTESNKKFLPFQQFGRDIADTTDAVRDPQTLEILDITPCSFGGVSVITPGTNTSNQVAVLYQGVNCTEVPVAIHADQLTPTWRVYSTGSNVFQTRAGCLIGAEHVNNSYECDIPIGAGICASYQTQTNSPRRARSVASQSIIAYTMSLGAENSVAYSNNSIAIPTNFTISVTTEILPVSMTKTSVDCTMYICGDSTECSNLLLQYGSFCTQLNRALTGIAVEQDKNTQEVFAQVKQIYKTPPIKDFGGFNFSQILPDPSKPSKRSFIEDLLFNKVTLADAGFIKQYGYCLGDIAARDLICAQKFNGLTVLPPLLTDEMIAQYTSALLAGTITSGWWFGAGAALQIPFAMQMAYRFNGIGVTQNVLYENQKLIANQFNSAIGKIQDSLSSTASALGKLQDVVNQNAQALNTLVKQLSSNFGAISSVLNDILSRLDPPEAEVQIDRLITGRLQSLQTYVTQQLIRAAEIRWSANLAATKMSECVLGQSKRVDFCGKGYHLMSFPQSAPHGVVFLHVTYVPAQEKNFTTAPAICHDGKAHFPREGVFVSNGTHWFVTQRNFYEPQIITTDNTFVSGNCDVVIGIVNNTVYDPLQPELDSGGGGSDIDPYKEFGSSYQLLNFLPLDFFPDLNALVDTATALYEEELTGREHCSPHHTAIRQALVCWDELTKLIAWMSSNITSEQVRTIIVNHVNDTWGLKVRQSLWFHLSCLTFGQHTVQEFLVSFGVWIRTPAPYRPPNAPILSTLPEHTVIC

SEQ ID NO: 10818 - protein, 1301 aa, Artificial Sequence
  SARS-CoV-2/Belgium/VAG-03013/2020__EPI_ISL_415155 spike protein (1-1147)(K986P_V987P_T887W_A1020W) WhcAg construct
MFVFLVLLPLVSSQCVNLTTRTQLPPAYTNSFTRGVYYPDKVFRSSVLHSTQDLFLPFFSNVTWFHAIHVSGTNGTKRFDNPVLPFNDGVYFASTEKSNIIRGWIFGTTLDSKTQSLLIVNNATNVVIKVCEFQFCNDPFLGVYYHKNNKSWMESEFRVYSSANNCTFEYVSQPFLMDLEGKQGNFKNLREFVFKNIDGYFKIYSKHTPINLVRDLPQGFSALEPLVDLPIGINITRFQTLLALHRSYLTPGDSSSGWTAGAAAYYVGYLQPRTFLLKYNENGTITDAVDCALDPLSETKCTLKSFTVEKGIYQTSNFRVQPTESIVRFPNITNLCPFGEVFNATRFASVYAWNRKRISNCVADYSVLYNSASFSTFKCYGVSPTKLNDLCFTNVYADSFVIRGDEVRQIAPGQTGKIADYNYKLPDDFTGCVIAWNSNNLDSKVGGNYNYLYRLFRKSNLKPFERDISTEIYQAGSTPCNGVEGFNCYFPLQSYGFQPTNGVGYQPYRVVVLSFELLHAPATVCGPKKSTNLVKNKCVNFNFNGLTGTGVLTESNKKFLPFQQFGRDIADTTDAVRDPQTLEILDITPCSFGGVSVITPGTNTSNQVAVLYQGVNCTEVPVAIHADQLTPTWRVYSTGSNVFQTRAGCLIGAEHVNNSYECDIPIGAGICASYQTQTNSPRRARSVASQSIIAYTMSLGAENSVAYSNNSIAIPTNFTISVTTEILPVSMTKTSVDCTMYICGDSTECSNLLLQYGSFCTQLNRALTGIAVEQDKNTQEVFAQVKQIYKTPPIKDFGGFNFSQILPDPSKPSKRSFIEDLLFNKVTLADAGFIKQYGDCLGDIAARDLICAQKFNGLTVLPPLLTDEMIAQYTSALLAGTITSGWWFGAGAALQIPFAMQMAYRFNGIGVTQNVLYENQKLIANQFNSAIGKIQDSLSSTATALGKLQDVVNQNAQALNTLVKQLSSNFGAISSVLNDILSRLDPPEAEVQIDRLITGRLQSLQTYVTQQLIRAAEIRWSANLAATKMSECVLGQSKRVDFCGKGYHLMSFPQSAPHGVVFLHVTYVPAQEKNFTTAPAICHDGKAHFPREGVFVSNGTHWFVTQRNFYEPQIITTDNTFVSGNCDVVIGIVNNTVYDPLQPELDSGGGGSDIDPYKEFGSSYQLLNFLPLDFFPDLNALVDTATALYEEELTGREHCSPHHTAIRQALVCWDELTKLIAWMSSNITSEQVRTIIVNHVNDTWGLKVRQSLWFHLSCLTFGQHTVQEFLVSFGVWIRTPAPYRPPNAPILSTLPEHTVIC

SEQ ID NO: 10819 - protein, 1301 aa, Artificial Sequence
  SARS-CoV-2/Belgium/BC-03016/2020__EPI_ISL_415157 spike protein (1-1147)(K986P_V987P_T887W_A1020W) WhcAg construct
MFVFLVLLPLVSSQCVNLTTRTQLPPAYTNSFTRGVYYPDKVFRSSVLHSTQDLFLPFFSNVTWFHAIHVSGTNGTKRFDNPVLPFNDGVYFASTEKSNIIRGWIFGTTLDSKTQSLLIVNNATNVVIKVCEFQFCNDPFLGVYYHKNNKSWMESEFRVYSSANNCTFEYVSQPFLMDLEGKQGNFKNLREFVFKNIDGYFKIYSKHTPINLVRDLPQGFSALEPLVDLPIGINITRFQTLLALHRSYLTPGDSSSGWTAGAAAYYVGYLQPRTFLLKYNENGTITDAVDCALDPLSETKCTLKSFTVEKGIYQTSNFRVQPTESIVRFPNITNLCPFGEVFNATRFASVYAWNRKRISNCVADYSVLYNSASFSTFKCYGVSPTKLNDLCFTNVYADSFVIRGDEVRQIAPGQTGKIADYNYKLPDDFTGCVIAWNSNNLDSKVGGNYNYLYRLFRKSNLKPFERDISTEIYQAGSTPCNGVEGFNCYFPLQSYGFQPTNGVGYQPYRVVVLSFELLHAPATVCGPKKSTNLVKNKCVNFNFNGLTGTGVLTESNKKFLPFQQFGRDIADTTDAVRDPQTLEILDITPCSFGGVSVITPGTNTSNQVAVLYQGVNCTEVPVAIHADQLTPTWRVYSTGSNVFQTRAGCLIGAEHVNNSYECDIPIGAGICASYQTQTNSPRRARSVASQSIIAYTMSLGAENSVAYSNNSIAIPTNFTISVTTEILPVSMTKTSVDCTMYICGDSTECSNLLLQYGSFCTQLNRALTGIAVEQDKNTQEVFAQVKQIYKTPPIKDFGGFNFSQILPDPSKPSKRSFIEDLLFNKVTLADAGFIKQYGDCLGDIAARDLICAQKFNGLTVLPPLLTDEMIAQYTSALLAGTITSGWWFGAGAALQIPFAMQMAYRFNGIGVTQNVLYENQKLIANQFNSAIGKIQDSLSSTAPALGKLQDVVNQNAQALNTLVKQLSSNFGAISSVLNDILSRLDPPEAEVQIDRLITGRLQSLQTYVTQQLIRAAEIRWSANLAATKMSECVLGQSKRVDFCGKGYHLMSFPQSAPHGVVFLHVTYVPAQEKNFTTAPAICHDGKAHFPREGVFVSNGTHWFVTQRNFYEPQIITTDNTFVSGNCDVVIGIVNNTVYDPLQPELDSGGGGSDIDPYKEFGSSYQLLNFLPLDFFPDLNALVDTATALYEEELTGREHCSPHHTAIRQALVCWDELTKLIAWMSSNITSEQVRTIIVNHVNDTWGLKVRQSLWFHLSCLTFGQHTVQEFLVSFGVWIRTPAPYRPPNAPILSTLPEHTVIC

SEQ ID NO: 10820 - protein, 1301 aa, Artificial Sequence
  SARS-CoV-2/Germany/BavPat3/2020__EPI_ISL_414521 spike protein (1-1147)(K986P_V987P_T887W_A1020W) WhcAg construct
MFVFLVLLPLVSSQCVNLTTRTQLPPAYTNSFTRGVYYPDKVFRSSVLHSTQDLFLPFFSNVTWFHAIHVSGTNGTKRFDNPVLPFNDGVYFASTEKSNIIRGWIFGTTLDSKTQSLLIVNNATNVVIKVCEFQFCNDPFLGVYYHKNNKSWMESEFRVYSSANNCTFEYVSQPFLMDLEGKQGNFKNLREFVFKNIDGYFKIYSKHTPINLVRDLPQGFSALEPLVDLPIGINITRFQTLLALHRSYLTPGDSSSGWTAGAAAYYVGYLQPRTFLLKYNENGTITDAVDCALDPLSETKCTLKSFTVEKGIYQTSNFRVQPTESIVRFPNITNLCPFGEVFNATRFASVYAWNRKRISNCVADYSVLYNSASFSTFKCYGVSPTKLNDLCFTNVYADSFVIRGDEVRQIAPGQTGKIADYNYKLPDDFTGCVIAWNSNNLDSKVGGNYNYLYRLFRKSNLKPFERDISTEIYQAGSTPCNGVEGFNCYFPLQSYGFQPTNGVGYQPYRVVVLSFELLHAPATVCGPKKSTNLVKNKCVNFNFNGLTGTGVLTESNKKFLPFQQFGRDIADTTDAVRDPQTLEILDITPCSFGGVSVITPGTNTSNQVAVLYQDVNCTEVPVAIHADQLTPTWRVYSTGSNVFQTRAGCLIGAEHVNNSYECDIPIGAGICASYQTQTNSPRRARSVASQSIIAYTMSLGAENSVAYSNNSIAIPTNFTISVTTEILPVSMTKTSVDCTMYICGDSTECSNLLLQYGSFCTQLNRALTGIAVEQDKNTQQVFAQVKQIYKTPPIKDFGGFNFSQILPDPSKPSKRSFIEDLLFNKVTLADAGFIKQYGDCLGDIAARDLICAQKFNGLTVLPPLLTDEMIAQYTSALLAGTITSGWWFGAGAALQIPFAMQMAYRFNGIGVTQNVLYENQKLIANQFNSAIGKIQDSLSSTASALGKLQDVVNQNAQALNTLVKQLSSNFGAISSVLNDILSRLDPPEAEVQIDRLITGRLQSLQTYVTQQLIRAAEIRWSANLAATKMSECVLGQSKRVDFCGKGYHLMSFPQSAPHGVVFLHVTYVPAQEKNFTTAPAICHDGKAHFPREGVFVSNGTHWFVTQRNFYEPQIITTDNTFVSGNCDVVIGIVNNTVYDPLQPELDSGGGGSDIDPYKEFGSSYQLLNFLPLDFFPDLNALVDTATALYEEELTGREHCSPHHTAIRQALVCWDELTKLIAWMSSNITSEQVRTIIVNHVNDTWGLKVRQSLWFHLSCLTFGQHTVQEFLVSFGVWIRTPAPYRPPNAPILSTLPEHTVIC

SEQ ID NO: 10821 - protein, 1301 aa, Artificial Sequence
  SARS-CoV-2/France/HF1805/2020__EPI_ISL_414628 spike protein (1-1147)(K986P_V987P_T887W_A1020W) WhcAg construct
MFVFLVLLPLVSSQCVNLTTRTQLPPAYTNSFTRGVYYPDKVFRSSVLHSTQDLFLPFFSNVTWFHAIHVSGTNGTKRFDNPVLPFNDGVYFASTEKSNIIRGWIFGTTLDSKTQSLLIVNNATNVVIKVCEFQFCNDPFLGVYYHKNNKSWMESEFRVYSSANNCTFEYVSQPFLMDLEGKQGNFKNLREFVFKNIDGYFKIYSKHTPINLVRDLPQGFSALEPLVDLPIGINITRFQTLLALHRSYLTPGDSSSGWTAGAAAYYVGYLQPRTFLLKYNENGTITDAVDCALDPLSETKCTLKSFTVEKGIYQTSNFRVQPTESIVRFPNITNLCPFGEVFNATRFASVYAWNRKRISNCVADYSVLYNSASFSTFKCYGVSPTKLNDLCFTNVYADSFVIRGDEVRQIAPGQTGKIADYNYKLPDDFTGCVIAWNSNNLDSKVGGNYNYLYRLFRKSNLKPFERDISTEIYQAGSTPCNGVEGFNCYFPLQSYGFQPTNGVGYQPYRVVVLSFELLHAPATVCGPKKSTNLVKNKCVNFNFNGLTGTGVLTESNKKFLPFQQFGRDIADTTDAVRDPQTLEILDITPCSFGGVSVITPGTNTSNQVAVLYQGVNCTEVPVAIHADQLTPTWRVYSTGSNVFQTRAGCLIGAEHVNNSYECDIPIGAGICASYQTQTNSPRRARSVASQSIIAYTMSLGAENSVAYSNNSIAIPTNFTISVTTEILPVSMTKTSVDCTMYICGDSTECSNLLLQYGSFCTQLNRALTGIAVEQDKNTQEVFAQVKQIYKTPPIKDFGGFNFSQILPDPSKPSKRSFIEDLLFNKVTLADAGFIKQYGDCLGDIAARDLICAQKFNGLTVLPPLLTDEMIAQYTSALLAGTITSGWWFGAGAALQIPFAMQMAYRFNGIGVTQNVLYENQKLIANQFNSAIGKIQDSLSSTASALGKLQDVVNQNAQALNTLVKQLSSNFGAISSVLNDILSRLDPPEAEVQIDRLITGRLQSLQTYVTQQLIRAAEIRWSANLAATKMSECVLGQSKRVDFCGKGYHLMSFPQSAPHGVVFLHVTYVPAQEKNFTTAPAICHDGKAHFPREGVFVSNGTHWFVTQRNFYEPQIITTDNTFVSGNCDVVIGVVNNTVYDPLQPELDSGGGGSDIDPYKEFGSSYQLLNFLPLDFFPDLNALVDTATALYEEELTGREHCSPHHTAIRQALVCWDELTKLIAWMSSNITSEQVRTIIVNHVNDTWGLKVRQSLWFHLSCLTFGQHTVQEFLVSFGVWIRTPAPYRPPNAPILSTLPEHTVIC

SEQ ID NO: 10822 - protein, 1301 aa, Artificial Sequence
  SARS-CoV-2/Netherlands/ZuidHolland_9/2020__EPI_ISL_414445 spike protein (1-1147)(K986P_V987P_T887W_A1020W) WhcAg construct
MFVFLVLLPLVSSQCVNLTTRTQLPPAYTNSFTRGVYYPDKVFRSSVLHSTQDLFLPFFSNVTWFHAIHVSGTNGTKRFDNPVLPFNDGVYFASTEKSNIIRGWIFGTTLDSKTQSLLIVNNATNVVIKVCEFQFCNDPFLGVYYHKNNKSWMESEFRVYSSANNCTFEYVSQPFLMDLEGKQGNFKNLREFVFKNIDGYFKIYSKHTPINLVRDLPQGFSALEPLVDLPIGINITRFQTLLALHRSYLTPGDSSSGWTAGAAAYYVGYLQPRTFLLKYNENGTITDAVDCALDPLSETKCTLKSFTVEKGIYQTSNFRVQPTESIVRFPNITNLCPFGEVFNATRFASVYAWNRKRISNCVADYSVLYNSASFSTFKCYGVSPTKLNDLCFTNVYADSFVIRGDEVRQIAPGQTGKIADYNYKLPDDFTGCVIAWNSNNLDSKVGGNYNYLYRLFRKSNLKPFERDISTEIYQAGSTPCNGVEGFNCYFPLQSYGFQPTNGVGYQPYRVVVLSFELLHAPATVCGPKKSTNLVKNKCVNFNFNGLTGTGVLTESNKKFLPFQQFGRDIADTTDAVRDPQTLEILDITPCSFGGVSVITPGTNTSNQVAVLYQGVNCTEVPVAIHADQLTPTWRVYSTGSNVFQTRAGCLIGAEHVNNSYECDIPIGAGICASYQTQTNSPRRARSVASQSIIAYTMSLGAENSVAYSNNSIAIPTNFTISVTTEILPVSMTKTSVDCTMYICGDSTECSNLLLQYGSFCTQLNRALTGIAVEQDKNTQEVFAQVKQIYKTPPIKDFGGFNFSQILPDPSKPSKRSFIEDLLFNKVTLADAGFIKQYGDCLGDIAARDLICVQKFNGLTVLPPLLTDEMIAQYTSALLAGTITSGWWFGAGAALQIPFAMQMAYRFNGIGVTQNVLYENQKLIANQFNSAIGKIQDSLSSTASALGKLQDVVNQNAQALNTLVKQLSSNFGAISSVLNDILSRLDPPEAEVQIDRLITGRLQSLQTYVTQQLIRAAEIRWSANLAATKMSECVLGQSKRVDFCGKGYHLMSFPQSAPHGVVFLHVTYVPAQEKNFTTAPAICHDGKAHFPREGVFVSNGTHWFVTQRNFYEPQIITTDNTFVSGNCDVVIGIVNNTVYDPLQPELDSGGGGSDIDPYKEFGSSYQLLNFLPLDFFPDLNALVDTATALYEEELTGREHCSPHHTAIRQALVCWDELTKLIAWMSSNITSEQVRTIIVNHVNDTWGLKVRQSLWFHLSCLTFGQHTVQEFLVSFGVWIRTPAPYRPPNAPILSTLPEHTVIC

SEQ ID NO: 10823 - protein, 1301 aa, Artificial Sequence
  SARS-CoV-2/Finland/FIN03032020A/2020__EPI_ISL_413602 spike protein (1-1147)(K986P_V987P_T887W_A1020W) WhcAg construct
MFVFLVLLPLVSSQCVNLTTRTQLPPAYTNSFTRGVYYPDKVFRSSVLHSTQDLFLPFFSNVTWFHAIHVSGTNGTKRFDNPVLPFNDGVYFASTEKSNIIRGWIFGTTLDSKTQSLLIVNNATNVVIKVCEFQFCNDPFLGVYYHKNNKSWMESEFRVYSSANNCTFEYVSQPFLMDLEGKQGNFKNLREFVFKNIDGYFKIYSKHTPINLVRDLPQGFSALEPLVDLPIGINITRFQTLLALHRSYLTPGDSSSGWTAGAAAYYVGYLQPRTFLLKYNENGTITDAVDCALDPLSETKCTLKSFTVEKGIYQTSNFRVQPTESIVRFPNITNLCPFGEVFNATRFASVYAWNRKRISNCVADYSVLYNSASFSTFKCYGVSPTKLNDLCFTNVYADSFVIRGDEVRQIAPGQTGKIADYNYKLPDDFTGCVISWNSNNLDSKVGGNYNYLYRLFRKSNLKPFERDISTEIYQAGSTPCNGVEGFNCYFPLQSYGFQPTNGVGYQPYRVVVLSFELLHAPATVCGPKKSTNLVKNKCVNFNFNGLTGTGVLTESNKKFLPFQQFGRDIADTTDAVRDPQTLEILDITPCSFGGVSVITPGTNTSNQVAVLYQGVNCTEVPVAIHADQLTPTWRVYSTGSNVFQTRAGCLIGAEHVNNSYECDIPIGAGICASYQTQTNSPRRARSVASQSIIAYTMSLGAENSVAYSNNSIAIPTNFTISVTTEILPVSMTKTSVDCTMYICGDSTECSNLLLQYGSFCTQLNRALTGIAVEQDKNTQEVFAQVKQIYKTPPIKDFGGFNFSQILPDPSKPSKRSFIEDLLFNKVTLADAGFIKQYGDCLGDIAARDLICAQKFNGLTVLPPLLTDEMIAQYTSALLAGTITSGWWFGAGAALQIPFAMQMAYRFNGIGVTQNVLYENQKLIANQFNSAIGKIQDSLSSTASALGKLQDVVNQNAQALNTLVKQLSSNFGAISSVLNDILSRLDPPEAEVQIDRLITGRLQSLQTYVTQQLIRAAEIRWSANLAATKMSECVLGQSKRVDFCGKGYHLMSFPQSAPHGVVFLHVTYVPAQEKNFTTAPAICHDGKAHFPREGVFVSNGTHWFVTQRNFYEPQIITTDNTFVSGNCDVVIGIVNNTVYDPLQPELDSGGGGSDIDPYKEFGSSYQLLNFLPLDFFPDLNALVDTATALYEEELTGREHCSPHHTAIRQALVCWDELTKLIAWMSSNITSEQVRTIIVNHVNDTWGLKVRQSLWFHLSCLTFGQHTVQEFLVSFGVWIRTPAPYRPPNAPILSTLPEHTVIC

SEQ ID NO: 10824 - protein, 1301 aa, Artificial Sequence
  SARS-CoV-2/France/GE1977/2020__EPI_ISL_414632 spike protein (1-1147)(K986P_V987P_T887W_A1020W) WhcAg construct
MFVFLVLLPLVSSQCVNLTTRTQLPPAYTNSFTRGVYYPDKVFRSSVLHSTQDLFLPFFSNVTWFHAIHVSGTNGTKRFDNPVLPFNDGVYFASTEKSNIIRGWIFGTTLDSKTQSLLIVNNATNVVIKVCEFQFCNDPFLGVYYHKNNKSWMESEFRVYSSANNCTFEYVSQPFLMDLEGKQGNFKNLREFVFKNIDGYFKIYSKHTPINLVRDLPQGFSALEPLVDLPIGINITRFQTLLALHRSYLTPGDSSSGWTAGAAAYYVGYLQPRTFLLKYNENGTITDAVDCALDPLSETKCTLKSFTVEKGIYQTSNFRVQPTESIVRFPNITNLCPFGEVFNATRFASVYAWNRKRISNCVADYSVLYNSASFSTFKCYGVSPTKLNDLCFTNVYADSFVIRGDEVRQIAPGQTGKIADYNYKLPDDFTGCVIAWNSNNLDSKVGGNYNYLYRLFRKSNLKPFERDISTEIYQAGSTPCNGVEGFNCYFPLQSYGFQPTNGVGYQPYRVVVLSFELLHAPATVCGPKKSTNLVKNKCVNFNFNGLTGTGVLTESNKKFLPFQQFGRDIADTTDAVRDPQTLEILDITPCSFGGVSVITPGTNTSNQVAVLYQGVNCTEVPVAIHADQLTPTWRVYSTGSNVFQTRAGCLIGAEHVNNSYECDIPIGAGICASYQTQTNSPRRARSVASQSIIAYTMSLGAENSVAYSNNSIAIPTNFTISVTTEILPVSMTKTSVDCTMYICGDSTECSNLLLQYGSFCTQLNRALTGIAVEQDKNTQEVFAQVKQIYKTPPIKDFGGFNFSQILPDPSKPSKRSFIEDLLFNKVTLADAGFIKQYGDCLGDIAARDLICAQKFNGLTVLPPLLTDEMIAQYTSALLAGTITSGWWFGAGAALQIPFAMQMAYRFNGIGVTQNVLYENQKLIANQFNSAIGKIQDSLFSTASALGKLQDVVNQNAQALNTLVKQLSSNFGAISSVLNDILSRLDPPEAEVQIDRLITGRLQSLQTYVTQQLIRAAEIRWSANLAATKMSECVLGQSKRVDFCGKGYHLMSFPQSAPHGVVFLHVTYVPAQEKNFTTAPAICHDGKAHFPREGVFVSNGTHWFVTQRNFYEPQIITTDNTFVSGNCDVVIGIVNNTVYDPLQPELDSGGGGSDIDPYKEFGSSYQLLNFLPLDFFPDLNALVDTATALYEEELTGREHCSPHHTAIRQALVCWDELTKLIAWMSSNITSEQVRTIIVNHVNDTWGLKVRQSLWFHLSCLTFGQHTVQEFLVSFGVWIRTPAPYRPPNAPILSTLPEHTVIC

SEQ ID NO: 10825 - protein, 1301 aa, Artificial Sequence
  SARS-CoV-2/Finland/FIN-313/2020__EPI_ISL_414641 spike protein (1-1147)(K986P_V987P_T887W_A1020W) WhcAg construct
MFVFLVLLPLVSSQCVNLTTRTQLPPAYTNSFTRGVYYPDKVFRSSVLHSTQDLFLPFFSNVTWFHAIHVSGTNGTKRFDNPVLPFNDGVYFASTEKSNIIRGWIFGTTLDSKTQSLLIVNNATNVVIKVCEFQFCNDPFLGVYYHKNNKSWMESEFRVYSSANNCTFEYVSQPFLMDLEGKQGNFKNLREFVFKNIDGYFKIYSKHTPINLVRDLPQGFSALEPLVDLPIGINITRFKTLLALHRSYLTPGDSSSGWTAGAAAYYVGYLQPRTFLLKYNENGTITDAVDCALDPLSETKCTLKSFTVEKGIYQTSNFRVQPTESIVRFPNITNLCPFGEVFNATRFASVYAWNRKRISNCVADYSVLYNSASFSTFKCYGVSPTKLNDLCFTNVYADSFVIRGDEVRQIAPGQTGKIADYNYKLPDDFTGCVIAWNSNNLDSKVGGNYNYLYRLFRKSNLKPFERDISTEIYQAGSTPCNGVEGFNCYFPLQSYGFQPTNGVGYQPYRVVVLSFELLHAPATVCGPKKSTNLVKNKCVNFNFNGLTGTGVLTESNKKFLPFQQFGRDIADTTDAVRDPQTLEILDITPCSFGGVSVITPGTNTSNQVAVLYQGVNCTEVPVAIHADQLTPTWRVYSTGSNVFQTRAGCLIGAEHVNNSYECDIPIGAGICASYQTQTNSPRRARSVASQSIIAYTMSLGAENSVAYSNNSIAIPTNFTISVTTEILPVSMTKTSVDCTMYICGDSTECSNLLLQYGSFCTQLNRALTGIAVEQDKNTQEVFAQVKQIYKTPPIKDFGGFNFSQILPDPSKPSKRSFIEDLLFNKVTLADAGFIKQYGDCLGDIAARDLICAQKFNGLTVLPPLLTDEMIAQYTSALLAGTITSGWWFGAGAALQIPFAMQMAYRFNGIGVTQNVLYENQKLIANQFNSAIGKIQDSLSSTASALGKLQDVVNQNAQALNTLVKQLSSNFGAISSVLNDILSRLDPPEAEVQIDRLITGRLQSLQTYVTQQLIRAAEIRWSANLAATKMSECVLGQSKRVDFCGKGYHLMSFPQSAPHGVVFLHVTYVPAQEKNFTTAPAICHDGKAHFPREGVFVSNGTHWFVTQRNFYEPQIITTDNTFVSGNCDVVIGIVNNTVYDPLQPELDSGGGGSDIDPYKEFGSSYQLLNFLPLDFFPDLNALVDTATALYEEELTGREHCSPHHTAIRQALVCWDELTKLIAWMSSNITSEQVRTIIVNHVNDTWGLKVRQSLWFHLSCLTFGQHTVQEFLVSFGVWIRTPAPYRPPNAPILSTLPEHTVIC

SEQ ID NO: 10826 - protein, 1301 aa, Artificial Sequence
  SARS-CoV-2/Netherlands/ZuidHolland_2/2020__EPI_ISL_414556 spike protein (1-1147)(K986P_V987P_T887W_A1020W) WhcAg construct
MFVFLVLLPLVSSQCVNLTTRTQLPPAYTNSFTRGVYYPDKVFRSSVLHSTQDLFLPFFSNVTWFHAIHVSGTNGTKRFDNPVLPFNDGVYFASTEKSNIIRGWIFGTTLDSKTQSLLIVNNATNVVIKVCEFQFCNDPFLGVYYHKNNKSWMESEFRVYSSANNCTFEYVSQPFLMDLEGKQGNFKNLREFVFKNIDGYFKIYSKHTPINLVRDLPQGFSALEPLVDLPIGINITRFQTLLALHRSYLTPGDSSSGWTAGAAAYYVGYLQPRTFLLKYNENGTITDAVDCALDPLSETKCTLKSFTVEKGIYQTSNFRVQPTESIVRFPNITNLCPFGEVFNATRFASVYAWNRKRISNCVADYSVLYNSASFSTFKCYGVSPTKLNDLCFTNVYADSFVIRGDEVRQIAPGQTGKIADYNYKLPDDFTGCVIAWNSNNLDSKVGGNYNYLYRLFRKSNLKPFERDISTEIYQAGSTPCNGVEGFNCYFPLQSYGFQPTNGVGYQPYRVVVLSFELLHAPATVCGPKKSTNLVKNKCVNFNFNGLTGTGVLTESNKKFLPFQQFGRDIADTTDAVRDPQTLEILDITPCSFGGVSVITPGTNTSNQVAVLYQGVNCTEVPVAIHADQLTPTWRVYSTGSNVFQTRAGCLIGAEHVNNSYECDIPIGAGICASYQTQTNSPRRARSVASQSIIAYTMSLGAENSVAYSNNSIAIPTNFTISVTTEILPVSMTKTSVDCTMYICGDSTECSNLLLQYGSFCTQLNRALTGIALEQDKNTQEVFAQVKQIYKTPPIKDFGGFNFSQILPDPSKPSKRSFIEDLLFNKVTLADAGFIKQYGDCLGDIAARDLICAQKFNGLTVLPPLLTDEMIAQYTSALLAGTITSGWWFGAGAALQIPFAMQMAYRFNGIGVTQNVLYENQKLIANQFNSAIGKIQDSLSSTASALGKLQDVVNQNAQALNTLVKQLSSNFGAISSVLNDILSRLDPPEAEVQIDRLITGRLQSLQTYVTQQLIRAAEIRWSANLAATKMSECVLGQSKRVDFCGKGYHLMSFPQSAPHGVVFLHVTYVPAQEKNFTTAPAICHDGKAHFPREGVFVSNGTHWFVTQRNFYEPQIITTDNTFVSGNCDVVIGIVNNTVYDPLQPELDSGGGGSDIDPYKEFGSSYQLLNFLPLDFFPDLNALVDTATALYEEELTGREHCSPHHTAIRQALVCWDELTKLIAWMSSNITSEQVRTIIVNHVNDTWGLKVRQSLWFHLSCLTFGQHTVQEFLVSFGVWIRTPAPYRPPNAPILSTLPEHTVIC

SEQ ID NO: 10827 - protein, 1301 aa, Artificial Sequence
  SARS-CoV-2/USA/WA-UW31/2020__EPI_ISL_414618 spike protein (1-1147)(K986P_V987P_T887W_A1020W) WhcAg construct
MFVFLVLLPLVSSQCVNLTTRTQLPPAYTNSFTRGVYYPDKVFRSSVLHSTQDLFLPFFSNVTWFHAIHVSGTNGTKRFDNPVLPFNDGVYFASTEKSNIIRGWIFGTTLDSKTQSLLIVNNATNVVIKVCEFQFCNDPFLGVYYHKNNKSWMESEFRVYSSANNCTFEYVSQPFLMDLEGKQGNFKNLREFVFKNIDGYFKIYSKHTPINLVRDLPQGFSALEPLVDLPIGINITRFQTLLALHRSYLTPGDSSSGWTAGAAAYYVGYLQPRTFLLKYNENGTITDAVDCALDPLSETKCTLKSFTVEKGIYQTSNFRVQPTESIVRFPNITNLCPFGEVFNATRFASVYAWNRKRISNCVADYSVLYNSASFSTFKCYGVSPTKLNDLCFTNVYADSFVIRGDEVRQIAPGQTGKIADYNYKLPDDFTGCVIAWNSNNLDSKVGGNYNYLYRLFRKSNLKPFERDISTEIYQAGSTPCNGAEGFNCYFPLQSYGFQPTNGVGYQPYRVVVLSFELLHAPATVCGPKKSTNLVKNKCVNFNFNGLTGTGVLTESNKKFLPFQQFGRDIADTTDAVRDPQTLEILDITPCSFGGVSVITPGTNTSNQVAVLYQDVNCTEVPVAIHADQLTPTWRVYSTGSNVFQTRAGCLIGAEHVNNSYECDIPIGAGICASYQTQTNSPRRARSVASQSIIAYTMSLGAENSVAYSNNSIAIPTNFTISVTTEILPVSMTKTSVDCTMYICGDSTECSNLLLQYGSFCTQLNRALTGIAVEQDKNTQEVFAQVKQIYKTPPIKDFGGFNFSQILPDPSKPSKRSFIEDLLFNKVTLADAGFIKQYGDCLGDIAARDLICAQKFNGLTVLPPLLTDEMIAQYTSALLAGTITSGWWFGAGAALQIPFAMQMAYRFNGIGVTQNVLYENQKLIANQFNSAIGKIQDSLSSTASALGKLQDVVNQNAQALNTLVKQLSSNFGAISSVLNDILSRLDPPEAEVQIDRLITGRLQSLQTYVTQQLIRAAEIRWSANLAATKMSECVLGQSKRVDFCGKGYHLMSFPQSAPHGVVFLHVTYVPAQEKNFTTAPAICHDGKAHFPREGVFVSNGTHWFVTQRNFYEPQIITTDNTFVSGNCDVVIGIVNNTVYDPLQPELDSGGGGSDIDPYKEFGSSYQLLNFLPLDFFPDLNALVDTATALYEEELTGREHCSPHHTAIRQALVCWDELTKLIAWMSSNITSEQVRTIIVNHVNDTWGLKVRQSLWFHLSCLTFGQHTVQEFLVSFGVWIRTPAPYRPPNAPILSTLPEHTVIC

SEQ ID NO: 10828 - protein, 1301 aa, Artificial Sequence
  SARS-CoV-2/South Korea/SNU01/2020__EPI_ISL_411929 spike protein (1-1147)(K986P_V987P_T887W_A1020W) WhcAg construct
MFVFLVLLPLVSSQCVNLTTRTQLPPAYTNSFTRGVYYPDKVFRSSVLHSTQDLFLPFFSNVTWFHAIHVSGTNGTKRFDNPVLPFNDGVYFASTEKSNIIRGWIFGTTLDSKTQSLLIVNNATNVVIKVCEFQFCNDPFLGVYYHKNNKSWMESEFRVYSSANNCTFEYVSQPFLMDLEGKQGNFKNLREFVFKNIDGYFKIYSKHTPINLVRDLPQGFWALEPLVDLPIGINITRFQTLLALHRSYLTPGDSSSGWTAGAAAYYVGYLQPRTFLLKYNENGTITDAVDCALDPLSETKCTLKSFTVEKGIYQTSNFRVQPTESIVRFPNITNLCPFGEVFNATRFASVYAWNRKRISNCVADYSVLYNSASFSTFKCYGVSPTKLNDLCFTNVYADSFVIRGDEVRQIAPGQTGKIADYNYKLPDDFTGCVIAWNSNNLDSKVGGNYNYLYRLFRKSNLKPFERDISTEIYQAGSTPCNGVEGFNCYFPLQSYGFQPTNGVGYQPYRVVVLSFELLHAPATVCGPKKSTNLVKNKCVNFNFNGLTGTGVLTESNKKFLPFQQFGRDIADTTDAVRDPQTLEILDITPCSFGGVSVITPGTNTSNQVAVLYQDVNCTEVPVAIHADQLTPTWRVYSTGSNVFQTRAGCLIGAEHVNNSYECDIPIGAGICASYQTQTNSPRRARSVASQSIIAYTMSLGAENSVAYSNNSIAIPTNFTISVTTEILPVSMTKTSVDCTMYICGDSTECSNLLLQYGSFCTQLNRALTGIAVEQDKNTQEVFAQVKQIYKTPPIKDFGGFNFSQILPDPSKPSKRSFIEDLLFNKVTLADAGFIKQYGDCLGDIAARDLICAQKFNGLTVLPPLLTDEMIAQYTSALLAGTITSGWWFGAGAALQIPFAMQMAYRFNGIGVTQNVLYENQKLIANQFNSAIGKIQDSLSSTASALGKLQDVVNQNAQALNTLVKQLSSNFGAISSVLNDILSRLDPPEAEVQIDRLITGRLQSLQTYVTQQLIRAAEIRWSANLAATKMSECVLGQSKRVDFCGKGYHLMSFPQSAPHGVVFLHVTYVPAQEKNFTTAPAICHDGKAHFPREGVFVSNGTHWFVTQRNFYEPQIITTDNTFVSGNCDVVIGIVNNTVYDPLQPELDSGGGGSDIDPYKEFGSSYQLLNFLPLDFFPDLNALVDTATALYEEELTGREHCSPHHTAIRQALVCWDELTKLIAWMSSNITSEQVRTIIVNHVNDTWGLKVRQSLWFHLSCLTFGQHTVQEFLVSFGVWIRTPAPYRPPNAPILSTLPEHTVIC

SEQ ID NO: 10829 - protein, 1301 aa, Artificial Sequence
  SARS-CoV-2/China/WF0004/2020__EPI_ISL_413694 spike protein (1-1147)(K986P_V987P_T887W_A1020W) WhcAg construct
MFVFLVLLPLVSSQCVNLTTRTQLPPAYTNSFTRGVYYPDKVFRSSVLHSTQDLFLPFFSNVTWFHAIHVSGTNGTKRFDNPVLPFNDGVYFASTEKSNIIRGWIFGTTLDSKTQSLLIVNNATNVVIKVCEFQFCNDPFLGVYYHKNNKSWTESEFRVYSSANNCTFEYVSQPFLMDLEGKQGNFKNLREFVFKNIDGYFKIYSKHTPINLVRDLPQGFSALEPLVDLPIGINITRFQTLLALHRSYLTPGDSSSGWTAGAAAYYVGYLQPRTFLLKYNENGTITDAVDCALDPLSETKCTLKSFTVEKGIYQTSNFRVQPTESIVRFPNITNLCPFGEVFNATRFASVYAWNRKRISNCVADYSVLYNSASFSTFKCYGVSPTKLNDLCFTNVYADSFVIRGDEVRQIAPGQTGKIADYNYKLPDDFTGCVIAWNSNNLDSKVGGNYNYLYRLFRKSNLKPFERDISTEIYQAGSTPCNGVEGFNCYFPLQSYGFQPTNGVGYQPYRVVVLSFELLHAPATVCGPKKSTNLVKNKCVNFNFNGLTGTGVLTESNKKFLPFQQFGRDIADTTDAVRDPQTLEILDITPCSFGGVSVITPGTNTSNQVAVLYQDVNCTEVPVAIHADQLTPTWRVYSTGSNVFQTRAGCLIGAEHVNNSYECDIPIGAGICASYQTQTNSPRRARSVASQSIIAYTMSLGAENSVAYSNNSIAIPTNFTISVTTEILPVSMTKTSVDCTMYICGDSTECSNLLLQYGSFCTQLNRALTGIAVEQDKNTQEVFAQVKQIYKTPPIKDFGGFNFSQILPDPSKPSKRSFIEDLLFNKVTLADAGFIKQYGDCLGDIAARDLICAQKFNGLTVLPPLLTDEMIAQYTSALLAGTITSGWWFGAGAALQIPFAMQMAYRFNGIGVTQNVLYENQKLIANQFNSAIGKIQDSLSSTASALGKLQDVVNQNAQALNTLVKQLSSNFGAISSVLNDILSRLDPPEAEVQIDRLITGRLQSLQTYVTQQLIRAAEIRWSANLAATKMSECVLGQSKRFDFCGKGYHLMSFPQSAPHGVVFLHVTYVPAQEKNFTTAPAICHDGKAHFPREGVFVSNGTHWFVTQRNFYEPQIITTDNTFVSGNCDVVIGIVNNTVYDPLQPELDSGGGGSDIDPYKEFGSSYQLLNFLPLDFFPDLNALVDTATALYEEELTGREHCSPHHTAIRQALVCWDELTKLIAWMSSNITSEQVRTIIVNHVNDTWGLKVRQSLWFHLSCLTFGQHTVQEFLVSFGVWIRTPAPYRPPNAPILSTLPEHTVIC

SEQ ID NO: 10830 - protein, 1301 aa, Artificial Sequence
  SARS-CoV-2/China/WF0028/2020__EPI_ISL_413791 spike protein (1-1147)(K986P_V987P_T887W_A1020W) WhcAg construct
MFVFLVLLPLVSSQCVNLTTRTQLPPAYTNSFTRGVYYPDKVFRSSVLHSTQDLFLPFFSNVTWFHAIHVSGTNGTKRFDNPVLPFNDGVYFASTEKSNIIRGWIFGTTLDSKTQSLLIVNNATNVVIKVCEFQFCNDPFLGVYYHKNNKSWMESEFRVYSSANNCTFEYVSQPFLMDLEGKQGNFKNLREFVFKNIDGYFKIYSKHTPINLVRDLPQGFSALEPLVDLPIGINITRFQTLLALHRSYLTPGDSSSGWTAGAAAYYVGYLQPRTFLLKYNENGTITDAVDCALDPLSETKCTLKSFTVEKGIYQTSNFRVQPTESIVRFPNITNLCPFGEVFNATRFASVYAWNRKRISNCVADYSVLYNSASFSTFKCYGVSPTKLNDLCFTNVYADSFVIRGDEVRQIAPGQTGKIADYNYKLPDDFTGCVIAWNSNNLDSKVGGNYNYLYRLFRKSNLKPFERDISTEIYQAGSTPCNGVEGFNCYFPLQSYGFQPTNGVGYQPYRVVVLSFELLHAPATVCGPKKSTNLVKNKCVNFNFNGLTGTGVLTESNKKFLPFQQFGRDIADTTDAVRDPQTLEILDITPCSFGGVSVITPGTNTSNQVAVLYQDVNCTEVPVAIHADQLTPTWRVYSTGSNVFQTRAGCLIGAEHVNNSYECDIPIGAGICASYQTQTNSPRRARSVASQSIIAYTMSLGAENSVAYSNNSIAIPTNFTISVTTEILPVSMTKTSVDCTMYICGDSTECSNLLLQYGSFCTQLNRALTGIAVEQDKNTQEVFAQVKQIYKTPPIKDFGGFNFSQILPDPSKPSKRSFIEDLLFNKVTLADAGFIKQYGDCLGDIAARDLICAQKFNGLTVLPPLLTDEMIAQYTSALLAGTITSGWWFGAGAALQIPFAMQMAYRFNGIGVTQNVLYENQKLIANQFNSAIGKIQDSLSSTASALGKLQDVVNQNAQALNTLVKQLSSNFGAISSVLNDILSRLDPPEAEVQIDRLITGRLQSLQTYVTQQLIRAAEIRWSANLAATKMSECVLGQSKRVDFCGKGYHLMSFPQSAPHGVVFLHVTYVPAQEKNFTTAPAICHDGKAHFPREGVFVSNGTHWFVTQRNFYEPQIITTDNTFVSGNCDVVIGIVNNTVYDPLQPELESGGGGSDIDPYKEFGSSYQLLNFLPLDFFPDLNALVDTATALYEEELTGREHCSPHHTAIRQALVCWDELTKLIAWMSSNITSEQVRTIIVNHVNDTWGLKVRQSLWFHLSCLTFGQHTVQEFLVSFGVWIRTPAPYRPPNAPILSTLPEHTVIC

SEQ ID NO: 10831 - protein, 1301 aa, Artificial Sequence
  SARS-CoV-2/2019-nCoV/USA-CruiseA-18/2020__MT159716.1 spike protein (1-1147)(K986P_V987P_T887W_A1020W) WhcAg construct
MFVFLVLLPLVSSQCVNLTTRTQLPPAYTNSFTRGVYYPDKVFRSSVLHSTQDLFLPFFSNVTWFHAIHVSGTNGTKRFDNPVLPFNDGVYFASTEKSNIIRGWIFGTTLDSKTQSLLIVNNATNVVIKVCEFQFCNDPFLGVYYHKNNKSWMESELRVYSSANNCTFEYVSQPFLMDLEGKQGNFKNLREFVFKNIDGYFKIYSKHTPINLVRDLPQGFSALEPLVDLPIGINITRFQTLLALHRSYLTPGDSSSGWTAGAAAYYVGYLQPRTFLLKYNENGTITDAVDCALDPLSETKCTLKSFTVEKGIYQTSNFRVQPTESIVRFPNITNLCPFGEVFNATRFASVYAWNRKRISNCVADYSVLYNSASFSTFKCYGVSPTKLNDLCFTNVYADSFVIRGDEVRQIAPGQTGKIADYNYKLPDDFTGCVIAWNSNNLDSKVGGNYNYLYRLFRKSNLKPFERDISTEIYQAGSTPCNGVEGFNCYFPLQSYGFQPTNGVGYQPYRVVVLSFELLHAPATVCGPKKSTNLVKNKCVNFNFNGLTGTGVLTESNKKFLPFQQFGRDIADTTDAVRDPQTLEILDITPCSFGGVSVITPGTNTSNQVAVLYQDVNCTEVPVAIHADQLTPTWRVYSTGSNVFQTRAGCLIGAEHVNNSYECDIPIGAGICASYQTQTNSPRRARSVASQSIIAYTMSLGAENSVAYSNNSIAIPTNFTISVTTEILPVSMTKTSVDCTMYICGDSTECSNLLLQYGSFCTQLNRALTGIAVEQDKNTQEVFAQVKQIYKTPPIKDFGGFNFSQILPDPSKPSKRSFIEDLLFNKVTLADAGFIKQYGDCLGDIAARDLICAQKFNGLTVLPPLLTDEMIAQYTSALLAGTITSGWWFGAGAALQIPFAMQMAYRFNGIGVTQNVLYENQKLIANQFNSAIGKIQDSLSSTASALGKLQDVVNQNAQALNTLVKQLSSNFGAISSVLNDILSRLDPPEAEVQIDRLITGRLQSLQTYVTQQLIRAAEIRWSANLAATKMSECVLGQSKRVDFCGKGYHLMSFPQSAPHGVVFLHVTYVPAQEKNFTTAPAICHDGKAHFPREGVFVSNGTHWFVTQRNFYEPQIITTDNTFVSGNCDVVIGIVNNTVYDPLQPELDSGGGGSDIDPYKEFGSSYQLLNFLPLDFFPDLNALVDTATALYEEELTGREHCSPHHTAIRQALVCWDELTKLIAWMSSNITSEQVRTIIVNHVNDTWGLKVRQSLWFHLSCLTFGQHTVQEFLVSFGVWIRTPAPYRPPNAPILSTLPEHTVIC

SEQ ID NO: 10832 - protein, 1301 aa, Artificial Sequence
  SARS-CoV-2/SARS-CoV-2/Yunnan-01/human/2020/CHN__MT049951.1 spike protein (1-1147)(K986P_V987P_T887W_A1020W) WhcAg construct
MFVFLVLLPLVSSQCVNLTTRTQLPPANTNSFTRGVYYPDKVFRSSVLHSTQDLFLPFFSNVTWFHAIHVSGTNGTKRFDNPVLPFNDGVYFASTEKSNIIRGWIFGTTLDSKTQSLLIVNNATNVVIKVCEFQFCNDPFLGVYYHKNNKSWMESEFRVYSSANNCTFEYVSQPFLMDLEGKQGNFKNLREFVFKNIDGYFKIYSKHTPINLVRDLPQGFSALEPLVDLPIGINITRFQTLLALHRSYLTPGDSSSGWTAGAAAYYVGYLQPRTFLLKYNENGTITDAVDCALDPLSETKCTLKSFTVEKGIYQTSNFRVQPTESIVRFPNITNLCPFGEVFNATRFASVYAWNRKRISNCVADYSVLYNSASFSTFKCYGVSPTKLNDLCFTNVYADSFVIRGDEVRQIAPGQTGKIADYNYKLPDDFTGCVIAWNSNNLDSKVGGNYNYLYRLFRKSNLKPFERDISTEIYQAGSTPCNGVEGFNCYFPLQSYGFQPTNGVGYQPYRVVVLSFELLHAPATVCGPKKSTNLVKNKCVNFNFNGLTGTGVLTESNKKFLPFQQFGRDIADTTDAVRDPQTLEILDITPCSFGGVSVITPGTNTSNQVAVLYQDVNCTEVPVAIHADQLTPTWRVYSTGSNVFQTRAGCLIGAEHVNNSYECDIPIGAGICASYQTQTNSPRRARSVASQSIIAYTMSLGAENSVAYSNNSIAIPTNFTISVTTEILPVSMTKTSVDCTMYICGDSTECSNLLLQYGSFCTQLNRALTGIAVEQDKNTQEVFAQVKQIYKTPPIKDFGGFNFSQILPDPSKPSKRSFIEDLLFNKVTLADAGFIKQYGDCLGDIAARDLICAQKFNGLTVLPPLLTDEMIAQYTSALLAGTITSGWWFGAGAALQIPFAMQMAYRFNGIGVTQNVLYENQKLIANQFNSAIGKIQDSLSSTASALGKLQDVVNQNAQALNTLVKQLSSNFGAISSVLNDILSRLDPPEAEVQIDRLITGRLQSLQTYVTQQLIRAAEIRWSANLAATKMSECVLGQSKRVDFCGKGYHLMSFPQSAPHGVVFLHVTYVPAQEKNFTTAPAICHDGKAHFPREGVFVSNGTHWFVTQRNFYEPQIITTDNTFVSGNCDVVIGIVNNTVYDPLQPELDSGGGGSDIDPYKEFGSSYQLLNFLPLDFFPDLNALVDTATALYEEELTGREHCSPHHTAIRQALVCWDELTKLIAWMSSNITSEQVRTIIVNHVNDTWGLKVRQSLWFHLSCLTFGQHTVQEFLVSFGVWIRTPAPYRPPNAPILSTLPEHTVIC

SEQ ID NO: 10833 - protein, 1301 aa, Artificial Sequence
  SARS-CoV-2/USA/WA-UW292/2020__EPI_ISL_418077 spike protein (1-1147)(K986P_V987P_T887W_A1020W) WhcAg construct
MFVFLVLLPLVSSQCVNLTTRTQLPPAYTNSFTRGVYYPDKVFRSSVLHSTQDLFLPFFSNVTWFHAIHVSGTNGTKRFDNPVLPFNDGVYFASTEKSNIIRGWIFGTTLDSKTQSLLIVNNATNVVIKVCEFQFCNDPFLGVYYHKNNKSWMESEFRVYSSANNCTFEYVSQPFLMDLEGKQGNFKNLREFVFKNIDGYFKIYSKHTPINLVRDLPQGFSALEPLVDLPIGINITRFQTLLALHRSYLTPGDSSSGWTAGAAAYYVGYLQPRTFLLKYNENGTITDAVDCALDPLSETKCTLKSFTVEKGIYQTSNFRVQPTESIVRFPNITNLCPFGEVFNATRFASVYAWNRKRISNCVADYSVLYNSASFSTFKCYGVSPTKLNDLCFTNVYADSFVIRGDEVRQIAPGQTGKIADYNYKLPDDFTGCVIAWNSNNLDSKVGGNYNYLYRLFRKSNLKPFERDISTEIYQASSTPCNGVEGFNCYFPLQSYGFQPTNGVGYQPYRVVVLSFELLHAPATVCGPKKSTNLVKNKCVNFNFNGLTGTGVLTESNKKFLPFQQFGRDIADTTDAVRDPQTLEILDITPCSFGGVSVITPGTNTSNQVAVLYQDVNCTEVPVAIHADQLTPTWRVYSTGSNVFQTRAGCLIGAEHVNNSYECDIPIGAGICASYQTQTNSPRRARSVASQSIIAYTMSLGAENSVAYSNNSIAIPTNFTISVTTEILPVSMTKTSVDCTMYICGDSTECSNLLLQYGSFCTQLNRALTGIAVEQDKNTQEVFAQVKQIYKTPPIKDFGGFNFSQILPDPSKPSKRSFIEDLLFNKVTLADAGFIKQYGDCLGDIAARDLICAQKFNGLTVLPPLLTDEMIAQYTSALLAGTITSGWWFGAGAALQIPFAMQMAYRFNGIGVTQNVLYENQKLIANQFNSAIGKIQDSLSSTASALGKLQDVVNQNAQALNTLVKQLSSNFGAISSVLNDILSRLDPPEAEVQIDRLITGRLQSLQTYVTQQLIRAAEIRWSANLAATKMSECVLGQSKRVDFCGKGYHLMSFPQSAPHGVVFLHVTYVPAQEKNFTTAPAICHDGKAHFPREGVFVSNGTHWFVTQRNFYEPQIITTDNTFVSGNCDVVIGIVNNTVYDPLQPELDSGGGGSDIDPYKEFGSSYQLLNFLPLDFFPDLNALVDTATALYEEELTGREHCSPHHTAIRQALVCWDELTKLIAWMSSNITSEQVRTIIVNHVNDTWGLKVRQSLWFHLSCLTFGQHTVQEFLVSFGVWIRTPAPYRPPNAPILSTLPEHTVIC

SEQ ID NO: 10834 - protein, 1301 aa, Artificial Sequence
  SARS-CoV-2/Iceland/192/2020__EPI_ISL_417819 spike protein (1-1147)(K986P_V987P_T887W_A1020W) WhcAg construct
MFVFFVLLPLVSSQCVNLTTRTQLPPAYTNSFTRGVYYPDKVFRSSVLHSTQDLFLPFFSNVTWFHAIHVSGTNGTKRFDNPVLPFNDGVYFASTEKSNIIRGWIFGTTLDSKTQSLLIVNNATNVVIKVCEFQFCNDPFLGVYYHKNNKSWMESEFRVYSSANNCTFEYVSQPFLMDLEGKQGNFKNLREFVFKNIDGYFKIYSKHTPINLVRDLPQGFSALEPLVDLPIGINITRFQTLLALHRSYLTPGDSSSGWTAGAAAYYVGYLQPRTFLLKYNENGTITDAVDCALDPLSETKCTLKSFTVEKGIYQTSNFRVQPTESIVRFPNITNLCPFGEVFNATRFASVYAWNRKRISNCVADYSVLYNSASFSTFKCYGVSPTKLNDLCFTNVYADSFVIRGDEVRQIAPGQTGKIADYNYKLPDDFTGCVIAWNSNNLDSKVGGNYNYLYRLFRKSNLKPFERDISTEIYQAGSTPCNGVEGFNCYFPLQSYGFQPTNGVGYQPYRVVVLSFELLHAPATVCGPKKSTNLVKNKCVNFNFNGLTGTGVLTESNKKFLPFQQFGRDIADTTDAVRDPQTLEILDITPCSFGGVSVITPGTNTSNQVAVLYQGVNCTEVPVAIHADQLTPTWRVYSTGSNVFQTRAGCLIGAEHVNNSYECDIPIGAGICASYQTQTNSPRRARSVASQSIIAYTMSLGAENSVAYSNNSIAIPTNFTISVTTEILPVSMTKTSVDCTMYICGDSTECSNLLLQYGSFCTQLNRALTGIAVEQDKNTQEVFAQVKQIYKTPPIKDFGGFNFSQILPDPSKPSKRSFIEDLLFNKVTLADAGFIKQYGDCLGDIAARDLICAQKFNGLTVLPPLLTDEMIAQYTSALLAGTITSGWWFGAGAALQIPFAMQMAYRFNGIGVTQNVLYENQKLIANQFNSAIGKIQDSLSSTASALGKLQDVVNQNAQALNTLVKQLSSNFGAISSVLNDILSRLDPPEAEVQIDRLITGRLQSLQTYVTQQLIRAAEIRWSANLAATKMSECVLGQSKRVDFCGKGYHLMSFPQSAPHGVVFLHVTYVPAQEKNFTTAPAICHDGKAHFPREGVFVSNGTHWFVTQRNFYEPQIITTDNTFVSGNCDVVIGIVNNTVYDPLQPELDSGGGGSDIDPYKEFGSSYQLLNFLPLDFFPDLNALVDTATALYEEELTGREHCSPHHTAIRQALVCWDELTKLIAWMSSNITSEQVRTIIVNHVNDTWGLKVRQSLWFHLSCLTFGQHTVQEFLVSFGVWIRTPAPYRPPNAPILSTLPEHTVIC

SEQ ID NO: 10835 - protein, 1301 aa, Artificial Sequence
  SARS-CoV-2/Belgium/ULG-6939/2020__EPI_ISL_417020 spike protein (1-1147)(K986P_V987P_T887W_A1020W) WhcAg construct
MFVFLVLLPLVSSQCVNLTTRTQLPPAYTNSFTRGVYYPDKVFRSSVLHSTQDLFLPFFSNVTWFHAIHVSGTNGTKRFDNPVLPFNDGVYFASTEKSNIIRGWIFGTTLDSKTQSLLIVNNATNVVIKVCEFQFCNDPFLGVYYHKNNKSWMESEFRVYSSANNCTFEYVSQPFLMDLEGKQGNFKNLREFVFKNIDGYFKIYSKHTPINLVRDLPQGFSALEPLVDLPIGINITRFQTLLALHRSYLTPGDSSSGWTAGAAAYYVGYLQPRTFLLKYNENGTITDAVDCALDPLSETKCTLKSFTVEKGIYQTSNFRVQPTESIVRFPNITNLCPFGEVFNATRFASVYAWNRKRISNCVADYSVLYNSASFSTFKCYGVSPTKLNDLCFTNVYADSFVIRGDEVRQIAPGQTGKIADYNYKLPDDFTGCVIAWNSNNLDSKVGGNYNYLYRLFRKSNLKPFERDISTEIYQAGSTPCNGVEGFNCYFPLQSYGFQPTNGVGYQPYRVVVLSFELLHAPATVCGPKKSTNLVKNKCVNFNFNGLTGTGVLTESNKKFLPFQQFGRDIADTTDAVRDPQTLEILDITPCSFGGVSVITPGTNTSNQVAVLYQGVNCTEVPVAIHADQLTPTWRVYSTGSNVFQTRAGCLIGAEHVNNSYECDIPIGAGICASYQTQTNSPRRARSVASQSIIAYTMSLGAENSVVYSNNSIAIPTNFTISVTTEILPVSMTKTSVDCTMYICGDSTECSNLLLQYGSFCTQLNRALTGIAVEQDKNTQEVFAQVKQIYKTPPIKDFGGFNFSQILPDPSKPSKRSFIEDLLFNKVTLADAGFIKQYGDCLGDIAARDLICAQKFNGLTVLPPLLTDEMIAQYTSALLAGTITSGWWFGAGAALQIPFAMQMAYRFNGIGVTQNVLYENQKLIANQFNSAIGKIQDSLSSTASALGKLQDVVNQNAQALNTLVKQLSSNFGAISSVLNDILSRLDPPEAEVQIDRLITGRLQSLQTYVTQQLIRAAEIRWSANLAATKMSECVLGQSKRVDFCGKGYHLMSFPQSAPHGVVFLHVTYVPAQEKNFTTAPAICHDGKAHFPREGVFVSNGTHWFVTQRNFYEPQIITTDNTFVSGNCDVVIGIVNNTVYDPLQPELDSGGGGSDIDPYKEFGSSYQLLNFLPLDFFPDLNALVDTATALYEEELTGREHCSPHHTAIRQALVCWDELTKLIAWMSSNITSEQVRTIIVNHVNDTWGLKVRQSLWFHLSCLTFGQHTVQEFLVSFGVWIRTPAPYRPPNAPILSTLPEHTVIC

SEQ ID NO: 10836 - protein, 1301 aa, Artificial Sequence
  SARS-CoV-2/France/HF2496/2020__EPI_ISL_418231 spike protein (1-1147)(K986P_V987P_T887W_A1020W) WhcAg construct
MFVFLVLLPLVSSQCVNLTTRTQLPPAYTNSFTRGVYYPDKVFRSSVLHSTQDLFLPFFSNVTWFHAIHVSGTNGTKRFDNPVLPFNDGVYFASTEKSNIIRGWIFGTTLDSKTQSLLIVNNATNVVIKVCEFQFCNDPFLGVYYHKNNKSWMESEFRVYSSANNCTFEYVSQPFLMDLEGKQGNFKNLREFVFKNIDGYFKIYSKHTPINLVRDLPQGFSALEPLVDLPIGINITRFQTLLALHRSYLTPGDSSSGWTAGAAAYYVGYLQPRTFLLKYNENGTITDAVDCALDPLSETKCTLKSFTVEKGIYQTSNFRVQPTESIVRFPNITNLCPFGEVFNATRFASVYAWNRKRISNCVADYSVLYNSASFSTFKCYGVSPTKLNDLCFTNVYADSFVIRGDEVRQIAPGQTGKIADYNYKLPDDFTGCVIAWNSNNLDSKVGGNYNYLYRLFRKSNLKPFERDISTEIYQAGSTPCNGVEGFNCYFPLQSYGFQPTNGVGYQPYRVVVLSFELLHAPATVCGPKKSTNLVKNKCVNFNFNGLTGTGVLTESNKKFLPFQQFGRDIADTTDAVRDPQTLEILDITPCSFGGVSVITPGTNTSNQVAVLYQGVNCTEVPVAIHADQLTPTWRVYSTGSNVFQTRAGCLIGAEHVNNSYECDIPIGAGICASYQTQTNSPRRARSVASQSIIAYTMSLGAENSVAYSNNSIAIPTNFTISVTTEILPVSMTKTSVDCTMYICGDSTECSNLLLQYGSFCTQLNRALTGIAVEQDKNTQEVFAQVKQIYKTPPIKDFGGFNFSQILPDPSKPSKRSFIEDLLFNKVTLADAGFIKQYGDCLGDIVARDLICAQKFNGLTVLPPLLTDEMIAQYTSALLAGTITSGWWFGAGAALQIPFAMQMAYRFNGIGVTQNVLYENQKLIANQFNSAIGKIQDSLSSTASALGKLQDVVNQNAQALNTLVKQLSSNFGAISSVLNDILSRLDPPEAEVQIDRLITGRLQSLQTYVTQQLIRAAEIRWSANLAATKMSECVLGQSKRVDFCGKGYHLMSFPQSAPHGVVFLHVTYVPAQEKNFTTAPAICHDGKAHFPREGVFVSNGTHWFVTQRNFYEPQIITTDNTFVSGNCDVVIGIVNNTVYDPLQPELDSGGGGSDIDPYKEFGSSYQLLNFLPLDFFPDLNALVDTATALYEEELTGREHCSPHHTAIRQALVCWDELTKLIAWMSSNITSEQVRTIIVNHVNDTWGLKVRQSLWFHLSCLTFGQHTVQEFLVSFGVWIRTPAPYRPPNAPILSTLPEHTVIC

SEQ ID NO: 10837 - protein, 1301 aa, Artificial Sequence
  SARS-CoV-2/USA/WA-UW291/2020__EPI_ISL_418076 spike protein (1-1147)(K986P_V987P_T887W_A1020W) WhcAg construct
MFVFLVLLPLVSSQCVNLTTRTQLPPAYTNSFTRGVYYPDKVFRSSVLHSTQDLFLPFFSNVTWFHAIHVSGTNGTKRFDNPVLPFNDGVYFASTEKSNIIRGWIFGTTLDSKTQSLLIVNNATNVVIKVCEFQFCNDPFLGVYYHKNNKSWMESEFRVYSSANNCTFEYVSQPFLMDLEGKQGNFKNLREFVFKNIDGYFKIYSKHTPINLVRDLPQGFSALEPLVDLPIGINITRFQTLLALHRSYLTPGDSSSGWTAGAAAYYVGYLQPRTFLLKYNENGTITDAVDCALDPLSETKCTLKSFTVEKGIYQTSNFRVQPTESIVRFPNITNLCPFGEVFNATRFASVYAWNRKRISNCVADYSVLYNSASFSTFKCYGVSPTKLNDLCFTNVYADSFVIRGDEVRQIAPGQTGKIADYNYKLPDDFTGCVIAWNSNNLDSKVGGNYNYLYRLFRKSNLKPFERDISTEIYQAGSTPCNGVEGFNCYFPLQSYGFQPTNGVGYQPYRVVVLSFELLHAPATVCGPKKSTNLVKNKCVNFNFNGLTGTGVLTESNKKFLPFQQFGRDIADTTDAVRDPQTLEILDITPCSFGGVSVITPGTNTSNQVAVLYQGVNCTEVPVAIHADQLTPTWRVYSTGSNVFQTRAGCLIGAEHVNNSYECDIPIGAGICASYQTQTNSPRRARSVASQSIIAYTMSLGAENSVAYSNNSIAIPTNFTISVTTEILPVSMTKTSVDCTMYICGDSTECSNLLLQYGSFCTQLNRALTGIAVEQDKNTQEVFAQVKQIYKTPPIKDFGGFNFSQILPDPSKPSKRSFIEDLLFNKVTLADAGFIKQYGDCLGDIAARDLICAQKFNGLTVLPPLLTDEMIAQYTSALLAGTITSGWWFGAGAALQIPFAMQMAYRFNGIGVTQNVLYENQKLIANQFNSAIGKIQYSLSSTASALGKLQDVVNQNAQALNTLVKQLSSNFGAISSVLNDILSRLDPPEAEVQIDRLITGRLQSLQTYVTQQLIRAAEIRWSANLAATKMSECVLGQSKRVDFCGKGYHLMSFPQSAPHGVVFLHVTYVPAQEKNFTTAPAICHDGKAHFPREGVFVSNGTHWFVTQRNFYEPQIITTDNTFVSGNCDVVIGIVNNTVYDPLQPELDSGGGGSDIDPYKEFGSSYQLLNFLPLDFFPDLNALVDTATALYEEELTGREHCSPHHTAIRQALVCWDELTKLIAWMSSNITSEQVRTIIVNHVNDTWGLKVRQSLWFHLSCLTFGQHTVQEFLVSFGVWIRTPAPYRPPNAPILSTLPEHTVIC

SEQ ID NO: 10838 - protein, 1301 aa, Artificial Sequence; identical to SEQ ID NO: 10801
  SARS-CoV-2/Portugal/PT0034/2020__EPI_ISL_418019 spike protein (1-1147)(K986P_V987P_T887W_A1020W) WhcAg construct

SEQ ID NO: 10839 - protein, 1301 aa, Artificial Sequence; identical to SEQ ID NO: 10793
  SARS-CoV-2/Iceland/202/2020__EPI_ISL_417750 spike protein (1-1147)(K986P_V987P_T887W_A1020W) WhcAg construct

SEQ ID NO: 10840 - protein, 1301 aa, Artificial Sequence
  SARS-CoV-2/USA/WA-UW261/2020__EPI_ISL_418046 spike protein (1-1147)(K986P_V987P_T887W_A1020W) WhcAg construct
MFVFLVLLPLVSSQCVNLTTRTQLPPAYTNSFTRGVYYPDKVFRSSVLHSTQDLFLPFFSNVTWFHAIHVSGTNGTKRFDNPVLPFNDGVYFASTEKSNIIRGWIFGTTLDSKTQSLLIVNNATNVVIKVCEFQFCNDPFLGVYYHKNNKSWMESEFRVYSSANNCTFEYVSQPFLMDLEGKQGNFKNLREFVFKNIDGYFKIYSKHTPINLVRDLPQGFSALEPLVDLPIGINITRFQTLLALHRSYLTPGDSSSGWTAGAAAYYVGYLQPRTFLLKYNENGTITDAVDCALDPLSETKCTLKSFTVEKGIYQTSNFRVQPTESIVRFPNITNLCPFGEVFNATRFTSVYAWNRKRISNCVADYSVLYNSASFSTFKCYGVSPTKLNDLCFTNVYADSFVIRGDEVRQIAPGQTGKIADYNYKLPDDFTGCVIAWNSNNLDSKVGGNYNYLYRLFRKSNLKPFERDISTEIYQAGSTPCNGVEGFNCYFPLQSYGFQPTNGVGYQPYRVVVLSFELLHAPATVCGPKKSTNLVKNKCVNFNFNGLTGTGVLTESNKKFLPFQQFGRDIADTTDAVRDPQTLEILDITPCSFGGVSVITPGTNTSNQVAVLYQDVNCTEVPVAIHADQLTPTWRVYSTGSNVFQTRAGCLIGAEHVNNSYECDIPIGAGICASYQTQTNSPRRARSVASQSIIAYTMSLGAENSVAYSNNSIAIPTNFTISVTTEILPVSMTKTSVDCTMYICGDSTECSNLLLQYGSFCTQLNRALTGIAVEQDKNTQEVFAQVKQIYKTPPIKDFGGFNFSQILPDPSKPSKRSFIEDLLFNKVTLADAGFIKQYGDCLGDIAARDLICAQKFNGLTVLPPLLTDEMIAQYTSALLAGTITSGWWFGAGAALQIPFAMQMAYRFNGIGVTQNVLYENQKLIANQFNSAIGKIQDSLSSTASALGKLQDVVNQNAQALNTLVKQLSSNFGAISSVLNDILSRLDPPEAEVQIDRLITGRLQSLQTYVTQQLIRAAEIRWSANLAATKMSECVLGQSKRVDFCGKGYHLMSFPQSAPHGVVFLHVTYVPAQEKNFTTAPAICHDGKAHFPREGVFVSNGTHWFVTQRNFYEPQIITTDNTFVSGNCDVVIGIVNNTVYDPLQPELDSGGGGSDIDPYKEFGSSYQLLNFLPLDFFPDLNALVDTATALYEEELTGREHCSPHHTAIRQALVCWDELTKLIAWMSSNITSEQVRTIIVNHVNDTWGLKVRQSLWFHLSCLTFGQHTVQEFLVSFGVWIRTPAPYRPPNAPILSTLPEHTVIC

SEQ ID NO: 10841 - protein, 1301 aa, Artificial Sequence
  SARS-CoV-2/Portugal/PT0035/2020__EPI_ISL_418020 spike protein (1-1147)(K986P_V987P_T887W_A1020W) WhcAg construct
MFVFLVLLPLVSSQCVNLTTRTQLPPAYTNSFTRGVYYPDKVFRSSVLHSTQDLFLPFFSNVTWFHAIHVSGTNGTKRFDNPVLPFNDGVYFASTEKSNIIRGWIFGTTLDSKTQSLLIVNNATNVVIKVCEFQFCNDPFLGVYYHKNNKSWMESEFRVYSSANNCTFEYVSQPFLMDLEGKQGNFKNLREFVFKNIDGYFKIYSKHTPINLVRDLPQGFSALEPLVDLPIGINITRFQTLLALHRSYLTPGDSSSGWTAGAAAYYVGYLQPRTFLLKYNENGTITDAVDCALDPLSETKCTLKSFTVEKGIYQTSNFRVQPTESIVRFPNITNLCPFGEVFNATRFASVYAWNRKRISNCVADYSVLYNSASFSTFKCYGVSPTKLNDLCFTNVYADSFVIRGDEVRQIAPGQTGKIADYNYKLPDDFTGCVIAWNSNNLDSKVGGNYNYLYRLFRKSNLKPFERDISTEIYQAGSTPCNGVEGFNCYFPLQSYGFQPTNGVGYQPYRVVVLSFELLHAPATVCGPKKSTNLVKNKCVNFNFNGLTGTGVLTESNKKFLPFQQFGRDIADTTDAVRDPQTLEILDITPCSFGGVSVITPGTNTSNQVAVLYQDVNCTEVPVAIHADQLTPTWRVYSTGSNVFQTRAGCLIGAEHVNNSYECDIPIGAGICASYQTQTNSPRRARSVASQSIIAYTMSLGAENSVAYSNNSIAIPTNFTISVTTEILPVSMTKTSVDCTMYICGDSTECSNLLLQYGSFCTQLNRALTGIAVEQDKNTQEVFAQVKQIYKTPPIKDFGGFNFSQILPDPSKPSKRSFIEDLLFNKVTLADAGFIKQYGDCLGDISARDLICAQKFNGLTVLPPLLTDEMIAQYTSALLAGTITSGWWFGAGAALQIPFAMQMAYRFNGIGVTQNVLYENQKLIANQFNSAIGKIQDSLSSTASALGKLQDVVNQNAQALNTLVKQLSSNFGAISSVLNDILSRLDPPEAEVQIDRLITGRLQSLQTYVTQQLIRAAEIRWSANLAATKMSECVLGQSKRVDFCGKGYHLMSFPQSAPHGVVFLHVTYVPAQEKNFTTAPAICHDGKAHFPREGVFVSNGTHWFVTQRNFYEPQIITTDNTFVSGNCDVVIGIVNNTVYDPLQPELDSGGGGSDIDPYKEFGSSYQLLNFLPLDFFPDLNALVDTATALYEEELTGREHCSPHHTAIRQALVCWDELTKLIAWMSSNITSEQVRTIIVNHVNDTWGLKVRQSLWFHLSCLTFGQHTVQEFLVSFGVWIRTPAPYRPPNAPILSTLPEHTVIC

SEQ ID NO: 10842 - protein, 1301 aa, Artificial Sequence
  SARS-CoV-2/USA/NY-NYUMC7/2020__EPI_ISL_418192 spike protein (1-1147)(K986P_V987P_T887W_A1020W) WhcAg construct
MFVFLVLLPLVSSQCVNLTTRTQLPPAYTNSFTRGVYYPDKVFRSSVLHSTQDLFLPFFSNVTWFHAIHVSGTNGTKRFDNPVLPFNDGVYFASTEKSNIIRGWIFGTTLDSKTQSLLIVNNATNVVIKVCEFQFCNDPFLGVYHHKNNKSWMESEFRVYSSANNCTFEYVSQPFLMDLEGKQGNFKNLREFVFKNIDGYFKIYSKHTPINLVRDLPQGFSALEPLVDLPIGINITRFQTLLALHRSYLTPGDSSSGWTAGAAAYYVGYLQPRTFLLKYNENGTITDAVDCALDPLSETKCTLKSFTVEKGIYQTSNFRVQPTESIVRFPNITNLCPFGEVFNATRFASVYAWNRKRISNCVADYSVLYNSASFSTFKCYGVSPTKLNDLCFTNVYADSFVIRGDEVRQIAPGQTGKIADYNYKLPDDFTGCVIAWNSNNLDSKVGGNYNYLYRLFRKSNLKPFERDISTEIYQAGSTPCNGVEGFNCYFPLQSYGFQPTNGVGYQPYRVVVLSFELLHAPATVCGPKKSTNLVKNKCVNFNFNGLTGTGVLTESNKKFLPFQQFGRDIADTTDAVRDPQTLEILDITPCSFGGVSVITPGTNTSNQVAVLYQGVNCTEVPVAIHADQLTPTWRVYSTGSNVFQTRAGCLIGAEHVNNSYECDIPIGAGICASYQTQTNSPRRARSVASQSIIAYTMSLGAENSVAYSNNSIAIPTNFTISVTTEILPVSMTKTSVDCTMYICGDSTECSNLLLQYGSFCTQLNRALTGIAVEQDKNTQEVFAQVKQIYKTPPIKDFGGFNFSQILPDPSKPSKRSFIEDLLFNKVTLADAGFIKQYGDCLGDIAARDLICAQKFNGLTVLPPLLTDEMIAQYTSALLAGTITSGWWFGAGAALQIPFAMQMAYRFNGIGVTQNVLYENQKLIANQFNSAIGKIQDSLSSTASALGKLQDVVNQNAQALNTLVKQLSSNFGAISSVLNDILSRLDPPEAEVQIDRLITGRLQSLQTYVTQQLIRAAEIRWSANLAATKMSECVLGQSKRVDFCGKGYHLMSFPQSAPHGVVFLHVTYVPAQEKNFTTAPAICHDGKAHFPREGVFVSNGTHWFVTQRNFYEPQIITTDNTFVSGNCDVVIGIVNNTVYDPLQPELDSGGGGSDIDPYKEFGSSYQLLNFLPLDFFPDLNALVDTATALYEEELTGREHCSPHHTAIRQALVCWDELTKLIAWMSSNITSEQVRTIIVNHVNDTWGLKVRQSLWFHLSCLTFGQHTVQEFLVSFGVWIRTPAPYRPPNAPILSTLPEHTVIC

SEQ ID NO: 10843 - protein, 1301 aa, Artificial Sequence
  SARS-CoV-2/Iceland/189/2020__EPI_ISL_417709 spike protein (1-1147)(K986P_V987P_T887W_A1020W) WhcAg construct
MFVFLVLLPLVSSQCVNLTTRTQLPPAYTNSFTRGVYYPDKVFRSSVLHSTQDLFLPFFSNVTWFHAIHVSGTNGTKRFDNPVLPFNDGVYFASTEKSNIIRGWIFGTTLDSKTQSLLIVNNATNVVIKVCEFQFCNDPFLGVYYHKNNKSWMESEFRVYSSANNCTFEYVSQPFLMDLEGKQGNFKNLREFVFKNIDGYFKIYSKHTPINLVRDLPQGFSALEPLVDLPIGINITRFQTLLALHRSYLTPGDSSSGWTAGAAAYYVGYLQPRTFLLKYNENGTITDAVDCALDPLSETKCTLKSFTVEKGIYQTSNFRVQPTESIVRFPNITNLCPFGEVFNATRFASVYAWNRKRISNCVADYSVLYNSASFSTFKCYGVSPTKLNDLCFTNVYADSFVIRGDEVRQIAPGQTGKIADYNYKLPDDFTGCVIAWNSNNLDSKVGGNYNYLYRLFRKSNLKPFERDISTEIYQAGSTPCNGVEGFNCYFPLQSYGFQPTNGVGYQPYRVVVLSFELLHAPATVCGPKKSTNLVKNKCVNFNFNGLTGTGVLTESNKKFLPFQQFGRDIADTTDAVRDPQTLEILDITPCSFGGVSVITPGTNTSNQVAVLYQGVNCTEVPVAIHADQLTPTWRVYSTGSNVFQTRAGCLIGAEHVNNSYECDIPIGAGICASYQTQTNSPRRARSVASQSIIAYTMSLGAENSVAYSNNSIAIPTNFTISVTTEILPVSMTKTSVDCTMYICGDSTECSNLLLQYGSFCTQLNRALTGIAVEQDKNTQEVFAQVKQIYKTPPIKDFGGFNFSQILPDPSKPSKRSFIEDLLFNKVTLADAGFTKQYGDCLGDIAARDLICAQKFNGLTVLPPLLTDEMIAQYTSALLAGTITSGWWFGAGAALQIPFAMQMAYRFNGIGVTQNVLYENQKLIANQFNSAIGKIQDSLSSTASALGKLQDVVNQNAQALNTLVKQLSSNFGAISSVLNDILSRLDPPEAEVQIDRLITGRLQSLQTYVTQQLIRAAEIRWSANLAATKMSECVLGQSKRVDFCGKGYHLMSFPQSAPHGVVFLHVTYVPAQEKNFTTAPAICHDGKAHFPREGVFVSNGTHWFVTQRNFYEPQIITTDNTFVSGNCDVVIGIVNNTVYDPLQPELDSGGGGSDIDPYKEFGSSYQLLNFLPLDFFPDLNALVDTATALYEEELTGREHCSPHHTAIRQALVCWDELTKLIAWMSSNITSEQVRTIIVNHVNDTWGLKVRQSLWFHLSCLTFGQHTVQEFLVSFGVWIRTPAPYRPPNAPILSTLPEHTVIC

SEQ ID NO: 10844 - protein, 1301 aa, Artificial Sequence
  SARS-CoV-2/Australia/NSW56/2020__EPI_ISL_417408 spike protein (1-1147)(K986P_V987P_T887W_A1020W) WhcAg construct
MFVFLVLLPLVSSQCVNLTTRTQLPPAYTNSFTRGVYYPDKVFRSSVLHSTQDLFLPFFSNVTWFHAIHVSGTNGTKRFDNPVLPFNDGVYFASTEKSNIIRGWIFGTTLDSKTQSLLIVNNATNVVIKVCEFQFCNDPFLGVYYHKNNKSWMESEFRVYSSANNCTFEYVSQPFLMDLEGKQGNFKNLREFVFKNIDGYFKIYSKHTPINLVRDLPQGFSALEPLVDLPIGINITRFQTLLALHRSYLTPGDSSSGWTAGAAAYYVGYLQPRTFLLKYNENGTITDAVDCALDPLSETKCTLKSFTVEKGIYQTSNFRVQPTESIVRFPNITNLCPFGEVFNATRFASVYAWNRKRISNCVADYSVLYNSASFSTFKCYGVSPTKLNDLCFTNVYADSFVIRGDEVRQIAPGQTGKIADYNYKLPDDFTGCVIAWNSNNLDSKVGGNYNYLYRLFRKSNLKPFERDISTEIYQAGSTPCNGVEGFNCYFPLQSYGFQPTNGVGYQPYRVVVLSFELLHAPATVCGPKKSTNLVKNKCVNFNFNGLTGTGVLTESNKKFLPFQQFGRDIADTTDAVRDPQTLEILDITPCSFGGVSVITPGTNTSNQVAVLYQDVNCTEVPVAIHADQLTPTWRVYSTGSNVFQTRAGCLIGAEHVNNSYECDIPIGAGICASYQTQTNSPRRARSVASQSIIAYTMSLGAENSVAYSNNSIAIPTNFTISVTTEILPVSMTKTSVDCTMYICGDSTECSNLLLQYGSFCTQLNRALTGIAVEQDKNTQEVFAQVKQIYKTPPIKDFGGFNFSQILPDSSKPSKRSFIEDLLFNKVTLADAGFIKQYGDCLGDIAARDLICAQKFNGLTVLPPLLTDEMIAQYTSALLAGTITSGWWFGAGAALQIPFAMQMAYRFNGIGVTQNVLYENQKLIANQFNSAIGKIQDSLSSTASALGKLQDVVNQNAQALNTLVKQLSSNFGAISSVLNDILSRLDPPEAEVQIDRLITGRLQSLQTYVTQQLIRAAEIRWSANLAATKMSECVLGQSKRVDFCGKGYHLMSFPQSAPHGVVFLHVTYVPAQEKNFTTAPAICHDGKAHFPREGVFVSNGTHWFVTQRNFYEPQIITTDNTFVSGNCDVVIGIVNNTVYDPLQPELDSGGGGSDIDPYKEFGSSYQLLNFLPLDFFPDLNALVDTATALYEEELTGREHCSPHHTAIRQALVCWDELTKLIAWMSSNITSEQVRTIIVNHVNDTWGLKVRQSLWFHLSCLTFGQHTVQEFLVSFGVWIRTPAPYRPPNAPILSTLPEHTVIC

SEQ ID NO: 10845 - protein, 1301 aa, Artificial Sequence
  SARS-CoV-2/Iceland/280/2020__EPI_ISL_417608 spike protein (1-1147)(K986P_V987P_T887W_A1020W) WhcAg construct
MFVFLVLLPLVSSQCVNLTTRTQLPPAYTNSFTRGVYYPDKVFRSSVLHSTQDLFLPFFSNVTWFHAIHVSGTNGTKRFDNPVLPFNDGVYFASTEKSNIIRGWIFGTTLDSKTQSLLIVNNATNVVIKVCEFQFCNDPFLGVYYHKNNKSWMESEFRVYSSANNCTFEYVSQPFLMDLEGKQGNFKNLREFVFKNIDGYFKIYSKHTPINLVRDLPQGFSALEPLVDLPIGINITRFQTLLALHRSYLTPGDSSSGWTAGAAAYYVGYLQPRTFLLKYNENGTITDAVDCALDPLSETKCTLKSFTVEKGIYQTSNFRVQPTESIVRFPNITNLCPFGEVFNATRFASVYAWNRKRISNCVADYSVLYNSASFSTFKCYGVSPTKLNDLCFTNVYADSFVIRGDEVRQIAPGQTGKIADYNYKLPDDFTGCVIAWNSNNLDSKVGGNYNYLYRLFRKSNLKPFERDISTEIYQAGSTPCNGVEGFNCYFPLQSYGFQPTNGVGYQPYRVVVLSFELLHAPATVCGPKKSTNLVKNKCVNFNFNGLTGTGVLTESNKKFLPFQQFGRDIADTTDAVRDPQTLEILDITPCSFGGVSVITPGTNTSNQVAVLYQGVNCTEVPVAIHADQLTPTWRVYSTGSNVFQTRAGCLIGAEHVNNSYECDIPIGAGICASYHTQTNSPRRARSVASQSIIAYTMSLGAENSVAYSNNSIAIPTNFTISVTTEILPVSMTKTSVDCTMYICGDSTECSNLLLQYGSFCTQLNRALTGIAVEQDKNTQEVFAQVKQIYKTPPIKDFGGFNFSQILPDPSKPSKRSFIEDLLFNKVTLADAGFIKQYGDCLGDIAARDLICAQKFNGLTVLPPLLTDEMIAQYTSALLAGTITSGWWFGAGAALQIPFAMQMAYRFNGIGVTQNVLYENQKLIANQFNSAIGKIQDSLSSTASALGKLQDVVNQNAQALNTLVKQLSSNFGAISSVLNDILSRLDPPEAEVQIDRLITGRLQSLQTYVTQQLIRAAEIRWSANLAATKMSECVLGQSKRVDFCGKGYHLMSFPQSAPHGVVFLHVTYVPAQEKNFTTAPAICHDGKAHFPREGVFVSNGTHWFVTQRNFYEPQIITTDNTFVSGNCDVVIGIVNNTVYDPLQPELDSGGGGSDIDPYKEFGSSYQLLNFLPLDFFPDLNALVDTATALYEEELTGREHCSPHHTAIRQALVCWDELTKLIAWMSSNITSEQVRTIIVNHVNDTWGLKVRQSLWFHLSCLTFGQHTVQEFLVSFGVWIRTPAPYRPPNAPILSTLPEHTVIC

SEQ ID NO: 10846 - protein, 1301 aa, Artificial Sequence; identical to SEQ ID NO: 10801
  SARS-CoV-2/Iceland/247/2020__EPI_ISL_417575 spike protein (1-1147)(K986P_V987P_T887W_A1020W) WhcAg construct

SEQ ID NO: 10847 - protein, 1301 aa, Artificial Sequence
  SARS-CoV-2/Iceland/238/2020__EPI_ISL_417566 spike protein (1-1147)(K986P_V987P_T887W_A1020W) WhcAg construct
MFVFLVLLPLVSSQCVNLTTRTQLPPAYTNSFTRGVYYPDKVFRSSVLHSTQDLFLPFFSNVTWFHAIHVSGTNGTKRFDNPVLPFNDGVYFASTEKSNIIRGWIFGTTLDSKTQSLLIVNNATNVVIKVCEFQFCNDPFLGVYYHKNNKSWMESEFRVYSSANNCTFEYVSQPFLMDLEGKQGNFKNLREFVFKNIDGYFKIYSKHTPINLVRDLPQGFSALEPLVDLPIGINITRFQTLLALHRSYLTPGDSSSGWTAGAAAYYVGYLQPRTFLLKYNENGTITDAVDCALDPLSETKCTLKSFTVEKGIYQTSNFRVQPTESIVRFPNITNLCPFGEVFNATRFASVYAWNRKRISNCVADYSVLYNSASFSTFKCYGVSPTKLNDLCFTNVYADSFVIRGDEVRQIAPGQTGKIADYNYKLPDDFTGCVIAWNSNNLDSKVGGNYNYLYRLFRKSNLKPFERDISTEIYQAGSTPCNGVEGFNCYFPLQSYGFQPTNGVGYQPYRVVVLSFELLHAPATVCGPKKSTNLVKNKCVNFNFNGLTGTGVLTESNKKFLPFQQFGRDIADTTDAVRDPQTLEILDITPCSFGGVSVITPGTNTSNQVAVLYQGVNCTEVPVAIHADQLTPTWRVYSTGSNVFQTRAGCLIGAEHVNNSYECDIPIGAGICASYQTQTNSPRRARSVASQSIIAYTMSLGAENSVAYSNNSIAIPTNFTISVTTEILPVSMTKTSVDCTMYICGDSTECSNLLLQYGSFCTQLNRALTGIAVEQDKNTQEVFAQVKQIYKTPPIKDFGGFNFSQILPDPSKPSKRSFIEDLLFNKVTLADVGFIKQYGDCLGDIAARDLICAQKFNGLTVLPPLLTDEMIAQYTSALLAGTITSGWWFGAGAALQIPFAMQMAYRFNGIGVTQNVLYENQKLIANQFNSAIGKIQDSLSSTASALGKLQDVVNQNAQALNTLVKQLSSNFGAISSVLNDILSRLDPPEAEVQIDRLITGRLQSLQTYVTQQLIRAAEIRWSANLAATKMSECVLGQSKRVDFCGKGYHLMSFPQSAPHGVVFLHVTYVPAQEKNFTTAPAICHDGKAHFPREGVFVSNGTHWFVTQRNFYEPQIITTDNTFVSGNCDVVIGIVNNTVYDPLQPELDSGGGGSDIDPYKEFGSSYQLLNFLPLDFFPDLNALVDTATALYEEELTGREHCSPHHTAIRQALVCWDELTKLIAWMSSNITSEQVRTIIVNHVNDTWGLKVRQSLWFHLSCLTFGQHTVQEFLVSFGVWIRTPAPYRPPNAPILSTLPEHTVIC

SEQ ID NO: 10848 - protein, 1301 aa, Artificial Sequence
  SARS-CoV-2/Greece/16/2020__EPI_ISL_418265 spike protein (1-1147)(K986P_V987P_T887W_A1020W) WhcAg construct
MFVFLVLLPLVSSQCVNLTTRTQLPPAYTNSFTRGVYYPDKVFRSSVLHSTQDLFLPFFSNVTWFHAIHVSGTNGTKRFDNPVLPFNDGVYFASTEKSNIIRGWIFGTTLDSKTQSLLIVNNATNVVIKVCEFQFCNDPFLGVYYHKNNKSWMESEFRVYSSANNCTFEYVSQPFLMDLEGKQGNFKNLREFVFKNVDGYFKIYSKHTPINLVRDLPQGFSALEPLVDLPIGINITRFQTLLALHRSYLTPGDSSSGWTAGAAAYYVGYLQPRTFLLKYNENGTITDAVDCALDPLSETKCTLKSFTVEKGIYQTSNFRVQPTESIVRFPNITNLCPFGEVFNATRFASVYAWNRKRISNCVADYSVLYNSASFSTFKCYGVSPTKLNDLCFTNVYADSFVIRGDEVRQIAPGQTGKIADYNYKLPDDFTGCVIAWNSNNLDSKVGGNYNYLYRLFRKSNLKPFERDISTEIYQAGSTPCNGVEGFNCYFPLQSYGFQPTNGVGYQPYRVVVLSFELLHAPATVCGPKKSTNLVKNKCVNFNFNGLTGTGVLTESNKKFLPFQQFGRDIADTTDAVRDPQTLEILDITPCSFGGVSVITPGTNTSNQVAVLYQDVNCTEVPVAIHADQLTPTWRVYSTGSNVFQTRAGCLIGAEHVNNSYECDIPIGAGICASYQTQTNSPRRARSVASQSIIAYTMSLGAENSVAYSNNSIAIPTNFTISVTTEILPVSMTKTSVDCTMYICGDSTECSNLLLQYGSFCTQLNRALTGIAVEQDKNTQEVFAQVKQIYKTPPIKDFGGFNFSQILPDPSKPSKRSFIEDLLFNKVTLADAGFIKQYGDCLGDIAARDLICAQKFNGLTVLPPLLTDEMIAQYTSALLAGTITSGWWFGAGAALQIPFAMQMAYRFNGIGVTQNVLYENQKLIANQFNSAIGKIQDSLSSTASALGKLQDVVNQNAQALNTLVKQLSSNFGAISSVLNDILSRLDPPEAEVQIDRLITGRLQSLQTYVTQQLIRAAEIRWSANLAATKMSECVLGQSKRVDFCGKGYHLMSFPQSAPHGVVFLHVTYVPAQEKNFTTAPAICHDGKAHFPREGVFVSNGTHWFVTQRNFYEPQIITTDNTFVSGNCDVVIGIVNNTVYDPLQPELDSGGGGSDIDPYKEFGSSYQLLNFLPLDFFPDLNALVDTATALYEEELTGREHCSPHHTAIRQALVCWDELTKLIAWMSSNITSEQVRTIIVNHVNDTWGLKVRQSLWFHLSCLTFGQHTVQEFLVSFGVWIRTPAPYRPPNAPILSTLPEHTVIC

SEQ ID NO: 10849 - protein, 1301 aa, Artificial Sequence
  SARS-CoV-2/Iceland/319/2020__EPI_ISL_417648 spike protein (1-1147)(K986P_V987P_T887W_A1020W) WhcAg construct
MFVFLVLLPLVSSQCVNLTTRTQLPPAYTNSFTRGVYYPDKVFRSSVLHSTQDLFLPFFSNVTWFHAIHVSGTNGTKRFDNPVLPFNDGVYFASTEKSNIIRGWIFGTTLDSKTQSLLIVNNATNVVIKVCEFQFCNDPFLGVYYHKNNKSWMESEFRVYSSANNCTFEYVSQPFLIDLEGKQGNFKNLREFVFKNIDGYFKIYSKHTPINLVRDLPQGFSALEPLVDLPIGINITRFQTLLALHRSYLTPGDSSSGWTAGAAAYYVGYLQPRTFLLKYNENGTITDAVDCALDPLSETKCTLKSFTVEKGIYQTSNFRVQPTESIVRFPNITNLCPFGEVFNATRFASVYAWNRKRISNCVADYSVLYNSASFSTFKCYGVSPTKLNDLCFTNVYADSFVIRGDEVRQIAPGQTGKIADYNYKLPDDFTGCVIAWNSNNLDSKVGGNYNYLYRLFRKSNLKPFERDISTEIYQAGSTPCNGVEGFNCYFPLQSYGFQPTNGVGYQPYRVVVLSFELLHAPATVCGPKKSTNLVKNKCVNFNFNGLTGTGVLTESNKKFLPFQQFGRDIADTTDAVRDPQTLEILDITPCSFGGVSVITPGTNTSNQVAVLYQGVNCTEVPVAIHADQLTPTWRVYSTGSNVFQTRAGCLIGAEHVNNSYECDIPIGAGICASYQTQTNSPRRARSVASQSIIAYTMSLGAENSVAYSNNSIAIPTNFTISVTTEILPVSMTKTSVDCTMYICGDSTECSNLLLQYGSFCTQLNRALTGIAVEQDKNTQEVFAQVKQIYKTPPIKDFGGFNFSQILPDPSKPSKRSFIEDLLFNKVTLADAGFIKQYGDCLGDIAARDLICAQKFNGLTVLPPLLTDEMIAQYTSALLAGTITSGWWFGAGAALQIPFAMQMAYRFNGIGVTQNVLYENQKLIANQFNSAIGKIQDSLSSTASALGKLQDVVNQNAQALNTLVKQLSSNFGAISSVLNDILSRLDPPEAEVQIDRLITGRLQSLQTYVTQQLIRAAEIRWSANLAATKMSECVLGQSKRVDFCGKGYHLMSFPQSAPHGVVFLHVTYVPAQEKNFTTAPAICHDGKAHFPREGVFVSNGTHWFVTQRNFYEPQIITTDNTFVSGNCDVVIGIVNNTVYDPLQPELDSGGGGSDIDPYKEFGSSYQLLNFLPLDFFPDLNALVDTATALYEEELTGREHCSPHHTAIRQALVCWDELTKLIAWMSSNITSEQVRTIIVNHVNDTWGLKVRQSLWFHLSCLTFGQHTVQEFLVSFGVWIRTPAPYRPPNAPILSTLPEHTVIC

SEQ ID NO: 10850 - protein, 1301 aa, Artificial Sequence
  SARS-CoV-2/Congo/94/2020__EPI_ISL_417947 spike protein (1-1147)(K986P_V987P_T887W_A1020W) WhcAg construct
MFVFLVLLPLVSSQCVNLTTRTQLPPAYTNSFTRGVYYPDKVFRSSVLHSTQDLFLPFFSNVTWFHAIHVSGTNGTKRFDNPVLPFNDGVYFASTEKSNIIRGWIFGTTLDSKTQSLLIVNNATNVVIKVCEFQFCNDPFLGVYYHKNNKSWMESEFRVYSSANNCTFEYVSQPFLMDLEGKQGNFKNLREFVFKNIDGYFKIYSKHTPINLVRDLPQGFSALEPLVDLPIGINITRFQTLLALHRSYLTPGDSSSGWTAGAAAYYVGYLQPRTFLLKYNENGTITDAVDCALDPLSETKCTLKSFTVEKGIYQTSNFRVQPTESIVRFPNITNLCPFGEVFNATRFASVYAWNRKRISNCVADYSVLYNSASFSTFKCYGVSPTKLNDLCFTNVYADSFVIRGDEVRQIAPGQTGKIADYNYKLPDDFTGCVIAWNSNNLDSKVGGNYNYLYRLFRKSNLKPFERDISTEIYQAGSTPCNGVEGFNCYFPLQSYGFQPTNGVGYQPYRVVVLSFELLHAPATVCGPKKSTNLVKNKCVNFNFNGLTGTGVLTESNKKFLPFQQFGRDIADTTDAVRDPQTLEILDITPCSFGGVSVITPGTNTSNQVAVLYQGVNCTEVPVAIHADQLTPTWRVYSTGSNVFQTRAGCLIGAEHVNNSYECDIPIGAGICASYQTQTNSPRRARSVASQSIIAYTMSLGAENSVAYSNNSIAIPTNFTISVTTEILPVSMTKTSVDCTMYICGDSTECSNLLLQYGSFCTQLNRALTGIAVEQDKNTQEVFAQVKQIYKTPPIKDFGGFNFSQILPDPSKPSKRSFIEDILFNKVTLADAGFIKQYGDCLGDIAARDLICAQKFNGLTVLPPLLTDEMIAQYTSALLAGTITSGWWFGAGAALQIPFAMQMAYRFNGIGVTQNVLYENQKLIANQFNSAIGKIQDSLSSTASALGKLQDVVNQNAQALNTLVKQLSSNFGAISSVLNDILSRLDPPEAEVQIDRLITGRLQSLQTYVTQQLIRAAEIRWSANLAATKMSECVLGQSKRVDFCGKGYHLMSFPQSAPHGVVFLHVTYVPAQEKNFTTAPAICHDGKAHFPREGVFVSNGTHWFVTQRNFYEPQIITTDNTFVSGNCDVVIGIVNNTVYDPLQPELDSGGGGSDIDPYKEFGSSYQLLNFLPLDFFPDLNALVDTATALYEEELTGREHCSPHHTAIRQALVCWDELTKLIAWMSSNITSEQVRTIIVNHVNDTWGLKVRQSLWFHLSCLTFGQHTVQEFLVSFGVWIRTPAPYRPPNAPILSTLPEHTVIC

SEQ ID NO: 10851 - protein, 1301 aa, Artificial Sequence
  SARS-CoV-2/Congo/158/2020__EPI_ISL_417950 spike protein (1-1147)(K986P_V987P_T887W_A1020W) WhcAg construct
MFVFLVLLPLVSSQCVNLTTRTQLPPAYTNSFTRGVYYPDKVFRSSVLHSTQDLFLPFFSNVTWFHAIHVSGTNGTKRFDNPVLPFNDGVYFASTEKSNIIRGWIFGTTLDSKTQSLLIVNNATNVVIKVCEFQFCNDPFLGVYYHKNNKSWMESEFRVYSSANNCTFEYVSQPFLMDLEGKQGNFKNLREFVFKNIDGYFKIYSKHTPINLVRDLPQGFSALEPLVDLPIGINITRFQTLLALHRSYLTPGDSSSGWTAGAAAYYVGYLQPRTFLLKYNENGTITDAVDCALDPLSETKCTLKSFTVEKGIYQTSNFRVQPTESIVRFPNITNLCPFGEVFNATRFASVYAWNRKRISNCVADYSVLYNSASFSTFKCYGVSPTKLNDLCFTNVYADSFVIRGDEVRQIAPGQTGKIADYNYKLPDDFTGCVIAWNSNNLDSKVGGNYNYLYRLFRKSNLKPFERDISTEIYQAGSTPCNGVEGFNCYFPLQSYGFQPTNGVGYQPYRVVVLSFELLHAPATVCGPKKSTNLVKNKCVNFNFNGLTGTGVLTESNKKFLPFQQFGRDIADTTDAVRDPQTLEILDITPCSFGGVSVITPGTNTSNQVAVLYQDVNCTEVPVAIHADQLTPTWRVYSTGSNVFQTRAGCLIGAEHVNNSYECDIPIGAGICASYQTQTNSPRRARSVASQSIIAYTMSLGAENSVAYSNNSIAIPTNFTISVTTEILPVSMTKTSVDCTMYICGDSTECSNLLLQYGSFCTQLNRALTGIAVEQDKNTQEVFAQVKQIYKTPPIKDFGGFNFSQILPDPSKPSKRSFIEDLLFNKVTLADAGFIKQYGDCLGDIAARDLICAQKFNGLTVLPPLLTDEMIAQYTSALLAGTITSGWWFGAGAALQIPFAMQMAYRFNGIGVTQNVLYENQKLIANQFNSAIGKIQDSLSSTASALGKLQDVVNQNAQALNTLVKQLSSNFGAISSVLNDILSRLDPPEAEVQIDRLITGRLQSLQTYVTQQLIRAAEIRWSANLAATKMSECVLGQSKRVDFCGKGYHLMSFPQSAPHGVVFLHVTYVPAQEKNFTTAPAICHDGKAHFPREGVFVSNGTHWFVTQRNFYEPQIITTDNTFLSGNCDVVIGIVNNTVYDPLQPELDSGGGGSDIDPYKEFGSSYQLLNFLPLDFFPDLNALVDTATALYEEELTGREHCSPHHTAIRQALVCWDELTKLIAWMSSNITSEQVRTIIVNHVNDTWGLKVRQSLWFHLSCLTFGQHTVQEFLVSFGVWIRTPAPYRPPNAPILSTLPEHTVIC

SEQ ID NO: 10852 - protein, 1301 aa, Artificial Sequence
  SARS-CoV-2/USA/UT-00034/2020__EPI_ISL_417977 spike protein (1-1147)(K986P_V987P_T887W_A1020W) WhcAg construct
MFVFLVLLPLVSSQCVNLTTRTQLPPAYTNSFTRGVYYPDKVFRSSVLHSTQDLFLPFFSNVTWFHAIHVSGTNGTKRFDNPVLPFNDGVYFASTEKSNIIRGWIFGTTLDSKTQSLLIVNNATNVVIKVCEFQFCNDPFLGVYYYKNNKSWMESEFRVYSSANNCTFEYVSQPFLMDLEGKQGNFKNLREFVFKNIDGYFKIYSKHTPINLVRDLPQGFSALEPLVDLPIGINITRFQTLLALHRSYLTPGDSSSGWTAGAAAYYVGYLQPRTFLLKYNENGTITDAVDCALDPLSETKCTLKSFTVEKGIYQTSNFRVQPTESIVRFPNITNLCPFGEVFNATRFASVYAWNRKRISNCVADYSVLYNSASFSTFKCYGVSPTKLNDLCFTNVYADSFVIRGDEVRQIAPGQTGKIADYNYKLPDDFTGCVIAWNSNNLDSKVGGNYNYLYRLFRKSNLKPFERDISTEIYQAGSTPCNGVEGFNCYFPLQSYGFQPTNGVGYQPYRVVVLSFELLHAPATVCGPKKSTNLVKNKCVNFNFNGLTGTGVLTESNKKFLPFQQFGRDIADTTDAVRDPQTLEILDITPCSFGGVSVITPGTNTSNQVAVLYQGVNCTEVPVAIHADQLTPTWRVYSTGSNVFQTRAGCLIGAEHVNNSYECDIPIGAGICASYQTQTNSPRRARSVASQSIIAYTMSLGAENSVAYSNNSIAIPTNFTISVTTEILPVSMTKTSVDCTMYICGDSTECSNLLLQYGSFCTQLNRALTGIAVEQDKNTQEVFAQVKQIYKTPPIKDFGGFNFSQILPDPSKPSKRSFIEDLLFNKVTLADAGFIKQYGDCLGDIAARDLICAQKFNGLTVLPPLLTDEMIAQYTSALLAGTITSGWWFGAGAALQIPFAMQMAYRFNGIGVTQNVLYENQKLIANQFNSAIGKIQDSLSSTASALGKLQDVVNQNAQALNTLVKQLSSNFGAISSVLNDILSRLDPPEAEVQIDRLITGRLQSLQTYVTQQLIRAAEIRWSANLAATKMSECVLGQSKRVDFCGKGYHLMSFPQSAPHGVVFLHVTYVPAQEKNFTTAPAICHDGKAHFPREGVFVSNGTHWFVTQRNFYEPQIITTDNTFVSGNCDVVIGIVNNTVYDPLQPELDSGGGGSDIDPYKEFGSSYQLLNFLPLDFFPDLNALVDTATALYEEELTGREHCSPHHTAIRQALVCWDELTKLIAWMSSNITSEQVRTIIVNHVNDTWGLKVRQSLWFHLSCLTFGQHTVQEFLVSFGVWIRTPAPYRPPNAPILSTLPEHTVIC

SEQ ID NO: 10853 - protein, 1301 aa, Artificial Sequence
  SARS-CoV-2/USA/UT-00033/2020__EPI_ISL_417976 spike protein (1-1147)(K986P_V987P_T887W_A1020W) WhcAg construct
MFVFLVLLPLVSSQCVNLTTRTQLPPAYTNSFTRGVYYPDKVFRSSVLHSTQDLFLPFFSNVTWFHAIHVSGTNGTKRFDNPVLPFNDGVYFASTEKSNIIRGWIFGTTLDSKTQSLLIVNNATNVVIKVCEFQFCNDPFLGVYYHKNNKSWMESEFRVYSSANNCTFEYVSQPFLMDLEGKQGNFKNLREFVFKNIDGYFKIYSKHTPINLVRDLPQGFSALEPLVDLPIGINITRFQTLLALHRSYLTPGDSSSGLTAGAAAYYVGYLQPRTFLLKYNENGTITDAVDCALDPLSETKCTLKSFTVEKGIYQTSNFRVQPTESIVRFPNITNLCPFGEVFNATRFASVYAWNRKRISNCVADYSVLYNSASFSTFKCYGVSPTKLNDLCFTNVYADSFVIRGDEVRQIAPGQTGKIADYNYKLPDDFTGCVIAWNSNNLDSKVGGNYNYLYRLFRKSNLKPFERDISTEIYQAGSTPCNGVEGFNCYFPLQSYGFQPTNGVGYQPYRVVVLSFELLHAPATVCGPKKSTNLVKNKCVNFNFNGLTGTGVLTESNKKFLPFQQFGRDIADTTDAVRDPQTLEILDITPCSFGGVSVITPGTNTSNQVAVLYQGVNCTEVPVAIHADQLTPTWRVYSTGSNVFQTRAGCLIGAEHVNNSYECDIPIGAGICASYQTQTNSPRRARSVASQSIIAYTMSLGAENSVAYSNNSIAIPTNFTISVTTEILPVSMTKTSVDCTMYICGDSTECSNLLLQYGSFCTQLNRALTGIAVEQDKNTQEVFAQVKQIYKTPPIKDFGGFNFSQILPDPSKPSKRSFIEDLLFNKVTLADAGFIKQYGDCLGDIAARDLICAQKFNGLTVLPPLLTDEMIAQYTSALLAGTITSGWWFGAGAALQIPFAMQMAYRFNGIGVTQNVLYENQKLIANQFNSAIGKIQDSLSSTASALGKLQDVVNQNAQALNTLVKQLSSNFGAISSVLNDILSRLDPPEAEVQIDRLITGRLQSLQTYVTQQLIRAAEIRWSANLAATKMSECVLGQSKRVDFCGKGYHLMSFPQSAPHGVVFLHVTYVPAQEKNFTTAPAICHDGKAHFPREGVFVSNGTHWFVTQRNFYEPQIITTDNTFVSGNCDVVIGIVNNTVYDPLQPELDSGGGGSDIDPYKEFGSSYQLLNFLPLDFFPDLNALVDTATALYEEELTGREHCSPHHTAIRQALVCWDELTKLIAWMSSNITSEQVRTIIVNHVNDTWGLKVRQSLWFHLSCLTFGQHTVQEFLVSFGVWIRTPAPYRPPNAPILSTLPEHTVIC

SEQ ID NO: 10854 - protein, 1301 aa, Artificial Sequence
  SARS-CoV-2/USA/WI-13/2020__EPI_ISL_417516 spike protein (1-1147)(K986P_V987P_T887W_A1020W) WhcAg construct
MFVFLVLLPLVSSQCVNLTTRTQLPPAYTNSFTRGVYYPDKVFRSSVLHSTQDLFLPFFSNVTWFHAIHVSGTNGTKRFDNPVLPFNDGVYFASTEKSNIIRGWIFGTTLDSKTQSLLIVNNATNVVIKVCEFQFCNDPFLGVYYHKNNKSWMESEFRVYSSANNCTFEYVSQPFLMDLEGKQGNFKNLREFVFKNIDGYFKIYSKHTPINLVRDLPQGFSALEPLVDLPIGINITRFQTLLALHRSYLTPGDSSSGWTAGAAAYYVGYLQPRTFLLKYNENGTITDAVDCALDPLSETKCTLKSFTVEKGIYQTSNFRVLPTESIVRFPNITNLCPFGEVFNATRFASVYAWNRKRISNCVADYSVLYNSASFSTFKCYGVSPTKLNDLCFTNVYADSFVIRGDEVRQIAPGQTGKIADYNYKLPDDFTGCVIAWNSNNLDSKVGGNYNYLYRLFRKSNLKPFERDISTEIYQAGSTPCNGVEGFNCYFPLQSYGFQPTNGVGYQPYRVVVLSFELLHAPATVCGPKKSTNLVKNKCVNFNFNGLTGTGVLTESNKKFLPFQQFGRDIADTTDAVRDPQTLEILDITPCSFGGVSVITPGTNTSNQVAVLYQGVNCTEVPVAIHADQLTPTWRVYSTGSNVFQTRAGCLIGAEHVNNSYECDIPIGAGICASYQTQTNSPRRARSVASQSIIAYTMSLGAENSVAYSNNSIAIPTNFTISVTTEILPVSMTKTSVDCTMYICGDSTECSNLLLQYGSFCTQLNRALTGIAVEQDKNTQEVFAQVKQIYKTPPIKDFGGFNFSQILPDPSKPSKRSFIEDLLFNKVTLADAGFIKQYGDCLGDIAARDLICAQKFNGLTVLPPLLTDEMIAQYTSALLAGTITSGWWFGAGAALQIPFAMQMAYRFNGIGVTQNVLYENQKLIANQFNSAIGKIQDSLSSTASALGKLQDVVNQNAQALNTLVKQLSSNFGAISSVLNDILSRLDPPEAEVQIDRLITGRLQSLQTYVTQQLIRAAEIRWSANLAATKMSECVLGQSKRVDFCGKGYHLMSFPQSAPHGVVFLHVTYVPAQEKNFTTAPAICHDGKAHFPREGVFVSNGTHWFVTQRNFYEPQIITTDNTFVSGNCDVVIGIVNNTVYDPLQPELDSGGGGSDIDPYKEFGSSYQLLNFLPLDFFPDLNALVDTATALYEEELTGREHCSPHHTAIRQALVCWDELTKLIAWMSSNITSEQVRTIIVNHVNDTWGLKVRQSLWFHLSCLTFGQHTVQEFLVSFGVWIRTPAPYRPPNAPILSTLPEHTVIC

SEQ ID NO: 10855 - protein, 1300 aa, Artificial Sequence
  SARS-CoV-2/India/1-27/2020__EPI_ISL_413522 spike protein (1-1146)(K985P_V986P_T886W_A1019W) WhcAg construct
MFVFLVLLPLVSSQCVNLTTRTQLPPAYTNSFTRGVYYPDKVFRSSVLHSTQDLFLPFFSNVTWFHAIHVSGTNGTKRFDNPVLPFNDGVYFASTEKSNIIRGWIFGTTLDSKTQSLLIVNNATNVVIKVCEFQFCNDPFLGVYHKNNKSWMESEFRVYSSANNCTFEYVSQPFLMDLEGKQGNFKNLREFVFKNIDGYFKIYSKHTPINLVRDLPQGFSALEPLVDLPIGINITRFQTLLALHRSYLTPGDSSSGWTAGAAAYYVGYLQPRTFLLKYNENGTITDAVDCALDPLSETKCTLKSFTVEKGIYQTSNFRVQPTESIVRFPNITNLCPFGEVFNATRFASVYAWNRKRISNCVADYSVLYNSASFSTFKCYGVSPTKLNDLCFTNVYADSFVIRGDEVIQIAPGQTGKIADYNYKLPDDFTGCVIAWNSNNLDSKVGGNYNYLYRLFRKSNLKPFERDISTEIYQAGSTPCNGVEGFNCYFPLQSYGFQPTNGVGYQPYRVVVLSFELLHAPATVCGPKKSTNLVKNKCVNFNFNGLTGTGVLTESNKKFLPFQQFGRDIADTTDAVRDPQTLEILDITPCSFGGVSVITPGTNTSNQVAVLYQDVNCTEVPVAIHADQLTPTWRVYSTGSNVFQTRAGCLIGAEHVNNSYECDIPIGAGICASYQTQTNSPRRARSVASQSIIAYTMSLGAENSVAYSNNSIAIPTNFTISVTTEILPVSMTKTSVDCTMYICGDSTECSNLLLQYGSFCTQLNRALTGIAVEQDKNTQEVFAQVKQIYKTPPIKDFGGFNFSQILPDPSKPSKRSFIEDLLFNKVTLADAGFIKQYGDCLGDIAARDLICAQKFNGLTVLPPLLTDEMIAQYTSALLAGTITSGWWFGAGAALQIPFAMQMAYRFNGIGVTQNVLYENQKLIANQFNSAIGKIQDSLSSTASALGKLQDVVNQNAQALNTLVKQLSSNFGAISSVLNDILSRLDPPEAEVQIDRLITGRLQSLQTYVTQQLIRAAEIRWSANLAATKMSECVLGQSKRVDFCGKGYHLMSFPQSAPHGVVFLHVTYVPAQEKNFTTAPAICHDGKAHFPREGVFVSNGTHWFVTQRNFYEPQIITTDNTFVSGNCDVVIGIVNNTVYDPLQPELDSGGGGSDIDPYKEFGSSYQLLNFLPLDFFPDLNALVDTATALYEEELTGREHCSPHHTAIRQALVCWDELTKLIAWMSSNITSEQVRTIIVNHVNDTWGLKVRQSLWFHLSCLTFGQHTVQEFLVSFGVWIRTPAPYRPPNAPILSTLPEHTVIC

SEQ ID NO: 10856 - protein, 1295 aa, Artificial Sequence
  SARS-CoV-2/pangolin/Guangxi/P4L/2017__EPI_ISL_410538 spike protein (1-1141)(K980P_V981P_T881W_A1014W) WhcAg construct
MFVFLFVLPLVSSQCVNLTTRTGIPPGYTNSSTRGVYYPDKVFRSSILHLTQDLFLPFFSNVTWFNTINYQGGFKKFDNPVLPFNDGVYFASTEKSNIIRGWIFGTTLDARTQSLLIVNNATNVVIKVCEFQFCTDPFLGVYYHNNNKTWVENEFRVYSSANNCTFEYISQPFLMDLEGKQGNFKNLREFVFKNVDGYFKIYSKHTPIDLVRDLPRGFAALEPLVDLPIGINITRFQTLLALHRSYLTPGNLESGWTTGAAAYYVGYLQQRTFLLSYNQNGTITDAVDCSLDPLSETKCTLKSLTVEKGIYQTSNFRVQPTISIVRFPNITNLCPFGEVFNASKFASVYAWNRKRISNCVADYSVLYNSTSFSTFKCYGVSPTKLNDLCFTNVYADSFVVKGDEVRQIAPGQTGVIADYNYKLPDDFTGCVIAWNSVKQDALTGGNYGYLYRLFRKSKLKPFERDISTEIYQAGSTPCNGQVGLNCYYPLERYGFHPTTGVNYQPFRVVVLSFELLNGPATVCGPKLSTTLVKDKCVNFNFNGLTGTGVLTTSKKQFLPFQQFGRDISDTTDAVRDPQTLEILDITPCSFGGVSVITPGTNTSNQVAVLYQDVNCTEVPMAIHAEQLTPAWRVYSAGANVFQTRAGCLVGAEHVNNSYECDIPVGAGICASYHSMSSLRSVNQRSIIAYTMSLGAENSVAYSNNSIAIPTNFTISVTTEILPVSMTKTSVDCTMYICGDSIECSNLLLQYGSFCTQLNRALTGIAVEQDKNTQEVFAQVKQIYKTPPIKDFGGFNFSQILPDPSKPSKRSFIEDLLFNKVTLADAGFIKQYGDCLGDIAARDLICAQKFNGLTVLPPLLTDEMIAQYTSALLAGTITSGWWFGAGAALQIPFAMQMAYRFNGIGVTQNVLYENQKLIANQFNSAIGKIQDSLSSTASALGKLQDVVNQNAQALNTLVKQLSSNFGAISSVLNDILSRLDPPEAEVQIDRLITGRLQSLQTYVTQQLIRAAEIRWSANLAATKMSECVLGQSKRVDFCGKGYHLMSFPQSAPHGVVFLHVTYVPAQEKNFTTAPAICHEGKAHFPREGVFVSNGTHWFITQRNFYEPQIITTDNTFVSGSCDVVIGIVNNTVYDPLQPELDSGGGGSDIDPYKEFGSSYQLLNFLPLDFFPDLNALVDTATALYEEELTGREHCSPHHTAIRQALVCWDELTKLIAWMSSNITSEQVRTIIVNHVNDTWGLKVRQSLWFHLSCLTFGQHTVQEFLVSFGVWIRTPAPYRPPNAPILSTLPEHTVIC

SEQ ID NO: 10857 - protein, 1295 aa, Artificial Sequence
  SARS-CoV-2/pangolin/Guangxi/P5L/2017__EPI_ISL_410540 spike protein (1-1141)(K980P_V981P_T881W_A1014W) WhcAg construct
MFVFLFVLPLVSSQCVNLTTRTGIPPGYTNSSTRGVYYPDKVFRSSILHLTQDLFLPFFSNVTWFNTINYQGGFKKFDNPVLPFNDGVYFASTEKSNIIRGWIFGTTLDARTQSLLIVNNATNVVIKVCEFQFCTDPFLGVYYHNNNKTWVENEFRVYSSANNCTFEYISQPFLMDLEGKQGNFKNLREFVFKNVDGYFKIYSKHTPIDLVRDLPRGFAALEPLVDLPIGINITRFQTLLALHRSYLTPGKLESGWTTGAAAYYVGYLQQRTFLLSYNQNGTITDAVDCSLDPLSETKCTLKSLTVEKGIYQTSNFRVQPTISIVRFPNITNLCPFGEVFNASKFASVYAWNRKRISNCVADYSVLYNSTSFSTFKCYGVSPTKLNDLCFTNVYADSFVVKGDEVRQIAPGQTGVIADYNYKLPDDFTGCVIAWNSVKQDALTGGNYGYLYRLFRKSKLKPFERDISTEIYQAGSTPCNGQVGLNCYYPLERYGFHPTTGVNYQPFRVVVLSFELLNGPATVCGPKLSTTLVKDKCVNFNFNGLTGTGVLTTSKKQFLPFQQFGRDISDTTDAVRDPQTLEILDITPCSFGGVSVITPGTNTSNQVAVLYQDVNCTEVPMAIHAEQLTPAWRVYSAGANVFQTRAGCLVGAEHVNNSYECDIPVGAGICASYHSMSSFRSVNQRSIIAYTMSLGAENSVAYSNNSIAIPTNFTISVTTEILPVSMTKTSVDCTMYICGDSIECSNLLLQYGSFCTQLNRALTGIAVEQDKNTQEVFAQVKQIYKTPPIKDFGGFNFSQILPDPSKPSKRSFIEDLLFNKVTLADAGFIKQYGDCLGDIAARDLICAQKFNGLTVLPPLLTDEMIAQYTSALLAGTITSGWWFGAGAALQIPFAMQMAYRFNGIGVTQNVLYENQKLIANQFNSAIGKIQDSLSSTASALGKLQDVVNQNAQALNTLVKQLSSNFGAISSVLNDILSRLDPPEAEVQIDRLITGRLQSLQTYVTQQLIRAAEIRWSANLAATKMSECVLGQSKRVDFCGKGYHLMSFPQSAPHGVVFLHVTYVPAQEKNFTTAPAICHEGKAHFPREGVFVSNGTHWFITQRNFYEPQIITTDNTFVSGSCDVVIGIVNNTVYDPLQPELDSGGGGSDIDPYKEFGSSYQLLNFLPLDFFPDLNALVDTATALYEEELTGREHCSPHHTAIRQALVCWDELTKLIAWMSSNITSEQVRTIIVNHVNDTWGLKVRQSLWFHLSCLTFGQHTVQEFLVSFGVWIRTPAPYRPPNAPILSTLPEHTVIC

SEQ ID NO: 10858 - protein, 1295 aa, Artificial Sequence
  SARS-CoV-2/pangolin/Guangxi/P5E/2017__EPI_ISL_410541 spike protein (1-1141)(K980P_V981P_T881W_A1014W) WhcAg construct
MFVFLFVLPLVSSQCVNLTTRTGIPPGYTNSSTRGVYYPDKVFRSSILHLTQDLFLPFFSNVTWFNTITYQGGSKKFDNPVLPFNDGVYFASTEKSNIIRGWIFGTTLDARTQSLLIVNNATNVVIKVCEFQFCTDPFLGVYYHNNNKTWVENEFRVYSSANNCTFEYISQPFLMDLEGKQGNFKNLREFVFKNVDGYFKIYSKHTPIDLVRDLPRGFAALEPLVDLPIGINITRFQTLLALHRSYLTPGKLESGWTTGAAAYYVGYLQQRTFLLSYNQNGTITDAVDCSLDPLSETKCTLKSLTVEKGIYQTSNFRVQPTISIVRFPNITNLCPFGEVFNASKFASVYAWNRKRISNCVADYSVLYNSTSFSTFKCYGVSPTKLNDLCFTNVYADSFVVKGDEVRQIAPGQTGVIADYNYKLPDDFTGCVIAWNSVKQDALTGDNYGYLYRLFRKSKLKPFERDISTEIYQAGSTPCNGQVGLNCYYPLERYGFHPTTGVNYQPFRVVVLSFELLNGPATVCGPKLSTTLVKDKCVNFNFNGLTGTGVLTTSKKQFLPFQQFGRDISDTTDAVRDPQTLEILDITPCSFGGVSVITPGTNTSNQVAVLYQDVNCTEVPMAIHAEQLTPAWRVYSAGANVFQTRAGCLVGAEHVNNSYECDIPVGAGICASYHSMSSFRSVNQRSIIAYTMSLGAENSVAYSNNSIAIPTNFTISVTTEILPVSMTKTSVDCTMYICGDSIECSNLLLQYGSFCTQLNRALTGIAVEQDKNTQEVFAQVKQIYKTPPIKDFGGFNFSQILPDPSKPSKRSFIEDLLFNKVTLADAGFIKQYGDCLGDIAARDLICAQKFNGLTVLPPLLTDEMIAQYTSALLAGTITSGWWFGAGAALQIPFAMQMAYRFNGIGVTQNVLYENQKLIANQFNSAIGKIQDSLSSTASALGKLQDVVNQNAQALNTLVKQLSSNFGAISSVLNDILSRLDPPEAEVQIDRLITGRLQSLQTYVTQQLIRAAEIRWSANLAATKMSECVLGQSKRVDFCGKGYHLMSFPQSAPHGVVFLHVTYVPAQEKNFTTAPAICHEGKAHFPREGVFVSNGTHWFITQRNFYEPQIITTDNTFVSGSCDVVIGIVNNTVYDPLQPELDSGGGGSDIDPYKEFGSSYQLLNFLPLDFFPDLNALVDTATALYEEELTGREHCSPHHTAIRQALVCWDELTKLIAWMSSNITSEQVRTIIVNHVNDTWGLKVRQSLWFHLSCLTFGQHTVQEFLVSFGVWIRTPAPYRPPNAPILSTLPEHTVIC

SEQ ID NO: 10859 - protein, 1293 aa, Artificial Sequence
  SARS-CoV-2/pangolin/Guangxi/P1E/2017__EPI_ISL_410539 spike protein (1-1139)(K978P_V979P_T879W_A1012W) WhcAg construct
MFVFLFVLPLVSSQCVNLTTRTGIQPGYTNSSTRGVYYPDKVFRSSILHLTQDLFLPFFSNVTWFNTINYQGGFKKFDNPVLPFNDGVYFASTEKSNIIRGWIFGTTLDARTQSLLIVNNATNVVIKVCEFQFCTDPFLGVYYHNNNKTWVENEFRVYSSANNCTFEYISQPFLMDLEGKQGNFKNLREFVFKNVDGYFKIYSKHTPIDLVRDLPRGFAALEPLVDLPIGINITRFQTLLALHRSYLTPGKLESGWTTGAAAYYVGYLQQRTFLLSYNQNGTITDAVDCSLDPLSETKCTLKSLTVEKGIYQTSNFRVQPTISIVRFPNITNLCPFGEVFNASKFASVYAWNRKRISNCVADYSVLYNSTSFSTFKCYGVSPTKLNDLCFTNVYADSFVVKGDEVRQIAPGQTGVIADYNYKLPDDFTGCVIAWNSVKQDALTGGNYLYRLFRKSKLKPFERDISTEIYQAGSTPCNGQVGLNCYYPLERYGFHPTTGVNYQPFRVVVLSFELLNGPATVCGPKLSTTLVKDKCVNFNFNGLTGTGVLTTSKKQFLPFQQFGRDISDTTDAVRDPQTLEILDITPCSFGGVSVITPGTNTSNQVAVLYQDVNCTEVPMAIHAEQLTPAWRVYSAGANVFQTRAGCLVGAEHVNNSYECDIPVGAGICASYHSMSSLRSVNQRSIIAYTMSLGAENSVAYSNNSIAIPTNFTISVTTEILPVSMTKTSVDCTMYICGDSIECSNLLLQYGSFCTQLNRALTGIAVEQDKNTQEVFAQVKQIYKTPPIKDFGGFNFSQILPDPSKPSKRSFIEDLLFNKVTLADAGFIKQYGDCLGDIAARDLICAQKFNGLTVLPPLLTDEMIAQYTSALLAGTITSGWWFGAGAALQIPFAMQMAYRFNGIGVTQNVLYENQKLIANQFNSAIGKIQDSLSSTASALGKLQDVVNQNAQALNTLVKQLSSNFGAISSVLNDILSRLDPPEAEVQIDRLITGRLQSLQTYVTQQLIRAAEIRWSANLAATKMSECVLGQSKRVDFCGKGYHLMSFPQSAPHGVVFLHVTYVPAQEKNFTTAPAICHEGKAHFPREGVFVSNGTHWFITQRNFYEPQIITTDNTFVSGSCDVVIGIVNNTVYDPLQPELDSGGGGSDIDPYKEFGSSYQLLNFLPLDFFPDLNALVDTATALYEEELTGREHCSPHHTAIRQALVCWDELTKLIAWMSSNITSEQVRTIIVNHVNDTWGLKVRQSLWFHLSCLTFGQHTVQEFLVSFGVWIRTPAPYRPPNAPILSTLPEHTVIC

SEQ ID NO: 10860 - protein, 1301 aa, Artificial Sequence
  SARS-CoV-2/Wuhan/WIV05/2019__EPI_ISL_402128 spike protein (1-1147)(K986P_V987P_P1069F) WhcAg construct
MFVFLVLLPLVSSQCVNLTTRTQLPPAYTNSFTRGVYYPDKVFRSSVLHSTQDLFLPFFSNVTWFHAIHVSGTNGTKRFDNPVLPFNDGVYFASTEKSNIIRGWIFGTTLDSKTQSLLIVNNATNVVIKVCEFQFCNDPFLGVYYHKNNKSWMESEFRVYSSANNCTFEYVSQPFLMDLEGKQGNFKNLREFVFKNIDGYFKIYSKHTPINLVRDLPQGFSALEPLVDLPIGINITRFQTLLALHRSYLTPGDSSSGWTAGAAAYYVGYLQPRTFLLKYNENGTITDAVDCALDPLSETKCTLKSFTVEKGIYQTSNFRVQPTESIVRFPNITNLCPFGEVFNATRFASVYAWNRKRISNCVADYSVLYNSASFSTFKCYGVSPTKLNDLCFTNVYADSFVIRGDEVRQIAPGQTGKIADYNYKLPDDFTGCVIAWNSNNLDSKVGGNYNYLYRLFRKSNLKPFERDISTEIYQAGSTPCNGVEGFNCYFPLQSYGFQPTNGVGYQPYRVVVLSFELLHAPATVCGPKKSTNLVKNKCVNFNFNGLTGTGVLTESNKKFLPFQQFGRDIADTTDAVRDPQTLEILDITPCSFGGVSVITPGTNTSNQVAVLYQDVNCTEVPVAIHADQLTPTWRVYSTGSNVFQTRAGCLIGAEHVNNSYECDIPIGAGICASYQTQTNSPRRARSVASQSIIAYTMSLGAENSVAYSNNSIAIPTNFTISVTTEILPVSMTKTSVDCTMYICGDSTECSNLLLQYGSFCTQLNRALTGIAVEQDKNTQEVFAQVKQIYKTPPIKDFGGFNFSQILPDPSKPSKRSFIEDLLFNKVTLADAGFIKQYGDCLGDIAARDLICAQKFNGLTVLPPLLTDEMIAQYTSALLAGTITSGWTFGAGAALQIPFAMQMAYRFNGIGVTQNVLYENQKLIANQFNSAIGKIQDSLSSTASALGKLQDVVNQNAQALNTLVKQLSSNFGAISSVLNDILSRLDPPEAEVQIDRLITGRLQSLQTYVTQQLIRAAEIRASANLAATKMSECVLGQSKRVDFCGKGYHLMSFPQSAPHGVVFLHVTYVFAQEKNFTTAPAICHDGKAHFPREGVFVSNGTHWFVTQRNFYEPQIITTDNTFVSGNCDVVIGIVNNTVYDPLQPELDSGGGGSDIDPYKEFGSSYQLLNFLPLDFFPDLNALVDTATALYEEELTGREHCSPHHTAIRQALVCWDELTKLIAWMSSNITSEQVRTIIVNHVNDTWGLKVRQSLWFHLSCLTFGQHTVQEFLVSFGVWIRTPAPYRPPNAPILSTLPEHTVIC

SEQ ID NO: 10861 - protein, 1297 aa, Artificial Sequence
  SARS-CoV-2/bat/Yunnan/RaTG13/2013__EPI_ISL_402131 spike protein (1-1143)(K982P_V983P_P1065F) WhcAg construct
MFVFLVLLPLVSSQCVNLTTRTQLPPAYTNSSTRGVYYPDKVFRSSVLHLTQDLFLPFFSNVTWFHAIHVSGTNGIKRFDNPVLPFNDGVYFASTEKSNIIRGWIFGTTLDSKTQSLLIVNNATNVVIKVCEFQFCNDPFLGVYYHKNNKSWMESEFRVYSSANNCTFEYVSQPFLMDLEGKQGNFKNLREFVFKNIDGYFKIYSKHTPINLVRDLPPGFSALEPLVDLPIGINITRFQTLLALHRSYLTPGDSSSGWTAGAAAYYVGYLQPRTFLLKYNENGTITDAVDCALDPLSETKCTLKSFTVEKGIYQTSNFRVQPTDSIVRFPNITNLCPFGEVFNATTFASVYAWNRKRISNCVADYSVLYNSTSFSTFKCYGVSPTKLNDLCFTNVYADSFVITGDEVRQIAPGQTGKIADYNYKLPDDFTGCVIAWNSKHIDAKEGGNFNYLYRLFRKANLKPFERDISTEIYQAGSKPCNGQTGLNCYYPLYRYGFYPTDGVGHQPYRVVVLSFELLNAPATVCGPKKSTNLVKNKCVNFNFNGLTGTGVLTESNKKFLPFQQFGRDIADTTDAVRDPQTLEILDITPCSFGGVSVITPGTNASNQVAVLYQDVNCTEVPVAIHADQLTPTWRVYSTGSNVFQTRAGCLIGAEHVNNSYECDIPIGAGICASYQTQTNSRSVASQSIIAYTMSLGAENSVAYSNNSIAIPTNFTISVTTEILPVSMTKTSVDCTMYICGDSTECSNLLLQYGSFCTQLNRALTGIAVEQDKNTQEVFAQVKQIYKTPPIKDFGGFNFSQILPDPSKPSKRSFIEDLLFNKVTLADAGFIKQYGDCLGDIAARDLICAQKFNGLTVLPPLLTDEMIAQYTSALLAGTITSGWTFGAGAALQIPFAMQMAYRFNGIGVTQNVLYENQKLIANQFNSAIGKIQDSLSSTASALGKLQDVVNQNAQALNTLVKQLSSNFGAISSVLNDILSRLDPPEAEVQIDRLITGRLQSLQTYVTQQLIRAAEIRASANLAATKMSECVLGQSKRVDFCGKGYHLMSFPQSAPHGVVFLHVTYVFAQEKNFTTAPAICHDGKAHFPREGVFVSNGTHWFVTQRNFYEPQIITTDNTFVSGSCDVVIGIVNNTVYDPLQPELDSGGGGSDIDPYKEFGSSYQLLNFLPLDFFPDLNALVDTATALYEEELTGREHCSPHHTAIRQALVCWDELTKLIAWMSSNITSEQVRTIIVNHVNDTWGLKVRQSLWFHLSCLTFGQHTVQEFLVSFGVWIRTPAPYRPPNAPILSTLPEHTVIC

SEQ ID NO: 10862 - protein, 1301 aa, Artificial Sequence
  SARS-CoV-2/Wuhan/HBCDC-HB-01/2019__EPI_ISL_402132 spike protein (1-1147)(K986P_V987P_P1069F) WhcAg construct
MFVFLVLLPLVSSQCVNLTTRTQLPPAYTNSITRGVYYPDKVFRSSVLHSTQDLFLPFFSNVTWFHAIHVSGTNGTKRFDNPVLPFNDGVYFASTEKSNIIRGWIFGTTLDSKTQSLLIVNNATNVVIKVCEFQFCNDPFLGVYYHKNNKSWMESEFRVYSSANNCTFEYVSQPFLMDLEGKQGNFKNLREFVFKNIDGYFKIYSKHTPINLVRDLPQGFSALEPLVDLPIGINITRFQTLLALHRSYLTPGDSSSGWTAGAAAYYVGYLQPRTFLLKYNENGTITDAVDCALDPLSETKCTLKSFTVEKGIYQTSNFRVQPTESIVRFPNITNLCPFGEVFNATRFASVYAWNRKRISNCVADYSVLYNSASFSTFKCYGVSPTKLNDLCFTNVYADSFVIRGDEVRQIAPGQTGKIADYNYKLPDDFTGCVIAWNSNNLDSKVGGNYNYLYRLFRKSNLKPFERDISTEIYQAGSTPCNGVEGFNCYFPLQSYGFQPTNGVGYQPYRVVVLSFELLHAPATVCGPKKSTNLVKNKCVNFNFNGLTGTGVLTESNKKFLPFQQFGRDIADTTDAVRDPQTLEILDITPCSFGGVSVITPGTNTSNQVAVLYQDVNCTEVPVAIHADQLTPTWRVYSTGSNVFQTRAGCLIGAEHVNNSYECDIPIGAGICASYQTQTNSPRRARSVASQSIIAYTMSLGAENSVAYSNNSIAIPTNFTISVTTEILPVSMTKTSVDCTMYICGDSTECSNLLLQYGSFCTQLNRALTGIAVEQDKNTQEVFAQVKQIYKTPPIKDFGGFNFSQILPDPSKPSKRSFIEDLLFNKVTLADAGFIKQYGDCLGDIAARDLICAQKFNGLTVLPPLLTDEMIAQYTSALLAGTITSGWTFGAGAALQIPFAMQMAYRFNGIGVTQNVLYENQKLIANQFNSAIGKIQDSLSSTASALGKLQDVVNQNAQALNTLVKQLSSNFGAISSVLNDILSRLDPPEAEVQIDRLITGRLQSLQTYVTQQLIRAAEIRASANLAATKMSECVLGQSKRVDFCGKGYHLMSFPQSAPHGVVFLHVTYVFAQEKNFTTAPAICHDGKAHFPREGVFVSNGTHWFVTQRNFYEPQIITTDNTFVSGNCDVVIGIVNNTVYDPLQPELDSGGGGSDIDPYKEFGSSYQLLNFLPLDFFPDLNALVDTATALYEEELTGREHCSPHHTAIRQALVCWDELTKLIAWMSSNITSEQVRTIIVNHVNDTWGLKVRQSLWFHLSCLTFGQHTVQEFLVSFGVWIRTPAPYRPPNAPILSTLPEHTVIC

SEQ ID NO: 10863 - protein, 1301 aa, Artificial Sequence
  SARS-CoV-2/Guangdong/20SF028/2020__EPI_ISL_403936 spike protein (1-1147)(K986P_V987P_P1069F) WhcAg construct
MFVFLVLLPLVSSQCVNLTTRTQLPPAYTNSFTRGVYYPDKVFRSSVLYSTQDLFLPFFSNVTWFHAIHVSGTNGTKRFDNPVLPFNDGVYFASTEKSNIIRGWIFGTTLDSKTQSLLIVNNATNVVIKVCEFQFCNDPFLGVYYHKNNKSWMESEFRVYSSANNCTFEYVSQPFLMDLEGKQGNFKNLREFVFKNIDGYFKIYSKHTPINLVRDLPQGFSALEPLVDLPIGINITRFQTLLALHRSYLTPGDSSSGWTAGAAAYYVGYLQPRTFLLKYNENGTITDAVDCALDPLSETKCTLKSFTVEKGIYQTSNFRVQPTESIVRFPNITNLCPFGEVFNATRFASVYAWNRKRISNCVADYSVLYNSASFSTFKCYGVSPTKLNDLCFTNVYADSFVIRGDEVRQIAPGQTGKIADYNYKLPDDFTGCVIAWNSNNLDSKVGGNYNYLYRLFRKSNLKPFERDISTEIYQAGSTPCNGVEGFNCYFPLQSYGFQPTNGVGYQPYRVVVLSFELLHAPATVCGPKKSTNLVKNKCVNFNFNGLTGTGVLTESNKKFLPFQQFGRDIADTTDAVRDPQTLEILDITPCSFGGVSVITPGTNTSNQVAVLYQDVNCTEVPVAIHADQLTPTWRVYSTGSNVFQTRAGCLIGAEHVNNSYECDIPIGAGICASYQTQTNSPRRARSVASQSIIAYTMSLGAENSVAYSNNSIAIPTNFTISVTTEILPVSMTKTSVDCTMYICGDSTECSNLLLQYGSFCTQLNRALTGIAVEQDKNTQEVFAQVKQIYKTPPIKDFGGFNFSQILPDPSKPSKRSFIEDLLFNKVTLADAGFIKQYGDCLGDIAARDLICAQKFNGLTVLPPLLTDEMIAQYTSALLAGTITSGWTFGAGAALQIPFAMQMAYRFNGIGVTQNVLYENQKLIANQFNSAIGKIQDSLSSTASALGKLQDVVNQNAQALNTLVKQLSSNFGAISSVLNDILSRLDPPEAEVQIDRLITGRLQSLQTYVTQQLIRAAEIRASANLAATKMSECVLGQSKRVDFCGKGYHLMSFPQSAPHGVVFLHVTYVFAQEKNFTTAPAICHDGKAHFPREGVFVSNGTHWFVTQRNFYEPQIITTDNTFVSGNCDVVIGIVNNTVYDPLQPELDSGGGGSDIDPYKEFGSSYQLLNFLPLDFFPDLNALVDTATALYEEELTGREHCSPHHTAIRQALVCWDELTKLIAWMSSNITSEQVRTIIVNHVNDTWGLKVRQSLWFHLSCLTFGQHTVQEFLVSFGVWIRTPAPYRPPNAPILSTLPEHTVIC

SEQ ID NO: 10864 - protein, 1301 aa, Artificial Sequence
  SARS-CoV-2/Shenzhen/SZTH-001/2020__EPI_ISL_406592 spike protein (1-1147)(K986P_V987P_P1069F) WhcAg construct
MFVFLVLLPLVSSQCVNLTTRTQLPPAYTNSFTRGVYYPDKVFRSSVLHSTQDLFLPFFSNVTWFHAIHVSGTNGTKRFDNPVLPFNDGVYFASTEKSNIIRGWIFGTTLDSKTQSLLIVNNATNVVIKVCEFQFCNDPFLGVYYHKNNKSWMESEFRVYSSANNCTFEYVSQPFLMDLEGKQGNFKNLREFVFKNIDGYFKIYSKHTPINLVRDLPQGFSALEPLVDLPIGINITRFQTLLALHRSYLTPGDSSSGWTAGAAAYYVGYLQPRTFLLKYNENGTITDAVDCALDPLSETKCTLKSFTVEKGIYQTSNFRVQPTESIVRFPNITNLCPFGEVFNATRFASVYAWNRKRISNCVADYSVLYNSASFSTFKCYGVSPTKLNDLCFTNVYADSFVIRGDEVRQIAPGQTGKIADYNYKLPDDFTGCVIAWNSNNLDSKVGGNYNYLYRLFRKSNLKPFERDISTEIYQAGSTPCNGVEGFNCYFPLQSYGFQPTNGVGYQPYRVVVLSFELLHAPATVCGPKKSTNLVKNKCVNFNFNGLTGTGVLTESNKKFLPFQQFGRDIADTTDAVRDPQTLEILDITPCSFGGVSVITPGTNTSNQVAVLYQDVNCTEVPVAIHADQLTPTWRVYSTGSNVFQTRAGCLIGAEHVNNSYECDIPIGAGICASYQTQTNSPRRARSVASQSIIAYTMSLGAENSVAYSNNSIAIPTNFTISVTTEILPVSMTKTSVDCTMYICGDSTECSNLLLQYGSFCTQLNRALTGIAVEQDKNTQEVFAQVKQIYKTPPIKDFGGFNFSQILPDPSKPSKRSFIEDLLFNKVTLADAGFIKQYGDCLGDIAARDLICAQKFNGLTVLPPLLTDEMIAQYTSALLAGTITSGWTFGAGAALQIPFAMQMAYRFNGIGVTQNVLYENQKLIANQFNSAIGKIQDSLSSTASALGKLQDVVNQNAQALNTLVKQLSSNFGAISSVLNDILSRLDPPEAEVQIDRLITGRLQSLQTYVTQQLIRAAEIRASANLAATKMSECVLGQSKRVDFCGKGYHLMSFPQSAPHGVVFLHVTYVFAQEKNFTTAPAICHDGKAHFPREGVFVSNGTHWFVTQRNFYEPQIITTDNTFVSGNCDVLIGIVNNTVYDPLQPELDSGGGGSDIDPYKEFGSSYQLLNFLPLDFFPDLNALVDTATALYEEELTGREHCSPHHTAIRQALVCWDELTKLIAWMSSNITSEQVRTIIVNHVNDTWGLKVRQSLWFHLSCLTFGQHTVQEFLVSFGVWIRTPAPYRPPNAPILSTLPEHTVIC

SEQ ID NO: 10865 - protein, 1301 aa, Artificial Sequence
  SARS-CoV-2/Shenzhen/SZTH-004/2020__EPI_ISL_406595 spike protein (1-1147)(K986P_V987P_P1069F) WhcAg construct
MFVFLVLLPLVSSQCVNLTTRTQLPPAYTNSFTRGVYYPDKVFRSSVLHSTQDLFLPFFSNVTWFHAIHVSGTNGTKRFDNPVLPFNDGVYFASTEKSNIIRGWIFGTTLDSKTQSLLIVNNATNVVIKVCEFQFCNDPFLGVYYHKNNKSWMESEFRVYSSANNCTFEYVSQPFLMDLEGKQGNFKNLREFVFKNIDGYFKIYSKHTPINLVRDLPQGFSALEPLVDLPIGINITRFQTLLALHRSYLTPGDSSSGWTAGAAAYYVGYLQPRTFLLKYNENGTITDAVDCALDPLSETKCTLKSFTVEKGIYQTSNFRVQPTESIVRFPNITNLCPFGEVFNATRFASVYAWDRKRISNCVAYYSVLYNSASFSTFKCYGVSPTKLNDLCFTNVYADSFVIRGDEVRQIAPGQTGKIADYNYKLPDDFTGCVIAWNSNNLDSKVGGNYNYLYRLFRKSNLKPFERDISTEIYQAGSTPCNGVEGFNCYFPLQSYGFQPTNGVGYQPYRVVVLSFELLHAPATVCGPKKSTNLVKNKCVNFNFNGLTGTGVLTESNKKFLPFQQFGRDIADTTDAVRDPQTLEILDITPCSFGGVSVITPGTNTSNQVAVLYQDVNCTEVPVAIHADQLTPTWRVYSTGSNVFQTRAGCLIGAEHVNNSYECDIPIGAGICASYQTQTNSPRRARSVASQSIIAYTMSLGAENSVAYSNNSIAIPTNFTISVTTEILPVSMTKTSVDCTMYICGDSTECSNLLLQYGSFCTQLNRALTGIAVEQDKNTQEVFAQVKQIYKTPPIKDFGGFNFSQILPDPSKPSKRSFIEDLLFNKVTLADAGFIKQYGDCLGDIAARDLICAQKFNGLTVLPPLLTDEMIAQYTSALLAGTITSGWTFGAGAALQIPFAMQMAYRFNGIGVTQNVLYENQKLIANQFNSAIGKIQDSLSSTASALGKLQDVVNQNAQALNTLVKQLSSNFGAISSVLNDILSRLDPPEAEVQIDRLITGRLQSLQTYVTQQLIRAAEIRASANLAATKMSECVLGQSKRVDFCGKGYHLMSFPQSAPHGVVFLHVTYVFAQEKNFTTAPAICHDGKAHFPREGVFVSNGTHWFVTQRNFYEPQIITTDNTFVSGNCDVVIGIVNNTVYDPLQPELDSGGGGSDIDPYKEFGSSYQLLNFLPLDFFPDLNALVDTATALYEEELTGREHCSPHHTAIRQALVCWDELTKLIAWMSSNITSEQVRTIIVNHVNDTWGLKVRQSLWFHLSCLTFGQHTVQEFLVSFGVWIRTPAPYRPPNAPILSTLPEHTVIC

SEQ ID NO: 10866 - protein, 1301 aa, Artificial Sequence
  SARS-CoV-2/France/IDF0372/2020__EPI_ISL_406596 spike protein (1-1147)(K986P_V987P_P1069F) WhcAg construct
MFVFLVLLPLVSSQCVNLTTRTQLPPAYTNSFTRGVYYPDKVFRSSVLHSTQDLFLPFFSNVTWFHAIHVSGTNGTKRFDNPVLPFNDGVYFASTEKSNIIRGWIFGTTLDSKTQSLLIVNNATNVVIKVCEFQFCNDPFLGVYYHKNNKSWMESEFRVYSSANNCTFEYVSQPFLMDLEGKQGNFKNLREFVFKNIDGYFKIYSKHTPINLVRDLPQGFSALEPLVDLPIGINITRFQTLLALHRSYLTPGDSSSGWTAGAAAYYVGYLQPRTFLLKYNENGTITDAVDCALDPLSETKCTLKSFTVEKGIYQTSNFRVQPTESIVRFPNITNLCPFGEVFNATRFASVYAWNRKRISNCVADYSFLYNSASFSTFKCYGVSPTKLNDLCFTNVYADSFVIRGDEVRQIAPGQTGKIADYNYKLPDDFTGCVIAWNSNNLDSKVGGNYNYLYRLFRKSNLKPFERDISTEIYQAGSTPCNGVEGFNCYFPLQSYGFQPTNGVGYQPYRVVVLSFELLHAPATVCGPKKSTNLVKNKCVNFNFNGLTGTGVLTESNKKFLPFQQFGRDIADTTDAVRDPQTLEILDITPCSFGGVSVITPGTNTSNQVAVLYQDVNCTEVPVAIHADQLTPTWRVYSTGSNVFQTRAGCLIGAEHVNNSYECDIPIGAGICASYQTQTNSPRRARSVASQSIIAYTMSLGAENSVAYSNNSIAIPTNFTISVTTEILPVSMTKTSVDCTMYICGDSTECSNLLLQYGSFCTQLNRALTGIAVEQDKNTQEVFAQVKQIYKTPPIKDFGGFNFSQILPDPSKPSKRSFIEDLLFNKVTLADAGFIKQYGDCLGDIAARDLICAQKFNGLTVLPPLLTDEMIAQYTSALLAGTITSGWTFGAGAALQIPFAMQMAYRFNGIGVTQNVLYENQKLIANQFNSAIGKIQDSLSSTASALGKLQDVVNQNAQALNTLVKQLSSNFGAISSVLNDILSRLDPPEAEVQIDRLITGRLQSLQTYVTQQLIRAAEIRASANLAATKMSECVLGQSKRVDFCGKGYHLMSFPQSAPHGVVFLHVTYVFAQEKNFTTAPAICHDGKAHFPREGVFVSNGTHWFVTQRNFYEPQIITTDNTFVSGNCDVVIGIVNNTVYDPLQPELDSGGGGSDIDPYKEFGSSYQLLNFLPLDFFPDLNALVDTATALYEEELTGREHCSPHHTAIRQALVCWDELTKLIAWMSSNITSEQVRTIIVNHVNDTWGLKVRQSLWFHLSCLTFGQHTVQEFLVSFGVWIRTPAPYRPPNAPILSTLPEHTVIC

SEQ ID NO: 10867 - protein, 1301 aa, Artificial Sequence
  SARS-CoV-2/Australia/VIC01/2020__EPI_ISL_406844 spike protein (1-1147)(K986P_V987P_P1069F) WhcAg construct
MFVFLVLLPLVSSQCVNLTTRTQLPPAYTNSFTRGVYYPDKVFRSSVLHSTQDLFLPFFSNVTWFHAIHVSGTNGTKRFDNPVLPFNDGVYFASTEKSNIIRGWIFGTTLDSKTQSLLIVNNATNVVIKVCEFQFCNDPFLGVYYHKNNKSWMESEFRVYSSANNCTFEYVSQPFLMDLEGKQGNFKNLREFVFKNIDGYFKIYSKHTPINLVRDLPQGFSALEPLVDLPIGINITRFQTLLALHRRYLTPGDSSSGWTAGAAAYYVGYLQPRTFLLKYNENGTITDAVDCALDPLSETKCTLKSFTVEKGIYQTSNFRVQPTESIVRFPNITNLCPFGEVFNATRFASVYAWNRKRISNCVADYSVLYNSASFSTFKCYGVSPTKLNDLCFTNVYADSFVIRGDEVRQIAPGQTGKIADYNYKLPDDFTGCVIAWNSNNLDSKVGGNYNYLYRLFRKSNLKPFERDISTEIYQAGSTPCNGVEGFNCYFPLQSYGFQPTNGVGYQPYRVVVLSFELLHAPATVCGPKKSTNLVKNKCVNFNFNGLTGTGVLTESNKKFLPFQQFGRDIADTTDAVRDPQTLEILDITPCSFGGVSVITPGTNTSNQVAVLYQDVNCTEVPVAIHADQLTPTWRVYSTGSNVFQTRAGCLIGAEHVNNSYECDIPIGAGICASYQTQTNSPRRARSVASQSIIAYTMSLGAENSVAYSNNSIAIPTNFTISVTTEILPVSMTKTSVDCTMYICGDSTECSNLLLQYGSFCTQLNRALTGIAVEQDKNTQEVFAQVKQIYKTPPIKDFGGFNFSQILPDPSKPSKRSFIEDLLFNKVTLADAGFIKQYGDCLGDIAARDLICAQKFNGLTVLPPLLTDEMIAQYTSALLAGTITSGWTFGAGAALQIPFAMQMAYRFNGIGVTQNVLYENQKLIANQFNSAIGKIQDSLSSTASALGKLQDVVNQNAQALNTLVKQLSSNFGAISSVLNDILSRLDPPEAEVQIDRLITGRLQSLQTYVTQQLIRAAEIRASANLAATKMSECVLGQSKRVDFCGKGYHLMSFPQSAPHGVVFLHVTYVFAQEKNFTTAPAICHDGKAHFPREGVFVSNGTHWFVTQRNFYEPQIITTDNTFVSGNCDVVIGIVNNTVYDPLQPELDSGGGGSDIDPYKEFGSSYQLLNFLPLDFFPDLNALVDTATALYEEELTGREHCSPHHTAIRQALVCWDELTKLIAWMSSNITSEQVRTIIVNHVNDTWGLKVRQSLWFHLSCLTFGQHTVQEFLVSFGVWIRTPAPYRPPNAPILSTLPEHTVIC

SEQ ID NO: 10868 - protein, 1301 aa, Artificial Sequence
  SARS-CoV-2/Germany/BavPat1/2020__EPI_ISL_406862 spike protein (1-1147)(K986P_V987P_P1069F) WhcAg construct
MFVFLVLLPLVSSQCVNLTTRTQLPPAYTNSFTRGVYYPDKVFRSSVLHSTQDLFLPFFSNVTWFHAIHVSGTNGTKRFDNPVLPFNDGVYFASTEKSNIIRGWIFGTTLDSKTQSLLIVNNATNVVIKVCEFQFCNDPFLGVYYHKNNKSWMESEFRVYSSANNCTFEYVSQPFLMDLEGKQGNFKNLREFVFKNIDGYFKIYSKHTPINLVRDLPQGFSALEPLVDLPIGINITRFQTLLALHRSYLTPGDSSSGWTAGAAAYYVGYLQPRTFLLKYNENGTITDAVDCALDPLSETKCTLKSFTVEKGIYQTSNFRVQPTESIVRFPNITNLCPFGEVFNATRFASVYAWNRKRISNCVADYSVLYNSASFSTFKCYGVSPTKLNDLCFTNVYADSFVIRGDEVRQIAPGQTGKIADYNYKLPDDFTGCVIAWNSNNLDSKVGGNYNYLYRLFRKSNLKPFERDISTEIYQAGSTPCNGVEGFNCYFPLQSYGFQPTNGVGYQPYRVVVLSFELLHAPATVCGPKKSTNLVKNKCVNFNFNGLTGTGVLTESNKKFLPFQQFGRDIADTTDAVRDPQTLEILDITPCSFGGVSVITPGTNTSNQVAVLYQGVNCTEVPVAIHADQLTPTWRVYSTGSNVFQTRAGCLIGAEHVNNSYECDIPIGAGICASYQTQTNSPRRARSVASQSIIAYTMSLGAENSVAYSNNSIAIPTNFTISVTTEILPVSMTKTSVDCTMYICGDSTECSNLLLQYGSFCTQLNRALTGIAVEQDKNTQEVFAQVKQIYKTPPIKDFGGFNFSQILPDPSKPSKRSFIEDLLFNKVTLADAGFIKQYGDCLGDIAARDLICAQKFNGLTVLPPLLTDEMIAQYTSALLAGTITSGWTFGAGAALQIPFAMQMAYRFNGIGVTQNVLYENQKLIANQFNSAIGKIQDSLSSTASALGKLQDVVNQNAQALNTLVKQLSSNFGAISSVLNDILSRLDPPEAEVQIDRLITGRLQSLQTYVTQQLIRAAEIRASANLAATKMSECVLGQSKRVDFCGKGYHLMSFPQSAPHGVVFLHVTYVFAQEKNFTTAPAICHDGKAHFPREGVFVSNGTHWFVTQRNFYEPQIITTDNTFVSGNCDVVIGIVNNTVYDPLQPELDSGGGGSDIDPYKEFGSSYQLLNFLPLDFFPDLNALVDTATALYEEELTGREHCSPHHTAIRQALVCWDELTKLIAWMSSNITSEQVRTIIVNHVNDTWGLKVRQSLWFHLSCLTFGQHTVQEFLVSFGVWIRTPAPYRPPNAPILSTLPEHTVIC

SEQ ID NO: 10869 - protein, 1301 aa, Artificial Sequence
  SARS-CoV-2/Wuhan/HBCDC-HB-02/2020__EPI_ISL_412978 spike protein (1-1147)(K986P_V987P_P1069F) WhcAg construct
MFVFLVLLPLVSSQCVNLTTRTQLPPAYTNSFTRGVYYPDKVFRSSVLHSTQDLFLPFFSNVTWFHAIHVSGTNGTKRFDNPVLPFNDGVYFASTEKSNIIRGWIFGTTLDSKTQSLLIVNNATNVVIKVCEFQFCNDPFLGVYYHKNNKSWMESEFRVYSSANNCTFEYVSQPFLMDLEGKQGNFKNLREFVFKNIDGYFKIYSKHTPINLVRDLPQGFSALEPLVDLPIGINITRFQTLLALHRSYLTPGDSSSGWTAGAAAYYVGYLQPRTFLLKYNENGTITDAVDCALDPLSETKCTLKSFTVEKGIYQTSNFRVQPTESIVRFPNITNLCPFGEVFNATRFASVYAWNRKRISNCVADYSVLYNSASFSTFKCYGVSPTKLNDLCFTNVYADSFVIRGDEVRQIAPGQTGKIADYNYKLPDDFTGCVIAWNSNNLDSKVGGNYNYLYRLFRKSNLKPFERDISTEIYQAGSTPCNGVEGFNCYFPLQSYGFQPTNGVGYQPYRVVVLSFELLHAPATVCGPKKSTNLVKNKCVNFNFNGLTGTGVLTESNKKFLPFQQFGRDIADTTDAVRDPQTLEILDITPCSFGGVSVITPGTNTSNQVAVLYQDVNCTEVPVAIHADQLTPTWRVYSTGSNVFQTRAGCLIGAEHVNNSYECDIPIGAGICASYQTQTNSPRRARSVASQSIIAYTMSLGAENSVAYSNNSIAIPTNFTISVTTEILPVSMTKTSVDCTMYICGDSTECSNFLLQYGSFCTQLNRALTGIAVEQDKNTQEVFAQVKQIYKTPPIKDFGGFNFSQILPDPSKPSKRSFIEDLLFNKVTLADAGFIKQYGDCLGDIAARDLICAQKFNGLTVLPPLLTDEMIAQYTSALLAGTITSGWTFGAGAALQIPFAMQMAYRFNGIGVTQNVLYENQKLIANQFNSAIGKIQDSLSSTASALGKLQDVVNQNAQALNTLVKQLSSNFGAISSVLNDILSRLDPPEAEVQIDRLITGRLQSLQTYVTQQLIRAAEIRASANLAATKMSECVLGQSKRVDFCGKGYHLMSFPQSAPHGVVFLHVTYVFAQEKNFTTAPAICHDGKAHFPREGVFVSNGTHWFVTQRNFYEPQIITTDNTFVSGNCDVVIGIVNNTVYDPLQPELDSGGGGSDIDPYKEFGSSYQLLNFLPLDFFPDLNALVDTATALYEEELTGREHCSPHHTAIRQALVCWDELTKLIAWMSSNITSEQVRTIIVNHVNDTWGLKVRQSLWFHLSCLTFGQHTVQEFLVSFGVWIRTPAPYRPPNAPILSTLPEHTVIC

SEQ ID NO: 10870 - protein, 1301 aa, Artificial Sequence
  SARS-CoV-2/Australia/QLD02/2020__EPI_ISL_407896 spike protein (1-1147)(K986P_V987P_P1069F) WhcAg construct
MFVFLVLLPLVSSQCVNLTTRTQLPPAYTNSFTRGVYYPDKVFRSSVLHSTQDLFLPFFSNVTWFHAIHVSGTNGTKRFDNPVLPFNDGVYFASTEKSNIIRGWIFGTTLDSKTQSLLIVNNATNVVIKVCEFQFCNDPFLGVYYHKNNKSWMESEFRVYSSANNCTFEYVSQPFLMDLEGKQGNFKNLREFVFKNIDGYFKIYSKHTPINLVRDLPQGFSALEPLVDLPIGINITRFQTLLALHRSYLTPGDSSSGWTAGAAAYYVGYLQPRTFLLKYNENGTITDAVDCALDPLSETKCTLKSFTVEKGIYQTSNFRVQPTESIVRFPNITNLCPFGEVFNATRFASVYAWNRKRISNCVADYSVLYNSASFSTFKCYGVSPTKLNDLCFTNVYADSFVIRGDEVRQIAPGQTGKIADYNYKLPDDFTGCVIAWNSNNLDSKVGGNYNYLYRLFRKSNLKPFERDISTEIYQAGSTPCNGVEGFNCYFPLQSYGFQPTNGVGYQPYRVVVLSFELLHAPATVCGPKKSTNLVKNKCVNFNFNGLTGTGVLTESNKKFLPFQQFGRDIADTTDAVRDPQTLEILDITPCSFGGVSVITPGTNTSNQVAVLYQDVNCTEVPVAIHADQLTPTWRVYSTGSNVFQTRAGCLIGAEHVNNSYECDIPIGAGICASYQTQTNSPRRARSVASQSIIAYTMSLGAENSVAYSNNSIAIPTNFTISVTTEILPVSMTKTSVDCTMYICGDSTECSNLLLQYGSFCTQLNRALTGIAVEQDKNTQEVFAQVKQIYKTPPIKDFGGFNFSQILPDPSKPSKRSFIEDLLFNKVTLADAGFIKQYGDCLGDIAARDLICAQKFNGLTVLPPLLTDEMIAQYTSALLAGTITSGWTFGAGAALQIPFAMQMAYRFNGIGVTQNVLYENQKLIANQFNSAIGKIQDSLSSTASALGKLQDVVNQNAQALNTLVKQLSSNFGAISSVLNDILSRLDPPEAEVQIDRLITGRLQSLQTYVTQQLIRAAEIRASANLAATKMSECVLGQSKRVDFCGKGYHLMSFPQSAPHGVVFLHVTYVFAQEKNFTTAPAICHDGKAHFPREGVFVSNGTHWFVTQRNFYEPQIITTDNTFVSGNCDVVIGIVNNTVYDPLQLELDSGGGGSDIDPYKEFGSSYQLLNFLPLDFFPDLNALVDTATALYEEELTGREHCSPHHTAIRQALVCWDELTKLIAWMSSNITSEQVRTIIVNHVNDTWGLKVRQSLWFHLSCLTFGQHTVQEFLVSFGVWIRTPAPYRPPNAPILSTLPEHTVIC

SEQ ID NO: 10871 - protein, 1301 aa, Artificial Sequence
  SARS-CoV-2/India/1-31/2020__EPI_ISL_413523 spike protein (1-1147)(K986P_V987P_P1069F) WhcAg construct
MFVFLVLLPLVSSQCVNLTTRTQLPPAYTNSFTRGVYYPDKVFRSSVLHSTQDLFLPFFSNVTWFHAIHVSGTNGTKRFDNPVLPFNDGVYFASTEKSNIIRGWIFGTTLDSKTQSLLIVNNATNVVIKVCEFQFCNDPFLGVYYHKNNKSWMESEFRVYSSANNCTFEYVSQPFLMDLEGKQGNFKNLREFVFKNIDGYFKIYSKHTPINLVRDLPQGFSALEPLVDLPIGINITRFQTLLALHRSYLTPGDSSSGWTAGAAAYYVGYLQPRTFLLKYNENGTITDAVDCALDPLSETKCTLKSFTVEKGIYQTSNFRVQPTESIVRFPNITNLCPFGEVFNATRFASVYAWNRKRISNCVADYSVLYNSASFSTFKCYGVSPTKLNDLCFTNVYADSFVIRGDEVRQIAPGQTGKIADYNYKLPDDFTGCVIAWNSNNLDSKVGGNYNYLYRLFRKSNLKPFERDISTEIYQAGSTPCNGVEGFNCYFPLQSYGFQPTNGVGYQPYRVVVLSFELLHAPATVCGPKKSTNLVKNKCVNFNFNGLTGTGVLTESNKKFLPFQQFGRDIADTTDAVRDPQTLEILDITPCSFGGVSVITPGTNTSNQVAVLYQDVNCTEVPVAIHADQLTPTWRVYSTGSNVFQTRAGCLIGAEHVNNSYECDIPIGAGICASYQTQTNSPRRARSVASQSIIAYTMSLGAENSVAYSNNSIAIPTNFTISVTTEILPVSMTKTSVDCTMYICGDSTECSNLLLQYGSFCTQLNRALTGIAVEQDKNTQEVFAQVKQIYKTPPIKDFGGFNFSQILPDPSKPSKRSFIEDLLFNKVTLADAGFIKQYGDCLGDIAARDLICAQKFNGLTVLPPLLTDEMIAQYTSALLAGTITSGWTFGAGAALQIPFAMQMAYRFNGIGVTQNVLYENQKLIANQFNSVIGKIQDSLSSTASALGKLQDVVNQNAQALNTLVKQLSSNFGAISSVLNDILSRLDPPEAEVQIDRLITGRLQSLQTYVTQQLIRAAEIRASANLAATKMSECVLGQSKRVDFCGKGYHLMSFPQSAPHGVVFLHVTYVFAQEKNFTTAPAICHDGKAHFPREGVFVSNGTHWFVTQRNFYEPQIITTDNTFVSGNCDVVIGIVNNTVYDPLQPELDSGGGGSDIDPYKEFGSSYQLLNFLPLDFFPDLNALVDTATALYEEELTGREHCSPHHTAIRQALVCWDELTKLIAWMSSNITSEQVRTIIVNHVNDTWGLKVRQSLWFHLSCLTFGQHTVQEFLVSFGVWIRTPAPYRPPNAPILSTLPEHTVIC

SEQ ID NO: 10872 - protein, 1301 aa, Artificial Sequence
  SARS-CoV-2/Guangdong/GD2020087-P0008/2020__EPI_ISL_413863 spike protein (1-1147)(K986P_V987P_P1069F) WhcAg construct
MFVFLVLLPLVSSQCVNLTTRTQLPPAYTNSFTRGVYYPDKVFRSSVLHSTQDLFLPFFSNVTWFHAIHVSGTNGTKRFDNPVLPFNDGVYFASTEKSNIIRGWIFGTTLDSKTQSLLIVNNATNVVIKVCEFQFCNDPFLGVYYHKNNKSWMESEFRVYSSANNCTFEYVSQPFLMDLEGKQGNFKNLREFVFKNIDGYFKIYSKHTPINLVRDLPQGFSALEPLVDLPIGINITRFQTLLALHRSYLTPGDSSSGWTAGAAAYYVGYLQPRTFLLKYNENGTITDAVDCALDPLSETKCTLKSFTVEKGIYQTSNFRVQPTESIVRFPNITNLCPFGEVFNATRFASVYAWNRKRISNCVADYSVLYNSASFSTFKCYGVSPTKLNDLCFTNVYADSFVIRGDEVREIAPGQTGKIADYNYKLPDDFTGCVIAWNSNNLDSKVGGNYNYLYRLFRKSNLKPFERDISTEIYQAGSTPCNGVEGFNCYFPLQSYGFQPTNGVGYQPYRVVVLSFELLHAPATVCGPKKSTNLVKNKCVNFNFNGLTGTGVLTESNKKFLPFQQFGRDIADTTDAVRDPQTLEILDITPCSFGGVSVITPGTNTSNQVAVLYQDVNCTEVPVAIHADQLTPTWRVYSTGSNVFQTRAGCLIGAEHVNNSYECDIPIGAGICASYQTQTNSPRRARSVASQSIIAYTMSLGAENSVAYSNNSIAIPTNFTISVTTEILPVSMTKTSVDCTMYICGDSTECSNLLLQYGSFCTQLNRALTGIAVEQDKNTQEVFAQVKQIYKTPPIKDFGGFNFSQILPDPSKPSKRSFIEDLLFNKVTLADAGFIKQYGDCLGDIAARDLICAQKFNGLTVLPPLLTDEMIAQYTSALLAGTITSGWTFGAGAALQIPFAMQMAYRFNGIGVTQNVLYENQKLIANQFNSAIGKIQDSLSSTASALGKLQDVVNQNAQALNTLVKQLSSNFGAISSVLNDILSRLDPPEAEVQIDRLITGRLQSLQTYVTQQLIRAAEIRASANLAATKMSECVLGQSKRVDFCGKGYHLMSFPQSAPHGVVFLHVTYVFAQEKNFTTAPAICHDGKAHFPREGVFVSNGTHWFVTQRNFYEPQIITTDNTFVSGNCDVVIGIVNNTVYDPLQPELDSGGGGSDIDPYKEFGSSYQLLNFLPLDFFPDLNALVDTATALYEEELTGREHCSPHHTAIRQALVCWDELTKLIAWMSSNITSEQVRTIIVNHVNDTWGLKVRQSLWFHLSCLTFGQHTVQEFLVSFGVWIRTPAPYRPPNAPILSTLPEHTVIC

SEQ ID NO: 10873 - protein, 1301 aa, Artificial Sequence
  SARS-CoV-2/Sweden/01/2020__EPI_ISL_411951 spike protein (1-1147)(K986P_V987P_P1069F) WhcAg construct
MFVFLVLLPLVSSQCVNLTTRTQLPPAYTNSFTRGVYYPDKVFRSSVLHSTQDLFLPFFSNVTWFHAIHVSGTNGTKRFDNPVLPFNDGVYFASTEKSNIIRGWIFGTTLDSKTQSLLIVNNATNVVIKVCEFQFCNDPFLGVYYHKNNKSWMESEFRVYSSANNCTFEYVSQPFLMDLEGKQGNFKNLREFVFKNIDGYFKIYSKHTPINLVRDLPQGFSALEPLVDLPIGINITRFQTLLALHRSYLTPGDSSSGWTAGAAAYYVGYLQPRTFLLKYNENGTITDAVDCALDPLSETKCTLKSFTVEKGIYQTSNFRVQPTESIVRFPNITNLCPFGEVFNATRFASVYAWNRKRISNCVADYSVLYNSASFSTFKCYGVSPTKLNDLCFTNVYADSFVIRGDEVRQIAPGQTGKIADYNYKLPDDFTGCVIAWNSNNLDSKVGGNYNYLYRLFRKSNLKPFERDISTEIYQAGSTPCNGVEGFNCYFPLQSYGFQPTNGVGYQPYRVVVLSFELLHAPATVCGPKKSTNLVKNKCVNFNFNGLTGTGVLTESNKKFLPFQQFGRDIADTTDAVRDPQTLEILDITPCSFGGVSVITPGTNTSNQVAVLYQDVNCTEVPVAIHADQLTPTWRVYSTGSNVFQTRAGCLIGAEHVNNSYECDIPIGAGICASYQTQTNSPRRARSVASQSIIAYTMSLGAENSVAYSNNSIAIPTNFTISVTTEILPVSMTKTSVDCTMYICGDSTECSNLLLQYGSFCTQLNRALTGIAVEQDKNTQEVFAQVKQIYKTPPIKDCGGFNFSQILPDPSKPSKRSFIEDLLFNKVTLADAGFIKQYGDCLGDIAARDLICAQKFNGLTVLPPLLTDEMIAQYTSALLAGTITSGWTFGAGAALQIPFAMQMAYRFNGIGVTQNVLYENQKLIANQFNSAIGKIQDSLSSTASALGKLQDVVNQNAQALNTLVKQLSSNFGAISSVLNDILSRLDPPEAEVQIDRLITGRLQSLQTYVTQQLIRAAEIRASANLAATKMSECVLGQSKRVDFCGKGYHLMSFPQSAPHGVVFLHVTYVFAQEKNFTTAPAICHDGKAHFPREGVFVSNGTHWFVTQRNFYEPQIITTDNTFVSGNCDVVIGIVNNTVYDPLQPELDSGGGGSDIDPYKEFGSSYQLLNFLPLDFFPDLNALVDTATALYEEELTGREHCSPHHTAIRQALVCWDELTKLIAWMSSNITSEQVRTIIVNHVNDTWGLKVRQSLWFHLSCLTFGQHTVQEFLVSFGVWIRTPAPYRPPNAPILSTLPEHTVIC

SEQ ID NO: 10874 - protein, 1301 aa, Artificial Sequence
  SARS-CoV-2/Tianmen/HBCDC-HB-07/2020__EPI_ISL_412983 spike protein (1-1147)(K986P_V987P_P1069F) WhcAg construct
MFVFLVLLPLVSSQCVNLTTRTQLPPAYTNSFTRGVYYPDKVFRSSVLHSTQDLFLPFFSNVTWFHAIHVSGTNGTKRFDNPVLPFNDGVYFASTEKSNIIRGWIFGTTLDSKTQSLLIVNNATNVVIKVCEFQFCNDPFLGVYYHKNNKSWMESEFRVYSSANNCTFEYVSQPFLMDLEGKQGNFKNLREFVFKNIDGYFKIYSKHTPINLVRDLPQGFSALEPLVDLPIGINITRFQTLLALHRSYLTPGDSSSGWTAGAAAYYVGYLQPRTFLLKYNENGTITDAVDCALDPLSETKCTLKSFTVEKGIYQTSNFRVQPTESIVRFPNITNLCPFGEVFNATRFASVYAWNRKRISNCVADYSVLYNSASFSTFKCYGVSPTKLNDLCFTNVYADSFVIRGDEVRQIAPGQTGKIADYNYKLPDDFTGCVIAWNSNNLDSKVGGNYNYLYRLFRKSNLKPFERDISTEIYQAGSTPCNGVEGFNCYFPLQSYGFQPTNGVGYQPYRVVVLSFELLHAPATVCGPKKSTNLVKNKCVNFNFNGLTGTGVLTESNKKFLPFQQFGRDIADTTDAVRDPQTLEILDITPCSFGGVSVITPGTNTSNQVAVLYQDLNCTEVPVAIHADQLTPTWRVYSTGSNVFQTRAGCLIGAEHVNNSYECDIPIGAGICASYQTQTNSPRRARSVASQSIIAYTMSLGAENSVAYSNNSIAIPTNFTISVTTEILPVSMTKTSVDCTMYICGDSTECSNLLLQYGSFCTQLNRALTGIAVEQDKNTQEVFAQVKQIYKTPPIKDFGGFNFSQILPDPSKPSKRSFIEDLLFNKVTLADAGFIKQYGDCLGDIAARDLICAQKFNGLTVLPPLLTDEMIAQYTSALLAGTITSGWTFGAGAALQIPFAMQMAYRFNGIGVTQNVLYENQKLIANQFNSAIGKIQDSLSSTASALGKLQDVVNQNAQALNTLVKQLSSNFGAISSVLNDILSRLDPPEAEVQIDRLITGRLQSLQTYVTQQLIRAAEIRASANLAATKMSECVLGQSKRVDFCGKGYHLMSFPQSAPHGVVFLHVTYVFAQEKNFTTAPAICHDGKAHFPREGVFVSNGTHWFVTQRNFYEPQIITTDNTFVSGNCDVVIGIVNNTVYDPLQPELDSGGGGSDIDPYKEFGSSYQLLNFLPLDFFPDLNALVDTATALYEEELTGREHCSPHHTAIRQALVCWDELTKLIAWMSSNITSEQVRTIIVNHVNDTWGLKVRQSLWFHLSCLTFGQHTVQEFLVSFGVWIRTPAPYRPPNAPILSTLPEHTVIC

SEQ ID NO: 10875 - protein, 1301 aa, Artificial Sequence
  SARS-CoV-2/Hong Kong/case42_VM20002493/2020__EPI_ISL_414527 spike protein (1-1147)(K986P_V987P_P1069F) WhcAg construct
MFVFLVLLPLVSSQCVNLTTRTQLPPAYTNSFTRGVYYPDKVFRSSVLHSTQDLFLPFFSNVTWFHAIHVSGTNGTKRFDNPVLPFNDGVYFASTEKSNIIRGWIFGTTLDSKTQSLLIVNNATNVVIKVCEFQFCNDPFLGVYYHKNNKSWMESEFRVYSSANNCTFEYVSQPFLMDLEGKQGNFKNLREFVFKNIDGYFKIYSKHTPINLVRDLPQGFSALEPLVDLPIGINITRFQTLLALHRSYLTPGDSSSGWTAGAAAYYVGYLQPRTFLLKYNENGTITDAVDCALDPLSETKCTLKSFTVEKGIYQTSNFRVQPTESIVRFPNITNLCPFGEVFNATRFASVYAWNRKRISNCVADYSVLYNSASFSTFKCYGVSPTKLNDLCFTNVYADSFVIRGDEVRQIAPGQTGKIADYNYKLPDDFTGCVIAWNSNNLDSKVGGNYNYLYRLFRKSNLKPFERDISTEIYQAGSTPCNGVEGFNCYFPLQSYGFQPTNGVGYQPYRVVVLSFELLHAPATVCGPKKSTNLVKNKCVNFNFNGLTGTGVLTESNKKFLPFQQFGRDIADTTDAVRDPQTLEILDITPCSFGGVSVITPGTNTSNQVAVLYQDVNCTEVPVAIHADQLTPTWRVYSTGSNVFQTRAGCLIGAEHVNNSYECDIPIGAGICASYQTQTNSPRRARSVASQSIIAYTMSLGAENSVAYSNNSIAIPTNFAISVTTEILPVSMTKTSVDCTMYICGDSTECSNLLLQYGSFCTQLNRALTGIAVEQDKNTQEVFAQVKQIYKTPPIKDFGGFNFSQILPDPSKPSKRSFIEDLLFNKVTLADAGFIKQYGDCLGDIAARDLICAQKFNGLTVLPPLLTDEMIAQYTSALLAGTITSGWTFGAGAALQIPFAMQMAYRFNGIGVTQNVLYENQKLIANQFNSAIGKIQDSLSSTASALGKLQDVVNQNAQALNTLVKQLSSNFGAISSVLNDILSRLDPPEAEVQIDRLITGRLQSLQTYVTQQLIRAAEIRASANLAATKMSECVLGQSKRVDFCGKGYHLMSFPQSAPHGVVFLHVTYVFAQEKNFTTAPAICHDGKAHFPREGVFVSNGTHWFVTQRNFYEPQIITTDNTFVSGNCDVVIGIVNNTVYDPLQPELDSGGGGSDIDPYKEFGSSYQLLNFLPLDFFPDLNALVDTATALYEEELTGREHCSPHHTAIRQALVCWDELTKLIAWMSSNITSEQVRTIIVNHVNDTWGLKVRQSLWFHLSCLTFGQHTVQEFLVSFGVWIRTPAPYRPPNAPILSTLPEHTVIC

SEQ ID NO: 10876 - protein, 1301 aa, Artificial Sequence
  SARS-CoV-2/USA/CruiseA-23/2020__EPI_ISL_414482 spike protein (1-1147)(K986P_V987P_P1069F) WhcAg construct
MFVFLVLLPLVSSQCVNLTTRTQLPPAYTNSFTRGVYYPDKVFRSSVLHSTQDLFLPFFSNVTWFHAIHVSGTNGTKRFDNPVLPFNDGVYFASTEKSNIIRGWIFGTTLDSKTQSLLIVNNATNVVIKVCEFQFCNDPFLGVYYHKNNKSWMESEFRVYSSANNCTFEYVSQPFLMDLEVKQGNFKNLREFVFKNIDGYFKIYSKHTPINLVRDLPQGFSALEPLVDLPIGINITRFQTLLALHRSYLTPGDSSSGWTAGAAAYYVGYLQPRTFLLKYNENGTITDAVDCALDPLSETKCTLKSFTVEKGIYQTSNFRVQPTESIVRFPNITNLCPFGEVFNATRFASVYAWNRKRISNCVADYSVLYNSASFSTFKCYGVSPTKLNDLCFTNVYADSFVIRGDEVRQIAPGQTGKIADYNYKLPDDFTGCVIAWNSNNLDSKVGGNYNYLYRLFRKSNLKPFERDISTEIYQAGSTPCNGVEGFNCYFPLQSYGFQPTNGVGYQPYRVVVLSFELLHAPATVCGPKKSTNLVKNKCVNFNFNGLTGTGVLTESNKKFLPFQQFGRDIADTTDAVRDPQTLEILDITPCSFGGVSVITPGTNTSNQVAVLYQDVNCTEVPVAIHADQLTPTWRVYSTGSNVFQTRAGCLIGAEHVNNSYECDIPIGAGICASYQTQTNSPRRARSVASQSIIAYTMSLGAENSVAYSNNSIAIPTNFTISVTTEILPVSMTKTSVDCTMYICGDSTECSNLLLQYGSFCTQLNRALTGIAVEQDKNTQEVFAQVKQIYKTPPIKDFGGFNFSQILPDPSKPSKRSFIEDLLFNKVTLADAGFIKQYGDCLGDIAARDLICAQKFNGLTVLPPLLTDEMIAQYTSALLAGTITSGWTFGAGAALQIPFAMQMAYRFNGIGVTQNVLYENQKLIANQFNSAIGKIQDSLSSTASALGKLQDVVNQNAQALNTLVKQLSSNFGAISSVLNDILSRLDPPEAEVQIDRLITGRLQSLQTYVTQQLIRAAEIRASANLAATKMSECVLGQSKRVDFCGKGYHLMSFPQSAPHGVVFLHVTYVFAQEKNFTTAPAICHDGKAHFPREGVFVSNGTHWFVTQRNFYEPQIITTDNTFVSGNCDVVIGIVNNTVYDPLQPELDSGGGGSDIDPYKEFGSSYQLLNFLPLDFFPDLNALVDTATALYEEELTGREHCSPHHTAIRQALVCWDELTKLIAWMSSNITSEQVRTIIVNHVNDTWGLKVRQSLWFHLSCLTFGQHTVQEFLVSFGVWIRTPAPYRPPNAPILSTLPEHTVIC

SEQ ID NO: 10877 - protein, 1301 aa, Artificial Sequence
  SARS-CoV-2/Hong Kong/case85_VM20002868/2020__EPI_ISL_414519 spike protein (1-1147)(K986P_V987P_P1069F) WhcAg construct
MFVFLVLVPLVSSQCVNLTTRTQLPPAYTNSFTRGVYYPDKVFRSSVLHSTQDLFLPFFSNVTWFHAIHVSGTNGTKRFDNPVLPFNDGVYFASTEKSNIIRGWIFGTTLDSKTQSLLIVNNATNVVIKVCEFQFCNDPFLGVYYHKNNKSWMESEFRVYSSANNCTFEYVSQPFLMDLEGKQGNFKNLREFVFKNIDGYFKIYSKHTPINLVRDLPQGFSALEPLVDLPIGINITRFQTLLALHRSYLTPGDSSSGWTAGAAAYYVGYLQPRTFLLKYNENGTITDAVDCALDPLSETKCTLKSFTVEKGIYQTSNFRVQPTESIVRFPNITNLCPFGEVFNATRFASVYAWNRKRISNCVADYSVLYNSASFSTFKCYGVSPTKLNDLCFTNVYADSFVIRGDEVRQIAPGQTGKIADYNYKLPDDFTGCVIAWNSNNLDSKVGGNYNYLYRLFRKSNLKPFERDISTEIYQAGSTPCNGVEGFNCYFPLQSYGFQPTNGVGYQPYRVVVLSFELLHAPATVCGPKKSTNLVKNKCVNFNFNGLTGTGVLTESNKKFLPFQQFGRDIADTTDAVRDPQTLEILDITPCSFGGVSVITPGTNTSNQVAVLYQDVNCTEVPVAIHADQLTPTWRVYSTGSNVFQTRAGCLIGAEHVNNSYECDIPIGAGICASYQTQTNSPRRARSVASQSIIAYTMSLGAENSVAYSNNSIAIPTNFTISVTTEILPVSMTKTSVDCTMYICGDSTECSNLLLQYGSFCTQLNRALTGIAVEQDKNTQEVFAQVKQIYKTPPIKDFGGFNFSQILPDPSKPSKRSFIEDLLFNKVTLADAGFIKQYGDCLGDIAARDLICAQKFNGLTVLPPLLTDEMIAQYTSALLAGTITSGWTFGAGAALQIPFAMQMAYRFNGIGVTQNVLYENQKLIANQFNSAIGKIQDSLSSTASALGKLQDVVNQNAQALNTLVKQLSSNFGAISSVLNDILSRLDPPEAEVQIDRLITGRLQSLQTYVTQQLIRAAEIRASANLAATKMSECVLGQSKRVDFCGKGYHLMSFPQSAPHGVVFLHVTYVFAQEKNFTTAPAICHDGKAHFPREGVFVSNGTHWFVTQRNFYEPQIITTDNTFVSGNCDVVIGIVNNTVYDPLQPELDSGGGGSDIDPYKEFGSSYQLLNFLPLDFFPDLNALVDTATALYEEELTGREHCSPHHTAIRQALVCWDELTKLIAWMSSNITSEQVRTIIVNHVNDTWGLKVRQSLWFHLSCLTFGQHTVQEFLVSFGVWIRTPAPYRPPNAPILSTLPEHTVIC

SEQ ID NO: 10878 - protein, 1301 aa, Artificial Sequence; identical to SEQ ID NO: 10868
  SARS-CoV-2/England/200990660/2020__EPI_ISL_414523 spike protein (1-1147)(K986P_V987P_P1069F) WhcAg construct

SEQ ID NO: 10879 - protein, 1301 aa, Artificial Sequence
  SARS-CoV-2/Australia/NSW09/2020__EPI_ISL_413595 spike protein (1-1147)(K986P_V987P_P1069F) WhcAg construct
MFVFLVLLPLVSSQCVNLTTRTQLPPAYTNSFTRGVYYPDKVFRSSVLHSTQDLFLPFFSNVTWFHAIHVSGTNGTKRFDNPVLPFNDGVYFASTEKSNIIRGWIFGTTLDSKTQSLLIVNNATNVVIKVCEFQFCNDPFLGVYYHKNNKSWMESEFRVYSSANNCTFEYVSQPFLMDLEGKQGNFKNLREFVFKNIDGYFKIYSKHTPINLVRDLPQGFSALEPLVDLPIGINITRFQTLLALHRSYLTPGDSSSGWTAGAAAYYVGYLQPRTFLLKYNENGTITDAVDCALDPLSETKCTLKSFTVEKGIYQTSNFRVQPTESIVRFPNITNLCPFGEVFNATRFASVYAWNRKRISNCVADYSVLYNSASFSTFKCYGVSPTKLNDLCFTNVYADSFVIRGDEVRQIAPGQTGKIADYNYKLPDDFTGCVIAWNSNNLDSKVGGNYNYLYRLFRKSNLKPFERDISTEIYQAGSTPCNGVEGFNCYFPLQSYGFQPTNGVGYQPYRVVVLSFELLHAPATVCGPKKSTNLVKNKCVNFNFNGLTGTGVLTESNKKFLPFQQFGRDIADTTDAVRDPQTLEILDITPCSFGGVSVITPGTNTSNQVAVLYQDVNCTEVPVAIHADQLTPTWRVYSTGSNVFQTRAGCLIGAEHVNNSYECDIPIGAGICASYQTQTNSPRRARSVASQSIIAYTMSLGAENSVAYSNNSIAIPTNFTISVTTEILPVSMTKTSVDCTMYICGDSTECSNLLLQYGSFCTQLNRALTGIAVEQDKNTQEVFAQVKQIYKTPPIKDFGGFNFSQILPDPSKPSKRSFIEDLLFNKVTLADAGFIKQYGDCLGDIAARDLICAQKFNGLTVLPPLLTDEMIAQYTSALLAGTITSGWTFGAGAALQIPFAMQMAYRFNGIGVTQNVLYENQKLIANQFNSAIGKIQDSLSFTASALGKLQDVVNQNAQALNTLVKQLSSNFGAISSVLNDILSRLDPPEAEVQIDRLITGRLQSLQTYVTQQLIRAAEIRASANLAATKMSECVLGQSKRVDFCGKGYHLMSFPQSAPHGVVFLHVTYVFAQEKNFTTAPAICHDGKAHFPREGVFVSNGTHWFVTQRNFYEPQIITTDNTFVSGNCDVVIGIVNNTVYDPLQPELDSGGGGSDIDPYKEFGSSYQLLNFLPLDFFPDLNALVDTATALYEEELTGREHCSPHHTAIRQALVCWDELTKLIAWMSSNITSEQVRTIIVNHVNDTWGLKVRQSLWFHLSCLTFGQHTVQEFLVSFGVWIRTPAPYRPPNAPILSTLPEHTVIC

SEQ ID NO: 10880 - protein, 1301 aa, Artificial Sequence; identical to SEQ ID NO: 10860
  SARS-CoV-2/Australia/NSW10/2020__EPI_ISL_413596 spike protein (1-1147)(K986P_V987P_P1069F) WhcAg construct

SEQ ID NO: 10881 - protein, 1301 aa, Artificial Sequence
  SARS-CoV-2/Switzerland/1000477797/2020__EPI_ISL_413023 spike protein (1-1147)(K986P_V987P_P1069F) WhcAg construct
MFVFLVLLPLVSSQCVNLTTRTQLPPAYTNSFTRGVYYPDKVFRSSVLHSTQDLFLPFFSNVTWFHAIHVSGTNGTKRFDNPVLPFNDGVYFASTEKSNIIRGWIFGTTLDSKTQSLLIVNNATNVVIKVCEFQFCNDPFLGVYYHKNNKSWMESEFRVYSSANNCTFEYVSQPFLMDLEGKQGNFKNLREFVFKNIDGYFNIYSKHTPINLVRDLPQGFSALEPLVDLPIGINITRFQTLLALHRSYLTPGDSSSGWTAGAAAYYVGYLQPRTFLLKYNENGTITDAVDCALDPLSETKCTLKSFTVEKGIYQTSNFRVQPTESIVRFPNITNLCPFGEVFNATRFASVYAWNRKRISNCVADYSVLYNSASFSTFKCYGVSPTKLNDLCFTNVYADSFVIRGDEVRQIAPGQTGKIADYNYKLPDDFTGCVIAWNSNNLDSKVGGNYNYLYRLFRKSNLKPFERDISTEIYQAGSTPCNGVEGFNCYFPLQSYGFQPTNGVGYQPYRVVVLSFELLHAPATVCGPKKSTNLVKNKCVNFNFNGLTGTGVLTESNKKFLPFQQFGRDIADTTDAVRDPQTLEILDITPCSFGGVSVITPGTNTSNQVAVLYQGVNCTEVPVAIHADQLTPTWRVYSTGSNVFQTRAGCLIGAEHVNNSYECDIPIGAGICASYQTQTNSPRRARSVASQSIIAYTMSLGAENSVAYSNNSIAIPTNFTISVTTEILPVSMTKTSVDCTMYICGDSTECSNLLLQYGSFCTQLNRALTGIAVEQDKNTQEVFAQVKQIYKTPPIKDFGGFNFSQILPDPSKPSKRSFIEDLLFNKVTLADAGFIKQYGDCLGDIAARDLICAQKFNGLTVLPPLLTDEMIAQYTSALLAGTITSGWTFGAGAALQIPFAMQMAYRFNGIGVTQNVLYENQKLIANQFNSAIGKIQDSLSSTASALGKLQDVVNQNAQALNTLVKQLSSNFGAISSVLNDILSRLDPPEAEVQIDRLITGRLQSLQTYVTQQLIRAAEIRASANLAATKMSECVLGQSKRVDFCGKGYHLMSFPQSAPHGVVFLHVTYVFAQEKNFTTAPAICHDGKAHFPREGVFVSNGTHWFVTQRNFYEPQIITTDNTFVSGNCDVVIGIVNNTVYDPLQPELDSGGGGSDIDPYKEFGSSYQLLNFLPLDFFPDLNALVDTATALYEEELTGREHCSPHHTAIRQALVCWDELTKLIAWMSSNITSEQVRTIIVNHVNDTWGLKVRQSLWFHLSCLTFGQHTVQEFLVSFGVWIRTPAPYRPPNAPILSTLPEHTVIC

SEQ ID NO: 10882 - protein, 1301 aa, Artificial Sequence
  SARS-CoV-2/Belgium/BA-02291/2020__EPI_ISL_415159 spike protein (1-1147)(K986P_V987P_P1069F) WhcAg construct
MFVFLVLLPLVSSQCVNLTTRTQLPPAYTNSFTRGVYYPDKVFRSSVLHSTQDLFLPFFSNVTWFHAIHVSGTNGTKRFDNPVLPFNDGVYFASTEKSNIIRGWIFGTTLDSKTQSLLIVNNATNVVIKVCEFQFCNDPFLGVYYHKNNKSWMESEFRVYSSANNCTFEYVSQPFLMDLEGKQGNFKNLREFVFKNIDGYFKIYSKHTPINLVRDLPQGFSALEPLVDLPIGINITRFQTLLALHRSYLTPGDSSSGWTAGAAAYYVGYLQPRTFLLKYNENGTITDAVDCALDPLSETKCTLKSFTVEKGIYQTSNFRVQPTESIVRFPNITNLCPFGEVFNATRFASVYAWNRKRISNCVADYSVLYNSASFSTFKCYGVSPTKLNDLCFTNVYADSFVIRGDEVRQIAPGQTGKIADYNYKLPDDFTGCVIAWNSNNLDSKVGGNYNYLYRLFRRSNLKPFERDISTEIYQAGSTPCNGVEGFNCYFPLQSYGFQPTNGVGYQPYRVVVLSFELLPAPATVCGPKKSTNLVKNKCVNFNFNGLTGTGVLTESNKKFLPFQQFGRDIADTTDAVRDPQTLEILDITPCSFGGVSVITPGTNTSNQVAVLYQGVNCTEVPVAIHADQLTPTWRVYSTGSNVFQTRAGCLIGAEHVNNSYECDIPIGAGICASYQTQTNSPRRARSVASQSIIAYTMSLGAENSVAYSNNSIAIPTNFTISVTTEILPVSMTKTSVDCTMYICGDSTECSNLLLQYGSFCTQLNRALTGIAVEQDKNTQEVFAQVKQIYKTPPIKDFGGFNFSQILPDPSKPSKRSFIEDLLFNKVTLADAGFIKQYGDCLGDIAARDLICAQKFNGLTVLPPLLTDEMIAQYTSALLAGTITSGWTFGAGAALQIPFAMQMAYRFNGIGVTQNVLYENQKLIANQFNSAIGKIQDSLSSAAPALGKLQDVVNQNAQALNTLVKQLSSNFGAISSVLNDILSRLDPPEAEVQIDRLITGRLQSLQTYVTQQLIRAAEIRASANLAATKMSECVLGQSKRVDFCGKGYHLMSFPQSAPHGVVFLHVTYVFAQEKNFTTAPAICHDGKAHFPREGVFVSNGTHWFVTQRNFYEPQIITTDNTFVSGNCDVVIGIVNNTVYDPLQPELDSGGGGSDIDPYKEFGSSYQLLNFLPLDFFPDLNALVDTATALYEEELTGREHCSPHHTAIRQALVCWDELTKLIAWMSSNITSEQVRTIIVNHVNDTWGLKVRQSLWFHLSCLTFGQHTVQEFLVSFGVWIRTPAPYRPPNAPILSTLPEHTVIC

SEQ ID NO: 10883 - protein, 1301 aa, Artificial Sequence
  SARS-CoV-2/USA/WA8-UW5/2020__EPI_ISL_413486 spike protein (1-1147)(K986P_V987P_P1069F) WhcAg construct
MFVFLVLLPLVSSQCVNLTTRTQLPPAYTNSFTRGVYYPDKVFRSSVLHSTQDLFLPFFSNVTWFHAIHVSGTNGTKRFDNPVLPFNDGVYFASTEKSNIIRGWIFGTTLDSKTQSLLIVNNATNVVIKVCEFQFCNDPFLGVYYHKNNKSWMESEFRVYSSANNCTFEYVSQPFLMDLEGKQGNFKNLREFVFKNIDGYFKIYSKHTPINLVRDLPQGFSALEPLVDLPIGINITRFQTLLALHRSYLTPGDSSSGWTAGAAAYYVGYLQPRTFLLKYNENGTITDAVDCALDPLSETKCTLKSFTVEKGIYQTSNFRVQPTESIVRFPNITNLCPFGEVFNATRFASVYAWNRKRISNCVADYSVLYNSASFSTFKCYGVSPTKLNDLCFTNVYADSFVIRGDEVRQIAPGQTGKIADYNYKLPDDFTGCVIAWNSNNLDSKVGGNYNYLYRLFRKSNLKPFERDISTEIYQAGSTPCNGVEGFNCYFPLQSYGFQPTNGVGYQPYRVVVLSFELLHAPATVCGPKKSTNLVKNKCVNFNFNGLTGTGVLTESNKKFLPFQQFGRDIADTTDAVRDPQTLEILDITPCSFGGVSVITPGTNTSNQVAVLYQDVNCTEVPVAIHADQLTPTWRVYSTGSNVFQTRAGCLIGAEYVNNSYECDIPIGAGICASYQTQTNSPRRARSVASQSIIAYTMSLGAENSVAYSNNSIAIPTNFTISVTTEILPVSMTKTSVDCTMYICGDSTECSNLLLQYGSFCTQLNRALTGIAVEQDKNTQEVFAQVKQIYKTPPIKDFGGFNFSQILPDPSKPSKRSFIEDLLFNKVTLADAGFIKQYGDCLGDIAARDLICAQKFNGLTVLPPLLTDEMIAQYTSALLAGTITSGWTFGAGAALQIPFAMQMAYRFNGIGVTQNVLYENQKLIANQFNSAIGKIQDSLSSTASALGKLQDVVNQNAQALNTLVKQLSSNFGAISSVLNDILSRLDPPEAEVQIDRLITGRLQSLQTYVTQQLIRAAEIRASANLAATKMSECVLGQSKRVDFCGKGYHLMSFPQSAPHGVVFLHVTYVFAQEKNFTTAPAICHDGKAHFPREGVFVSNGTHWFVTQRNFYEPQIITTDNTFVSGNCDVVIGIVNNTVYDPLQPELDSGGGGSDIDPYKEFGSSYQLLNFLPLDFFPDLNALVDTATALYEEELTGREHCSPHHTAIRQALVCWDELTKLIAWMSSNITSEQVRTIIVNHVNDTWGLKVRQSLWFHLSCLTFGQHTVQEFLVSFGVWIRTPAPYRPPNAPILSTLPEHTVIC

SEQ ID NO: 10884 - protein, 1301 aa, Artificial Sequence
  SARS-CoV-2/England/20102000506/2020__EPI_ISL_415147 spike protein (1-1147)(K986P_V987P_P1069F) WhcAg construct
MFVFLVLLPLVSSQCVNLTTRTQLPPAYTNSFTRGVYYPDKVFRSSVLHSTQDLFLPFFSNVTWFHAIHVSGTNGTKRFDNPVLPFNDGVYFASTEKSNIIRGWIFGTTLDSKTQSLLIVNNATNVVIKVCEFQFCNDPFLGVYYHKNNKSWMESEFRVYSSANNCTFEYVSQPFLMDLEGKQGNFKNLREFVFKNIDGYFKIYSKHTPINLVRDLPQGFSALEPLVDLPIGINITRFQTLLALHRSYLTPGDSSSGWTAGAAAYYVGYLQPRTFLLKYNENGTITDAVDCALDPLSETKCTLKSFTVEKGIYQTSNFRVQPTESIVRFPNITNLCPFGEVFNATRFASVYAWNRKRISNCVADYSVLYNSASFSTFKCYGVSPTKLNDLCFTNVYADSFVIRGDEVRQIAPGQTGKIADYNYKLPDDFTGCVIAWNSNNLDSKVGGNYNYLYRLFRKSNLKPFERDISTEIYQAGSTPCNGVEGFNCYFPLQSYGFQPTNGVGYQPYRVVVLSFELLHAPATVCGPKKSTNLVKNKCVNFNFNGLTGTGVLTESNKKFLPFQQFGRDIADTTDAVRDPQTLEILDITPCSFGGVSVITPGTNTSNQVAVLYQGVNCTEVPVAIHADQLTPTWRVYSTGSNVFQTRAGCLIGAEHVNNSYECDIPIGAGICASYQTQTNSPRRARSVASQSIIAYTMSLGAENSVAYSNNSIAIPTNFTISVTTEILPVSMTKTSVDCTMYICGDSTECSNLLLQYGSFCTQLNRALTGIAVEQDKNTQEVFAQVKQIYKTPPIKDFGGFNFSQILPDPSKPSKRSFIEDLLFNKVTLADAGFIKQYGYCLGDIAARDLICAQKFNGLTVLPPLLTDEMIAQYTSALLAGTITSGWTFGAGAALQIPFAMQMAYRFNGIGVTQNVLYENQKLIANQFNSAIGKIQDSLSSTASALGKLQDVVNQNAQALNTLVKQLSSNFGAISSVLNDILSRLDPPEAEVQIDRLITGRLQSLQTYVTQQLIRAAEIRASANLAATKMSECVLGQSKRVDFCGKGYHLMSFPQSAPHGVVFLHVTYVFAQEKNFTTAPAICHDGKAHFPREGVFVSNGTHWFVTQRNFYEPQIITTDNTFVSGNCDVVIGIVNNTVYDPLQPELDSGGGGSDIDPYKEFGSSYQLLNFLPLDFFPDLNALVDTATALYEEELTGREHCSPHHTAIRQALVCWDELTKLIAWMSSNITSEQVRTIIVNHVNDTWGLKVRQSLWFHLSCLTFGQHTVQEFLVSFGVWIRTPAPYRPPNAPILSTLPEHTVIC

SEQ ID NO: 10885 - protein, 1301 aa, Artificial Sequence
  SARS-CoV-2/Belgium/VAG-03013/2020__EPI_ISL_415155 spike protein (1-1147)(K986P_V987P_P1069F) WhcAg construct
MFVFLVLLPLVSSQCVNLTTRTQLPPAYTNSFTRGVYYPDKVFRSSVLHSTQDLFLPFFSNVTWFHAIHVSGTNGTKRFDNPVLPFNDGVYFASTEKSNIIRGWIFGTTLDSKTQSLLIVNNATNVVIKVCEFQFCNDPFLGVYYHKNNKSWMESEFRVYSSANNCTFEYVSQPFLMDLEGKQGNFKNLREFVFKNIDGYFKIYSKHTPINLVRDLPQGFSALEPLVDLPIGINITRFQTLLALHRSYLTPGDSSSGWTAGAAAYYVGYLQPRTFLLKYNENGTITDAVDCALDPLSETKCTLKSFTVEKGIYQTSNFRVQPTESIVRFPNITNLCPFGEVFNATRFASVYAWNRKRISNCVADYSVLYNSASFSTFKCYGVSPTKLNDLCFTNVYADSFVIRGDEVRQIAPGQTGKIADYNYKLPDDFTGCVIAWNSNNLDSKVGGNYNYLYRLFRKSNLKPFERDISTEIYQAGSTPCNGVEGFNCYFPLQSYGFQPTNGVGYQPYRVVVLSFELLHAPATVCGPKKSTNLVKNKCVNFNFNGLTGTGVLTESNKKFLPFQQFGRDIADTTDAVRDPQTLEILDITPCSFGGVSVITPGTNTSNQVAVLYQGVNCTEVPVAIHADQLTPTWRVYSTGSNVFQTRAGCLIGAEHVNNSYECDIPIGAGICASYQTQTNSPRRARSVASQSIIAYTMSLGAENSVAYSNNSIAIPTNFTISVTTEILPVSMTKTSVDCTMYICGDSTECSNLLLQYGSFCTQLNRALTGIAVEQDKNTQEVFAQVKQIYKTPPIKDFGGFNFSQILPDPSKPSKRSFIEDLLFNKVTLADAGFIKQYGDCLGDIAARDLICAQKFNGLTVLPPLLTDEMIAQYTSALLAGTITSGWTFGAGAALQIPFAMQMAYRFNGIGVTQNVLYENQKLIANQFNSAIGKIQDSLSSTATALGKLQDVVNQNAQALNTLVKQLSSNFGAISSVLNDILSRLDPPEAEVQIDRLITGRLQSLQTYVTQQLIRAAEIRASANLAATKMSECVLGQSKRVDFCGKGYHLMSFPQSAPHGVVFLHVTYVFAQEKNFTTAPAICHDGKAHFPREGVFVSNGTHWFVTQRNFYEPQIITTDNTFVSGNCDVVIGIVNNTVYDPLQPELDSGGGGSDIDPYKEFGSSYQLLNFLPLDFFPDLNALVDTATALYEEELTGREHCSPHHTAIRQALVCWDELTKLIAWMSSNITSEQVRTIIVNHVNDTWGLKVRQSLWFHLSCLTFGQHTVQEFLVSFGVWIRTPAPYRPPNAPILSTLPEHTVIC

SEQ ID NO: 10886 - protein, 1301 aa, Artificial Sequence
  SARS-CoV-2/Belgium/BC-03016/2020__EPI_ISL_415157 spike protein (1-1147)(K986P_V987P_P1069F) WhcAg construct
MFVFLVLLPLVSSQCVNLTTRTQLPPAYTNSFTRGVYYPDKVFRSSVLHSTQDLFLPFFSNVTWFHAIHVSGTNGTKRFDNPVLPFNDGVYFASTEKSNIIRGWIFGTTLDSKTQSLLIVNNATNVVIKVCEFQFCNDPFLGVYYHKNNKSWMESEFRVYSSANNCTFEYVSQPFLMDLEGKQGNFKNLREFVFKNIDGYFKIYSKHTPINLVRDLPQGFSALEPLVDLPIGINITRFQTLLALHRSYLTPGDSSSGWTAGAAAYYVGYLQPRTFLLKYNENGTITDAVDCALDPLSETKCTLKSFTVEKGIYQTSNFRVQPTESIVRFPNITNLCPFGEVFNATRFASVYAWNRKRISNCVADYSVLYNSASFSTFKCYGVSPTKLNDLCFTNVYADSFVIRGDEVRQIAPGQTGKIADYNYKLPDDFTGCVIAWNSNNLDSKVGGNYNYLYRLFRKSNLKPFERDISTEIYQAGSTPCNGVEGFNCYFPLQSYGFQPTNGVGYQPYRVVVLSFELLHAPATVCGPKKSTNLVKNKCVNFNFNGLTGTGVLTESNKKFLPFQQFGRDIADTTDAVRDPQTLEILDITPCSFGGVSVITPGTNTSNQVAVLYQGVNCTEVPVAIHADQLTPTWRVYSTGSNVFQTRAGCLIGAEHVNNSYECDIPIGAGICASYQTQTNSPRRARSVASQSIIAYTMSLGAENSVAYSNNSIAIPTNFTISVTTEILPVSMTKTSVDCTMYICGDSTECSNLLLQYGSFCTQLNRALTGIAVEQDKNTQEVFAQVKQIYKTPPIKDFGGFNFSQILPDPSKPSKRSFIEDLLFNKVTLADAGFIKQYGDCLGDIAARDLICAQKFNGLTVLPPLLTDEMIAQYTSALLAGTITSGWTFGAGAALQIPFAMQMAYRFNGIGVTQNVLYENQKLIANQFNSAIGKIQDSLSSTAPALGKLQDVVNQNAQALNTLVKQLSSNFGAISSVLNDILSRLDPPEAEVQIDRLITGRLQSLQTYVTQQLIRAAEIRASANLAATKMSECVLGQSKRVDFCGKGYHLMSFPQSAPHGVVFLHVTYVFAQEKNFTTAPAICHDGKAHFPREGVFVSNGTHWFVTQRNFYEPQIITTDNTFVSGNCDVVIGIVNNTVYDPLQPELDSGGGGSDIDPYKEFGSSYQLLNFLPLDFFPDLNALVDTATALYEEELTGREHCSPHHTAIRQALVCWDELTKLIAWMSSNITSEQVRTIIVNHVNDTWGLKVRQSLWFHLSCLTFGQHTVQEFLVSFGVWIRTPAPYRPPNAPILSTLPEHTVIC

SEQ ID NO: 10887 - protein, 1301 aa, Artificial Sequence
  SARS-CoV-2/Germany/BavPat3/2020__EPI_ISL_414521 spike protein (1-1147)(K986P_V987P_P1069F) WhcAg construct
MFVFLVLLPLVSSQCVNLTTRTQLPPAYTNSFTRGVYYPDKVFRSSVLHSTQDLFLPFFSNVTWFHAIHVSGTNGTKRFDNPVLPFNDGVYFASTEKSNIIRGWIFGTTLDSKTQSLLIVNNATNVVIKVCEFQFCNDPFLGVYYHKNNKSWMESEFRVYSSANNCTFEYVSQPFLMDLEGKQGNFKNLREFVFKNIDGYFKIYSKHTPINLVRDLPQGFSALEPLVDLPIGINITRFQTLLALHRSYLTPGDSSSGWTAGAAAYYVGYLQPRTFLLKYNENGTITDAVDCALDPLSETKCTLKSFTVEKGIYQTSNFRVQPTESIVRFPNITNLCPFGEVFNATRFASVYAWNRKRISNCVADYSVLYNSASFSTFKCYGVSPTKLNDLCFTNVYADSFVIRGDEVRQIAPGQTGKIADYNYKLPDDFTGCVIAWNSNNLDSKVGGNYNYLYRLFRKSNLKPFERDISTEIYQAGSTPCNGVEGFNCYFPLQSYGFQPTNGVGYQPYRVVVLSFELLHAPATVCGPKKSTNLVKNKCVNFNFNGLTGTGVLTESNKKFLPFQQFGRDIADTTDAVRDPQTLEILDITPCSFGGVSVITPGTNTSNQVAVLYQDVNCTEVPVAIHADQLTPTWRVYSTGSNVFQTRAGCLIGAEHVNNSYECDIPIGAGICASYQTQTNSPRRARSVASQSIIAYTMSLGAENSVAYSNNSIAIPTNFTISVTTEILPVSMTKTSVDCTMYICGDSTECSNLLLQYGSFCTQLNRALTGIAVEQDKNTQQVFAQVKQIYKTPPIKDFGGFNFSQILPDPSKPSKRSFIEDLLFNKVTLADAGFIKQYGDCLGDIAARDLICAQKFNGLTVLPPLLTDEMIAQYTSALLAGTITSGWTFGAGAALQIPFAMQMAYRFNGIGVTQNVLYENQKLIANQFNSAIGKIQDSLSSTASALGKLQDVVNQNAQALNTLVKQLSSNFGAISSVLNDILSRLDPPEAEVQIDRLITGRLQSLQTYVTQQLIRAAEIRASANLAATKMSECVLGQSKRVDFCGKGYHLMSFPQSAPHGVVFLHVTYVFAQEKNFTTAPAICHDGKAHFPREGVFVSNGTHWFVTQRNFYEPQIITTDNTFVSGNCDVVIGIVNNTVYDPLQPELDSGGGGSDIDPYKEFGSSYQLLNFLPLDFFPDLNALVDTATALYEEELTGREHCSPHHTAIRQALVCWDELTKLIAWMSSNITSEQVRTIIVNHVNDTWGLKVRQSLWFHLSCLTFGQHTVQEFLVSFGVWIRTPAPYRPPNAPILSTLPEHTVIC

SEQ ID NO: 10888 - protein, 1301 aa, Artificial Sequence
  SARS-CoV-2/France/HF1805/2020__EPI_ISL_414628 spike protein (1-1147)(K986P_V987P_P1069F) WhcAg construct
MFVFLVLLPLVSSQCVNLTTRTQLPPAYTNSFTRGVYYPDKVFRSSVLHSTQDLFLPFFSNVTWFHAIHVSGTNGTKRFDNPVLPFNDGVYFASTEKSNIIRGWIFGTTLDSKTQSLLIVNNATNVVIKVCEFQFCNDPFLGVYYHKNNKSWMESEFRVYSSANNCTFEYVSQPFLMDLEGKQGNFKNLREFVFKNIDGYFKIYSKHTPINLVRDLPQGFSALEPLVDLPIGINITRFQTLLALHRSYLTPGDSSSGWTAGAAAYYVGYLQPRTFLLKYNENGTITDAVDCALDPLSETKCTLKSFTVEKGIYQTSNFRVQPTESIVRFPNITNLCPFGEVFNATRFASVYAWNRKRISNCVADYSVLYNSASFSTFKCYGVSPTKLNDLCFTNVYADSFVIRGDEVRQIAPGQTGKIADYNYKLPDDFTGCVIAWNSNNLDSKVGGNYNYLYRLFRKSNLKPFERDISTEIYQAGSTPCNGVEGFNCYFPLQSYGFQPTNGVGYQPYRVVVLSFELLHAPATVCGPKKSTNLVKNKCVNFNFNGLTGTGVLTESNKKFLPFQQFGRDIADTTDAVRDPQTLEILDITPCSFGGVSVITPGTNTSNQVAVLYQGVNCTEVPVAIHADQLTPTWRVYSTGSNVFQTRAGCLIGAEHVNNSYECDIPIGAGICASYQTQTNSPRRARSVASQSIIAYTMSLGAENSVAYSNNSIAIPTNFTISVTTEILPVSMTKTSVDCTMYICGDSTECSNLLLQYGSFCTQLNRALTGIAVEQDKNTQEVFAQVKQIYKTPPIKDFGGFNFSQILPDPSKPSKRSFIEDLLFNKVTLADAGFIKQYGDCLGDIAARDLICAQKFNGLTVLPPLLTDEMIAQYTSALLAGTITSGWTFGAGAALQIPFAMQMAYRFNGIGVTQNVLYENQKLIANQFNSAIGKIQDSLSSTASALGKLQDVVNQNAQALNTLVKQLSSNFGAISSVLNDILSRLDPPEAEVQIDRLITGRLQSLQTYVTQQLIRAAEIRASANLAATKMSECVLGQSKRVDFCGKGYHLMSFPQSAPHGVVFLHVTYVFAQEKNFTTAPAICHDGKAHFPREGVFVSNGTHWFVTQRNFYEPQIITTDNTFVSGNCDVVIGVVNNTVYDPLQPELDSGGGGSDIDPYKEFGSSYQLLNFLPLDFFPDLNALVDTATALYEEELTGREHCSPHHTAIRQALVCWDELTKLIAWMSSNITSEQVRTIIVNHVNDTWGLKVRQSLWFHLSCLTFGQHTVQEFLVSFGVWIRTPAPYRPPNAPILSTLPEHTVIC

SEQ ID NO: 10889 - protein, 1301 aa, Artificial Sequence
  SARS-CoV-2/Netherlands/ZuidHolland_9/2020__EPI_ISL_414445 spike protein (1-1147)(K986P_V987P_P1069F) WhcAg construct
MFVFLVLLPLVSSQCVNLTTRTQLPPAYTNSFTRGVYYPDKVFRSSVLHSTQDLFLPFFSNVTWFHAIHVSGTNGTKRFDNPVLPFNDGVYFASTEKSNIIRGWIFGTTLDSKTQSLLIVNNATNVVIKVCEFQFCNDPFLGVYYHKNNKSWMESEFRVYSSANNCTFEYVSQPFLMDLEGKQGNFKNLREFVFKNIDGYFKIYSKHTPINLVRDLPQGFSALEPLVDLPIGINITRFQTLLALHRSYLTPGDSSSGWTAGAAAYYVGYLQPRTFLLKYNENGTITDAVDCALDPLSETKCTLKSFTVEKGIYQTSNFRVQPTESIVRFPNITNLCPFGEVFNATRFASVYAWNRKRISNCVADYSVLYNSASFSTFKCYGVSPTKLNDLCFTNVYADSFVIRGDEVRQIAPGQTGKIADYNYKLPDDFTGCVIAWNSNNLDSKVGGNYNYLYRLFRKSNLKPFERDISTEIYQAGSTPCNGVEGFNCYFPLQSYGFQPTNGVGYQPYRVVVLSFELLHAPATVCGPKKSTNLVKNKCVNFNFNGLTGTGVLTESNKKFLPFQQFGRDIADTTDAVRDPQTLEILDITPCSFGGVSVITPGTNTSNQVAVLYQGVNCTEVPVAIHADQLTPTWRVYSTGSNVFQTRAGCLIGAEHVNNSYECDIPIGAGICASYQTQTNSPRRARSVASQSIIAYTMSLGAENSVAYSNNSIAIPTNFTISVTTEILPVSMTKTSVDCTMYICGDSTECSNLLLQYGSFCTQLNRALTGIAVEQDKNTQEVFAQVKQIYKTPPIKDFGGFNFSQILPDPSKPSKRSFIEDLLFNKVTLADAGFIKQYGDCLGDIAARDLICVQKFNGLTVLPPLLTDEMIAQYTSALLAGTITSGWTFGAGAALQIPFAMQMAYRFNGIGVTQNVLYENQKLIANQFNSAIGKIQDSLSSTASALGKLQDVVNQNAQALNTLVKQLSSNFGAISSVLNDILSRLDPPEAEVQIDRLITGRLQSLQTYVTQQLIRAAEIRASANLAATKMSECVLGQSKRVDFCGKGYHLMSFPQSAPHGVVFLHVTYVFAQEKNFTTAPAICHDGKAHFPREGVFVSNGTHWFVTQRNFYEPQIITTDNTFVSGNCDVVIGIVNNTVYDPLQPELDSGGGGSDIDPYKEFGSSYQLLNFLPLDFFPDLNALVDTATALYEEELTGREHCSPHHTAIRQALVCWDELTKLIAWMSSNITSEQVRTIIVNHVNDTWGLKVRQSLWFHLSCLTFGQHTVQEFLVSFGVWIRTPAPYRPPNAPILSTLPEHTVIC

SEQ ID NO: 10890 - protein, 1301 aa, Artificial Sequence
  SARS-CoV-2/Finland/FIN03032020A/2020__EPI_ISL_413602 spike protein (1-1147)(K986P_V987P_P1069F) WhcAg construct
MFVFLVLLPLVSSQCVNLTTRTQLPPAYTNSFTRGVYYPDKVFRSSVLHSTQDLFLPFFSNVTWFHAIHVSGTNGTKRFDNPVLPFNDGVYFASTEKSNIIRGWIFGTTLDSKTQSLLIVNNATNVVIKVCEFQFCNDPFLGVYYHKNNKSWMESEFRVYSSANNCTFEYVSQPFLMDLEGKQGNFKNLREFVFKNIDGYFKIYSKHTPINLVRDLPQGFSALEPLVDLPIGINITRFQTLLALHRSYLTPGDSSSGWTAGAAAYYVGYLQPRTFLLKYNENGTITDAVDCALDPLSETKCTLKSFTVEKGIYQTSNFRVQPTESIVRFPNITNLCPFGEVFNATRFASVYAWNRKRISNCVADYSVLYNSASFSTFKCYGVSPTKLNDLCFTNVYADSFVIRGDEVRQIAPGQTGKIADYNYKLPDDFTGCVISWNSNNLDSKVGGNYNYLYRLFRKSNLKPFERDISTEIYQAGSTPCNGVEGFNCYFPLQSYGFQPTNGVGYQPYRVVVLSFELLHAPATVCGPKKSTNLVKNKCVNFNFNGLTGTGVLTESNKKFLPFQQFGRDIADTTDAVRDPQTLEILDITPCSFGGVSVITPGTNTSNQVAVLYQGVNCTEVPVAIHADQLTPTWRVYSTGSNVFQTRAGCLIGAEHVNNSYECDIPIGAGICASYQTQTNSPRRARSVASQSIIAYTMSLGAENSVAYSNNSIAIPTNFTISVTTEILPVSMTKTSVDCTMYICGDSTECSNLLLQYGSFCTQLNRALTGIAVEQDKNTQEVFAQVKQIYKTPPIKDFGGFNFSQILPDPSKPSKRSFIEDLLFNKVTLADAGFIKQYGDCLGDIAARDLICAQKFNGLTVLPPLLTDEMIAQYTSALLAGTITSGWTFGAGAALQIPFAMQMAYRFNGIGVTQNVLYENQKLIANQFNSAIGKIQDSLSSTASALGKLQDVVNQNAQALNTLVKQLSSNFGAISSVLNDILSRLDPPEAEVQIDRLITGRLQSLQTYVTQQLIRAAEIRASANLAATKMSECVLGQSKRVDFCGKGYHLMSFPQSAPHGVVFLHVTYVFAQEKNFTTAPAICHDGKAHFPREGVFVSNGTHWFVTQRNFYEPQIITTDNTFVSGNCDVVIGIVNNTVYDPLQPELDSGGGGSDIDPYKEFGSSYQLLNFLPLDFFPDLNALVDTATALYEEELTGREHCSPHHTAIRQALVCWDELTKLIAWMSSNITSEQVRTIIVNHVNDTWGLKVRQSLWFHLSCLTFGQHTVQEFLVSFGVWIRTPAPYRPPNAPILSTLPEHTVIC

SEQ ID NO: 10891 - protein, 1301 aa, Artificial Sequence
  SARS-CoV-2/France/GE1977/2020__EPI_ISL_414632 spike protein (1-1147)(K986P_V987P_P1069F) WhcAg construct
MFVFLVLLPLVSSQCVNLTTRTQLPPAYTNSFTRGVYYPDKVFRSSVLHSTQDLFLPFFSNVTWFHAIHVSGTNGTKRFDNPVLPFNDGVYFASTEKSNIIRGWIFGTTLDSKTQSLLIVNNATNVVIKVCEFQFCNDPFLGVYYHKNNKSWMESEFRVYSSANNCTFEYVSQPFLMDLEGKQGNFKNLREFVFKNIDGYFKIYSKHTPINLVRDLPQGFSALEPLVDLPIGINITRFQTLLALHRSYLTPGDSSSGWTAGAAAYYVGYLQPRTFLLKYNENGTITDAVDCALDPLSETKCTLKSFTVEKGIYQTSNFRVQPTESIVRFPNITNLCPFGEVFNATRFASVYAWNRKRISNCVADYSVLYNSASFSTFKCYGVSPTKLNDLCFTNVYADSFVIRGDEVRQIAPGQTGKIADYNYKLPDDFTGCVIAWNSNNLDSKVGGNYNYLYRLFRKSNLKPFERDISTEIYQAGSTPCNGVEGFNCYFPLQSYGFQPTNGVGYQPYRVVVLSFELLHAPATVCGPKKSTNLVKNKCVNFNFNGLTGTGVLTESNKKFLPFQQFGRDIADTTDAVRDPQTLEILDITPCSFGGVSVITPGTNTSNQVAVLYQGVNCTEVPVAIHADQLTPTWRVYSTGSNVFQTRAGCLIGAEHVNNSYECDIPIGAGICASYQTQTNSPRRARSVASQSIIAYTMSLGAENSVAYSNNSIAIPTNFTISVTTEILPVSMTKTSVDCTMYICGDSTECSNLLLQYGSFCTQLNRALTGIAVEQDKNTQEVFAQVKQIYKTPPIKDFGGFNFSQILPDPSKPSKRSFIEDLLFNKVTLADAGFIKQYGDCLGDIAARDLICAQKFNGLTVLPPLLTDEMIAQYTSALLAGTITSGWTFGAGAALQIPFAMQMAYRFNGIGVTQNVLYENQKLIANQFNSAIGKIQDSLFSTASALGKLQDVVNQNAQALNTLVKQLSSNFGAISSVLNDILSRLDPPEAEVQIDRLITGRLQSLQTYVTQQLIRAAEIRASANLAATKMSECVLGQSKRVDFCGKGYHLMSFPQSAPHGVVFLHVTYVFAQEKNFTTAPAICHDGKAHFPREGVFVSNGTHWFVTQRNFYEPQIITTDNTFVSGNCDVVIGIVNNTVYDPLQPELDSGGGGSDIDPYKEFGSSYQLLNFLPLDFFPDLNALVDTATALYEEELTGREHCSPHHTAIRQALVCWDELTKLIAWMSSNITSEQVRTIIVNHVNDTWGLKVRQSLWFHLSCLTFGQHTVQEFLVSFGVWIRTPAPYRPPNAPILSTLPEHTVIC

SEQ ID NO: 10892 - protein, 1301 aa, Artificial Sequence
  SARS-CoV-2/Finland/FIN-313/2020__EPI_ISL_414641 spike protein (1-1147)(K986P_V987P_P1069F) WhcAg construct
MFVFLVLLPLVSSQCVNLTTRTQLPPAYTNSFTRGVYYPDKVFRSSVLHSTQDLFLPFFSNVTWFHAIHVSGTNGTKRFDNPVLPFNDGVYFASTEKSNIIRGWIFGTTLDSKTQSLLIVNNATNVVIKVCEFQFCNDPFLGVYYHKNNKSWMESEFRVYSSANNCTFEYVSQPFLMDLEGKQGNFKNLREFVFKNIDGYFKIYSKHTPINLVRDLPQGFSALEPLVDLPIGINITRFKTLLALHRSYLTPGDSSSGWTAGAAAYYVGYLQPRTFLLKYNENGTITDAVDCALDPLSETKCTLKSFTVEKGIYQTSNFRVQPTESIVRFPNITNLCPFGEVFNATRFASVYAWNRKRISNCVADYSVLYNSASFSTFKCYGVSPTKLNDLCFTNVYADSFVIRGDEVRQIAPGQTGKIADYNYKLPDDFTGCVIAWNSNNLDSKVGGNYNYLYRLFRKSNLKPFERDISTEIYQAGSTPCNGVEGFNCYFPLQSYGFQPTNGVGYQPYRVVVLSFELLHAPATVCGPKKSTNLVKNKCVNFNFNGLTGTGVLTESNKKFLPFQQFGRDIADTTDAVRDPQTLEILDITPCSFGGVSVITPGTNTSNQVAVLYQGVNCTEVPVAIHADQLTPTWRVYSTGSNVFQTRAGCLIGAEHVNNSYECDIPIGAGICASYQTQTNSPRRARSVASQSIIAYTMSLGAENSVAYSNNSIAIPTNFTISVTTEILPVSMTKTSVDCTMYICGDSTECSNLLLQYGSFCTQLNRALTGIAVEQDKNTQEVFAQVKQIYKTPPIKDFGGFNFSQILPDPSKPSKRSFIEDLLFNKVTLADAGFIKQYGDCLGDIAARDLICAQKFNGLTVLPPLLTDEMIAQYTSALLAGTITSGWTFGAGAALQIPFAMQMAYRFNGIGVTQNVLYENQKLIANQFNSAIGKIQDSLSSTASALGKLQDVVNQNAQALNTLVKQLSSNFGAISSVLNDILSRLDPPEAEVQIDRLITGRLQSLQTYVTQQLIRAAEIRASANLAATKMSECVLGQSKRVDFCGKGYHLMSFPQSAPHGVVFLHVTYVFAQEKNFTTAPAICHDGKAHFPREGVFVSNGTHWFVTQRNFYEPQIITTDNTFVSGNCDVVIGIVNNTVYDPLQPELDSGGGGSDIDPYKEFGSSYQLLNFLPLDFFPDLNALVDTATALYEEELTGREHCSPHHTAIRQALVCWDELTKLIAWMSSNITSEQVRTIIVNHVNDTWGLKVRQSLWFHLSCLTFGQHTVQEFLVSFGVWIRTPAPYRPPNAPILSTLPEHTVIC

SEQ ID NO: 10893 - protein, 1301 aa, Artificial Sequence
  SARS-CoV-2/Netherlands/ZuidHolland_2/2020__EPI_ISL_414556 spike protein (1-1147)(K986P_V987P_P1069F) WhcAg construct
MFVFLVLLPLVSSQCVNLTTRTQLPPAYTNSFTRGVYYPDKVFRSSVLHSTQDLFLPFFSNVTWFHAIHVSGTNGTKRFDNPVLPFNDGVYFASTEKSNIIRGWIFGTTLDSKTQSLLIVNNATNVVIKVCEFQFCNDPFLGVYYHKNNKSWMESEFRVYSSANNCTFEYVSQPFLMDLEGKQGNFKNLREFVFKNIDGYFKIYSKHTPINLVRDLPQGFSALEPLVDLPIGINITRFQTLLALHRSYLTPGDSSSGWTAGAAAYYVGYLQPRTFLLKYNENGTITDAVDCALDPLSETKCTLKSFTVEKGIYQTSNFRVQPTESIVRFPNITNLCPFGEVFNATRFASVYAWNRKRISNCVADYSVLYNSASFSTFKCYGVSPTKLNDLCFTNVYADSFVIRGDEVRQIAPGQTGKIADYNYKLPDDFTGCVIAWNSNNLDSKVGGNYNYLYRLFRKSNLKPFERDISTEIYQAGSTPCNGVEGFNCYFPLQSYGFQPTNGVGYQPYRVVVLSFELLHAPATVCGPKKSTNLVKNKCVNFNFNGLTGTGVLTESNKKFLPFQQFGRDIADTTDAVRDPQTLEILDITPCSFGGVSVITPGTNTSNQVAVLYQGVNCTEVPVAIHADQLTPTWRVYSTGSNVFQTRAGCLIGAEHVNNSYECDIPIGAGICASYQTQTNSPRRARSVASQSIIAYTMSLGAENSVAYSNNSIAIPTNFTISVTTEILPVSMTKTSVDCTMYICGDSTECSNLLLQYGSFCTQLNRALTGIALEQDKNTQEVFAQVKQIYKTPPIKDFGGFNFSQILPDPSKPSKRSFIEDLLFNKVTLADAGFIKQYGDCLGDIAARDLICAQKFNGLTVLPPLLTDEMIAQYTSALLAGTITSGWTFGAGAALQIPFAMQMAYRFNGIGVTQNVLYENQKLIANQFNSAIGKIQDSLSSTASALGKLQDVVNQNAQALNTLVKQLSSNFGAISSVLNDILSRLDPPEAEVQIDRLITGRLQSLQTYVTQQLIRAAEIRASANLAATKMSECVLGQSKRVDFCGKGYHLMSFPQSAPHGVVFLHVTYVFAQEKNFTTAPAICHDGKAHFPREGVFVSNGTHWFVTQRNFYEPQIITTDNTFVSGNCDVVIGIVNNTVYDPLQPELDSGGGGSDIDPYKEFGSSYQLLNFLPLDFFPDLNALVDTATALYEEELTGREHCSPHHTAIRQALVCWDELTKLIAWMSSNITSEQVRTIIVNHVNDTWGLKVRQSLWFHLSCLTFGQHTVQEFLVSFGVWIRTPAPYRPPNAPILSTLPEHTVIC

SEQ ID NO: 10894 - protein, 1301 aa, Artificial Sequence
  SARS-CoV-2/USA/WA-UW31/2020__EPI_ISL_414618 spike protein (1-1147)(K986P_V987P_P1069F) WhcAg construct
MFVFLVLLPLVSSQCVNLTTRTQLPPAYTNSFTRGVYYPDKVFRSSVLHSTQDLFLPFFSNVTWFHAIHVSGTNGTKRFDNPVLPFNDGVYFASTEKSNIIRGWIFGTTLDSKTQSLLIVNNATNVVIKVCEFQFCNDPFLGVYYHKNNKSWMESEFRVYSSANNCTFEYVSQPFLMDLEGKQGNFKNLREFVFKNIDGYFKIYSKHTPINLVRDLPQGFSALEPLVDLPIGINITRFQTLLALHRSYLTPGDSSSGWTAGAAAYYVGYLQPRTFLLKYNENGTITDAVDCALDPLSETKCTLKSFTVEKGIYQTSNFRVQPTESIVRFPNITNLCPFGEVFNATRFASVYAWNRKRISNCVADYSVLYNSASFSTFKCYGVSPTKLNDLCFTNVYADSFVIRGDEVRQIAPGQTGKIADYNYKLPDDFTGCVIAWNSNNLDSKVGGNYNYLYRLFRKSNLKPFERDISTEIYQAGSTPCNGAEGFNCYFPLQSYGFQPTNGVGYQPYRVVVLSFELLHAPATVCGPKKSTNLVKNKCVNFNFNGLTGTGVLTESNKKFLPFQQFGRDIADTTDAVRDPQTLEILDITPCSFGGVSVITPGTNTSNQVAVLYQDVNCTEVPVAIHADQLTPTWRVYSTGSNVFQTRAGCLIGAEHVNNSYECDIPIGAGICASYQTQTNSPRRARSVASQSIIAYTMSLGAENSVAYSNNSIAIPTNFTISVTTEILPVSMTKTSVDCTMYICGDSTECSNLLLQYGSFCTQLNRALTGIAVEQDKNTQEVFAQVKQIYKTPPIKDFGGFNFSQILPDPSKPSKRSFIEDLLFNKVTLADAGFIKQYGDCLGDIAARDLICAQKFNGLTVLPPLLTDEMIAQYTSALLAGTITSGWTFGAGAALQIPFAMQMAYRFNGIGVTQNVLYENQKLIANQFNSAIGKIQDSLSSTASALGKLQDVVNQNAQALNTLVKQLSSNFGAISSVLNDILSRLDPPEAEVQIDRLITGRLQSLQTYVTQQLIRAAEIRASANLAATKMSECVLGQSKRVDFCGKGYHLMSFPQSAPHGVVFLHVTYVFAQEKNFTTAPAICHDGKAHFPREGVFVSNGTHWFVTQRNFYEPQIITTDNTFVSGNCDVVIGIVNNTVYDPLQPELDSGGGGSDIDPYKEFGSSYQLLNFLPLDFFPDLNALVDTATALYEEELTGREHCSPHHTAIRQALVCWDELTKLIAWMSSNITSEQVRTIIVNHVNDTWGLKVRQSLWFHLSCLTFGQHTVQEFLVSFGVWIRTPAPYRPPNAPILSTLPEHTVIC

SEQ ID NO: 10895 - protein, 1301 aa, Artificial Sequence
  SARS-CoV-2/South Korea/SNU01/2020__EPI_ISL_411929 spike protein (1-1147)(K986P_V987P_P1069F) WhcAg construct
MFVFLVLLPLVSSQCVNLTTRTQLPPAYTNSFTRGVYYPDKVFRSSVLHSTQDLFLPFFSNVTWFHAIHVSGTNGTKRFDNPVLPFNDGVYFASTEKSNIIRGWIFGTTLDSKTQSLLIVNNATNVVIKVCEFQFCNDPFLGVYYHKNNKSWMESEFRVYSSANNCTFEYVSQPFLMDLEGKQGNFKNLREFVFKNIDGYFKIYSKHTPINLVRDLPQGFWALEPLVDLPIGINITRFQTLLALHRSYLTPGDSSSGWTAGAAAYYVGYLQPRTFLLKYNENGTITDAVDCALDPLSETKCTLKSFTVEKGIYQTSNFRVQPTESIVRFPNITNLCPFGEVFNATRFASVYAWNRKRISNCVADYSVLYNSASFSTFKCYGVSPTKLNDLCFTNVYADSFVIRGDEVRQIAPGQTGKIADYNYKLPDDFTGCVIAWNSNNLDSKVGGNYNYLYRLFRKSNLKPFERDISTEIYQAGSTPCNGVEGFNCYFPLQSYGFQPTNGVGYQPYRVVVLSFELLHAPATVCGPKKSTNLVKNKCVNFNFNGLTGTGVLTESNKKFLPFQQFGRDIADTTDAVRDPQTLEILDITPCSFGGVSVITPGTNTSNQVAVLYQDVNCTEVPVAIHADQLTPTWRVYSTGSNVFQTRAGCLIGAEHVNNSYECDIPIGAGICASYQTQTNSPRRARSVASQSIIAYTMSLGAENSVAYSNNSIAIPTNFTISVTTEILPVSMTKTSVDCTMYICGDSTECSNLLLQYGSFCTQLNRALTGIAVEQDKNTQEVFAQVKQIYKTPPIKDFGGFNFSQILPDPSKPSKRSFIEDLLFNKVTLADAGFIKQYGDCLGDIAARDLICAQKFNGLTVLPPLLTDEMIAQYTSALLAGTITSGWTFGAGAALQIPFAMQMAYRFNGIGVTQNVLYENQKLIANQFNSAIGKIQDSLSSTASALGKLQDVVNQNAQALNTLVKQLSSNFGAISSVLNDILSRLDPPEAEVQIDRLITGRLQSLQTYVTQQLIRAAEIRASANLAATKMSECVLGQSKRVDFCGKGYHLMSFPQSAPHGVVFLHVTYVFAQEKNFTTAPAICHDGKAHFPREGVFVSNGTHWFVTQRNFYEPQIITTDNTFVSGNCDVVIGIVNNTVYDPLQPELDSGGGGSDIDPYKEFGSSYQLLNFLPLDFFPDLNALVDTATALYEEELTGREHCSPHHTAIRQALVCWDELTKLIAWMSSNITSEQVRTIIVNHVNDTWGLKVRQSLWFHLSCLTFGQHTVQEFLVSFGVWIRTPAPYRPPNAPILSTLPEHTVIC

SEQ ID NO: 10896 - protein, 1301 aa, Artificial Sequence
  SARS-CoV-2/China/WF0004/2020__EPI_ISL_413694 spike protein (1-1147)(K986P_V987P_P1069F) WhcAg construct
MFVFLVLLPLVSSQCVNLTTRTQLPPAYTNSFTRGVYYPDKVFRSSVLHSTQDLFLPFFSNVTWFHAIHVSGTNGTKRFDNPVLPFNDGVYFASTEKSNIIRGWIFGTTLDSKTQSLLIVNNATNVVIKVCEFQFCNDPFLGVYYHKNNKSWTESEFRVYSSANNCTFEYVSQPFLMDLEGKQGNFKNLREFVFKNIDGYFKIYSKHTPINLVRDLPQGFSALEPLVDLPIGINITRFQTLLALHRSYLTPGDSSSGWTAGAAAYYVGYLQPRTFLLKYNENGTITDAVDCALDPLSETKCTLKSFTVEKGIYQTSNFRVQPTESIVRFPNITNLCPFGEVFNATRFASVYAWNRKRISNCVADYSVLYNSASFSTFKCYGVSPTKLNDLCFTNVYADSFVIRGDEVRQIAPGQTGKIADYNYKLPDDFTGCVIAWNSNNLDSKVGGNYNYLYRLFRKSNLKPFERDISTEIYQAGSTPCNGVEGFNCYFPLQSYGFQPTNGVGYQPYRVVVLSFELLHAPATVCGPKKSTNLVKNKCVNFNFNGLTGTGVLTESNKKFLPFQQFGRDIADTTDAVRDPQTLEILDITPCSFGGVSVITPGTNTSNQVAVLYQDVNCTEVPVAIHADQLTPTWRVYSTGSNVFQTRAGCLIGAEHVNNSYECDIPIGAGICASYQTQTNSPRRARSVASQSIIAYTMSLGAENSVAYSNNSIAIPTNFTISVTTEILPVSMTKTSVDCTMYICGDSTECSNLLLQYGSFCTQLNRALTGIAVEQDKNTQEVFAQVKQIYKTPPIKDFGGFNFSQILPDPSKPSKRSFIEDLLFNKVTLADAGFIKQYGDCLGDIAARDLICAQKFNGLTVLPPLLTDEMIAQYTSALLAGTITSGWTFGAGAALQIPFAMQMAYRFNGIGVTQNVLYENQKLIANQFNSAIGKIQDSLSSTASALGKLQDVVNQNAQALNTLVKQLSSNFGAISSVLNDILSRLDPPEAEVQIDRLITGRLQSLQTYVTQQLIRAAEIRASANLAATKMSECVLGQSKRFDFCGKGYHLMSFPQSAPHGVVFLHVTYVFAQEKNFTTAPAICHDGKAHFPREGVFVSNGTHWFVTQRNFYEPQIITTDNTFVSGNCDVVIGIVNNTVYDPLQPELDSGGGGSDIDPYKEFGSSYQLLNFLPLDFFPDLNALVDTATALYEEELTGREHCSPHHTAIRQALVCWDELTKLIAWMSSNITSEQVRTIIVNHVNDTWGLKVRQSLWFHLSCLTFGQHTVQEFLVSFGVWIRTPAPYRPPNAPILSTLPEHTVIC

SEQ ID NO: 10897 - protein, 1301 aa, Artificial Sequence
  SARS-CoV-2/China/WF0028/2020__EPI_ISL_413791 spike protein (1-1147)(K986P_V987P_P1069F) WhcAg construct
MFVFLVLLPLVSSQCVNLTTRTQLPPAYTNSFTRGVYYPDKVFRSSVLHSTQDLFLPFFSNVTWFHAIHVSGTNGTKRFDNPVLPFNDGVYFASTEKSNIIRGWIFGTTLDSKTQSLLIVNNATNVVIKVCEFQFCNDPFLGVYYHKNNKSWMESEFRVYSSANNCTFEYVSQPFLMDLEGKQGNFKNLREFVFKNIDGYFKIYSKHTPINLVRDLPQGFSALEPLVDLPIGINITRFQTLLALHRSYLTPGDSSSGWTAGAAAYYVGYLQPRTFLLKYNENGTITDAVDCALDPLSETKCTLKSFTVEKGIYQTSNFRVQPTESIVRFPNITNLCPFGEVFNATRFASVYAWNRKRISNCVADYSVLYNSASFSTFKCYGVSPTKLNDLCFTNVYADSFVIRGDEVRQIAPGQTGKIADYNYKLPDDFTGCVIAWNSNNLDSKVGGNYNYLYRLFRKSNLKPFERDISTEIYQAGSTPCNGVEGFNCYFPLQSYGFQPTNGVGYQPYRVVVLSFELLHAPATVCGPKKSTNLVKNKCVNFNFNGLTGTGVLTESNKKFLPFQQFGRDIADTTDAVRDPQTLEILDITPCSFGGVSVITPGTNTSNQVAVLYQDVNCTEVPVAIHADQLTPTWRVYSTGSNVFQTRAGCLIGAEHVNNSYECDIPIGAGICASYQTQTNSPRRARSVASQSIIAYTMSLGAENSVAYSNNSIAIPTNFTISVTTEILPVSMTKTSVDCTMYICGDSTECSNLLLQYGSFCTQLNRALTGIAVEQDKNTQEVFAQVKQIYKTPPIKDFGGFNFSQILPDPSKPSKRSFIEDLLFNKVTLADAGFIKQYGDCLGDIAARDLICAQKFNGLTVLPPLLTDEMIAQYTSALLAGTITSGWTFGAGAALQIPFAMQMAYRFNGIGVTQNVLYENQKLIANQFNSAIGKIQDSLSSTASALGKLQDVVNQNAQALNTLVKQLSSNFGAISSVLNDILSRLDPPEAEVQIDRLITGRLQSLQTYVTQQLIRAAEIRASANLAATKMSECVLGQSKRVDFCGKGYHLMSFPQSAPHGVVFLHVTYVFAQEKNFTTAPAICHDGKAHFPREGVFVSNGTHWFVTQRNFYEPQIITTDNTFVSGNCDVVIGIVNNTVYDPLQPELESGGGGSDIDPYKEFGSSYQLLNFLPLDFFPDLNALVDTATALYEEELTGREHCSPHHTAIRQALVCWDELTKLIAWMSSNITSEQVRTIIVNHVNDTWGLKVRQSLWFHLSCLTFGQHTVQEFLVSFGVWIRTPAPYRPPNAPILSTLPEHTVIC

SEQ ID NO: 10898 - protein, 1301 aa, Artificial Sequence
  SARS-CoV-2/2019-nCoV/USA-CruiseA-18/2020__MT159716.1 spike protein (1-1147)(K986P_V987P_P1069F) WhcAg construct
MFVFLVLLPLVSSQCVNLTTRTQLPPAYTNSFTRGVYYPDKVFRSSVLHSTQDLFLPFFSNVTWFHAIHVSGTNGTKRFDNPVLPFNDGVYFASTEKSNIIRGWIFGTTLDSKTQSLLIVNNATNVVIKVCEFQFCNDPFLGVYYHKNNKSWMESELRVYSSANNCTFEYVSQPFLMDLEGKQGNFKNLREFVFKNIDGYFKIYSKHTPINLVRDLPQGFSALEPLVDLPIGINITRFQTLLALHRSYLTPGDSSSGWTAGAAAYYVGYLQPRTFLLKYNENGTITDAVDCALDPLSETKCTLKSFTVEKGIYQTSNFRVQPTESIVRFPNITNLCPFGEVFNATRFASVYAWNRKRISNCVADYSVLYNSASFSTFKCYGVSPTKLNDLCFTNVYADSFVIRGDEVRQIAPGQTGKIADYNYKLPDDFTGCVIAWNSNNLDSKVGGNYNYLYRLFRKSNLKPFERDISTEIYQAGSTPCNGVEGFNCYFPLQSYGFQPTNGVGYQPYRVVVLSFELLHAPATVCGPKKSTNLVKNKCVNFNFNGLTGTGVLTESNKKFLPFQQFGRDIADTTDAVRDPQTLEILDITPCSFGGVSVITPGTNTSNQVAVLYQDVNCTEVPVAIHADQLTPTWRVYSTGSNVFQTRAGCLIGAEHVNNSYECDIPIGAGICASYQTQTNSPRRARSVASQSIIAYTMSLGAENSVAYSNNSIAIPTNFTISVTTEILPVSMTKTSVDCTMYICGDSTECSNLLLQYGSFCTQLNRALTGIAVEQDKNTQEVFAQVKQIYKTPPIKDFGGFNFSQILPDPSKPSKRSFIEDLLFNKVTLADAGFIKQYGDCLGDIAARDLICAQKFNGLTVLPPLLTDEMIAQYTSALLAGTITSGWTFGAGAALQIPFAMQMAYRFNGIGVTQNVLYENQKLIANQFNSAIGKIQDSLSSTASALGKLQDVVNQNAQALNTLVKQLSSNFGAISSVLNDILSRLDPPEAEVQIDRLITGRLQSLQTYVTQQLIRAAEIRASANLAATKMSECVLGQSKRVDFCGKGYHLMSFPQSAPHGVVFLHVTYVFAQEKNFTTAPAICHDGKAHFPREGVFVSNGTHWFVTQRNFYEPQIITTDNTFVSGNCDVVIGIVNNTVYDPLQPELDSGGGGSDIDPYKEFGSSYQLLNFLPLDFFPDLNALVDTATALYEEELTGREHCSPHHTAIRQALVCWDELTKLIAWMSSNITSEQVRTIIVNHVNDTWGLKVRQSLWFHLSCLTFGQHTVQEFLVSFGVWIRTPAPYRPPNAPILSTLPEHTVIC

SEQ ID NO: 10899 - protein, 1301 aa, Artificial Sequence
  SARS-CoV-2/SARS-CoV-2/Yunnan-01/human/2020/CHN__MT049951.1 spike protein (1-1147)(K986P_V987P_P1069F) WhcAg construct
MFVFLVLLPLVSSQCVNLTTRTQLPPANTNSFTRGVYYPDKVFRSSVLHSTQDLFLPFFSNVTWFHAIHVSGTNGTKRFDNPVLPFNDGVYFASTEKSNIIRGWIFGTTLDSKTQSLLIVNNATNVVIKVCEFQFCNDPFLGVYYHKNNKSWMESEFRVYSSANNCTFEYVSQPFLMDLEGKQGNFKNLREFVFKNIDGYFKIYSKHTPINLVRDLPQGFSALEPLVDLPIGINITRFQTLLALHRSYLTPGDSSSGWTAGAAAYYVGYLQPRTFLLKYNENGTITDAVDCALDPLSETKCTLKSFTVEKGIYQTSNFRVQPTESIVRFPNITNLCPFGEVFNATRFASVYAWNRKRISNCVADYSVLYNSASFSTFKCYGVSPTKLNDLCFTNVYADSFVIRGDEVRQIAPGQTGKIADYNYKLPDDFTGCVIAWNSNNLDSKVGGNYNYLYRLFRKSNLKPFERDISTEIYQAGSTPCNGVEGFNCYFPLQSYGFQPTNGVGYQPYRVVVLSFELLHAPATVCGPKKSTNLVKNKCVNFNFNGLTGTGVLTESNKKFLPFQQFGRDIADTTDAVRDPQTLEILDITPCSFGGVSVITPGTNTSNQVAVLYQDVNCTEVPVAIHADQLTPTWRVYSTGSNVFQTRAGCLIGAEHVNNSYECDIPIGAGICASYQTQTNSPRRARSVASQSIIAYTMSLGAENSVAYSNNSIAIPTNFTISVTTEILPVSMTKTSVDCTMYICGDSTECSNLLLQYGSFCTQLNRALTGIAVEQDKNTQEVFAQVKQIYKTPPIKDFGGFNFSQILPDPSKPSKRSFIEDLLFNKVTLADAGFIKQYGDCLGDIAARDLICAQKFNGLTVLPPLLTDEMIAQYTSALLAGTITSGWTFGAGAALQIPFAMQMAYRFNGIGVTQNVLYENQKLIANQFNSAIGKIQDSLSSTASALGKLQDVVNQNAQALNTLVKQLSSNFGAISSVLNDILSRLDPPEAEVQIDRLITGRLQSLQTYVTQQLIRAAEIRASANLAATKMSECVLGQSKRVDFCGKGYHLMSFPQSAPHGVVFLHVTYVFAQEKNFTTAPAICHDGKAHFPREGVFVSNGTHWFVTQRNFYEPQIITTDNTFVSGNCDVVIGIVNNTVYDPLQPELDSGGGGSDIDPYKEFGSSYQLLNFLPLDFFPDLNALVDTATALYEEELTGREHCSPHHTAIRQALVCWDELTKLIAWMSSNITSEQVRTIIVNHVNDTWGLKVRQSLWFHLSCLTFGQHTVQEFLVSFGVWIRTPAPYRPPNAPILSTLPEHTVIC

SEQ ID NO: 10900 - protein, 1301 aa, Artificial Sequence
  SARS-CoV-2/USA/WA-UW292/2020__EPI_ISL_418077 spike protein (1-1147)(K986P_V987P_P1069F) WhcAg construct
MFVFLVLLPLVSSQCVNLTTRTQLPPAYTNSFTRGVYYPDKVFRSSVLHSTQDLFLPFFSNVTWFHAIHVSGTNGTKRFDNPVLPFNDGVYFASTEKSNIIRGWIFGTTLDSKTQSLLIVNNATNVVIKVCEFQFCNDPFLGVYYHKNNKSWMESEFRVYSSANNCTFEYVSQPFLMDLEGKQGNFKNLREFVFKNIDGYFKIYSKHTPINLVRDLPQGFSALEPLVDLPIGINITRFQTLLALHRSYLTPGDSSSGWTAGAAAYYVGYLQPRTFLLKYNENGTITDAVDCALDPLSETKCTLKSFTVEKGIYQTSNFRVQPTESIVRFPNITNLCPFGEVFNATRFASVYAWNRKRISNCVADYSVLYNSASFSTFKCYGVSPTKLNDLCFTNVYADSFVIRGDEVRQIAPGQTGKIADYNYKLPDDFTGCVIAWNSNNLDSKVGGNYNYLYRLFRKSNLKPFERDISTEIYQASSTPCNGVEGFNCYFPLQSYGFQPTNGVGYQPYRVVVLSFELLHAPATVCGPKKSTNLVKNKCVNFNFNGLTGTGVLTESNKKFLPFQQFGRDIADTTDAVRDPQTLEILDITPCSFGGVSVITPGTNTSNQVAVLYQDVNCTEVPVAIHADQLTPTWRVYSTGSNVFQTRAGCLIGAEHVNNSYECDIPIGAGICASYQTQTNSPRRARSVASQSIIAYTMSLGAENSVAYSNNSIAIPTNFTISVTTEILPVSMTKTSVDCTMYICGDSTECSNLLLQYGSFCTQLNRALTGIAVEQDKNTQEVFAQVKQIYKTPPIKDFGGFNFSQILPDPSKPSKRSFIEDLLFNKVTLADAGFIKQYGDCLGDIAARDLICAQKFNGLTVLPPLLTDEMIAQYTSALLAGTITSGWTFGAGAALQIPFAMQMAYRFNGIGVTQNVLYENQKLIANQFNSAIGKIQDSLSSTASALGKLQDVVNQNAQALNTLVKQLSSNFGAISSVLNDILSRLDPPEAEVQIDRLITGRLQSLQTYVTQQLIRAAEIRASANLAATKMSECVLGQSKRVDFCGKGYHLMSFPQSAPHGVVFLHVTYVFAQEKNFTTAPAICHDGKAHFPREGVFVSNGTHWFVTQRNFYEPQIITTDNTFVSGNCDVVIGIVNNTVYDPLQPELDSGGGGSDIDPYKEFGSSYQLLNFLPLDFFPDLNALVDTATALYEEELTGREHCSPHHTAIRQALVCWDELTKLIAWMSSNITSEQVRTIIVNHVNDTWGLKVRQSLWFHLSCLTFGQHTVQEFLVSFGVWIRTPAPYRPPNAPILSTLPEHTVIC

SEQ ID NO: 10901 - protein, 1301 aa, Artificial Sequence
  SARS-CoV-2/Iceland/192/2020__EPI_ISL_417819 spike protein (1-1147)(K986P_V987P_P1069F) WhcAg construct
MFVFFVLLPLVSSQCVNLTTRTQLPPAYTNSFTRGVYYPDKVFRSSVLHSTQDLFLPFFSNVTWFHAIHVSGTNGTKRFDNPVLPFNDGVYFASTEKSNIIRGWIFGTTLDSKTQSLLIVNNATNVVIKVCEFQFCNDPFLGVYYHKNNKSWMESEFRVYSSANNCTFEYVSQPFLMDLEGKQGNFKNLREFVFKNIDGYFKIYSKHTPINLVRDLPQGFSALEPLVDLPIGINITRFQTLLALHRSYLTPGDSSSGWTAGAAAYYVGYLQPRTFLLKYNENGTITDAVDCALDPLSETKCTLKSFTVEKGIYQTSNFRVQPTESIVRFPNITNLCPFGEVFNATRFASVYAWNRKRISNCVADYSVLYNSASFSTFKCYGVSPTKLNDLCFTNVYADSFVIRGDEVRQIAPGQTGKIADYNYKLPDDFTGCVIAWNSNNLDSKVGGNYNYLYRLFRKSNLKPFERDISTEIYQAGSTPCNGVEGFNCYFPLQSYGFQPTNGVGYQPYRVVVLSFELLHAPATVCGPKKSTNLVKNKCVNFNFNGLTGTGVLTESNKKFLPFQQFGRDIADTTDAVRDPQTLEILDITPCSFGGVSVITPGTNTSNQVAVLYQGVNCTEVPVAIHADQLTPTWRVYSTGSNVFQTRAGCLIGAEHVNNSYECDIPIGAGICASYQTQTNSPRRARSVASQSIIAYTMSLGAENSVAYSNNSIAIPTNFTISVTTEILPVSMTKTSVDCTMYICGDSTECSNLLLQYGSFCTQLNRALTGIAVEQDKNTQEVFAQVKQIYKTPPIKDFGGFNFSQILPDPSKPSKRSFIEDLLFNKVTLADAGFIKQYGDCLGDIAARDLICAQKFNGLTVLPPLLTDEMIAQYTSALLAGTITSGWTFGAGAALQIPFAMQMAYRFNGIGVTQNVLYENQKLIANQFNSAIGKIQDSLSSTASALGKLQDVVNQNAQALNTLVKQLSSNFGAISSVLNDILSRLDPPEAEVQIDRLITGRLQSLQTYVTQQLIRAAEIRASANLAATKMSECVLGQSKRVDFCGKGYHLMSFPQSAPHGVVFLHVTYVFAQEKNFTTAPAICHDGKAHFPREGVFVSNGTHWFVTQRNFYEPQIITTDNTFVSGNCDVVIGIVNNTVYDPLQPELDSGGGGSDIDPYKEFGSSYQLLNFLPLDFFPDLNALVDTATALYEEELTGREHCSPHHTAIRQALVCWDELTKLIAWMSSNITSEQVRTIIVNHVNDTWGLKVRQSLWFHLSCLTFGQHTVQEFLVSFGVWIRTPAPYRPPNAPILSTLPEHTVIC

SEQ ID NO: 10902 - protein, 1301 aa, Artificial Sequence
  SARS-CoV-2/Belgium/ULG-6939/2020__EPI_ISL_417020 spike protein (1-1147)(K986P_V987P_P1069F) WhcAg construct
MFVFLVLLPLVSSQCVNLTTRTQLPPAYTNSFTRGVYYPDKVFRSSVLHSTQDLFLPFFSNVTWFHAIHVSGTNGTKRFDNPVLPFNDGVYFASTEKSNIIRGWIFGTTLDSKTQSLLIVNNATNVVIKVCEFQFCNDPFLGVYYHKNNKSWMESEFRVYSSANNCTFEYVSQPFLMDLEGKQGNFKNLREFVFKNIDGYFKIYSKHTPINLVRDLPQGFSALEPLVDLPIGINITRFQTLLALHRSYLTPGDSSSGWTAGAAAYYVGYLQPRTFLLKYNENGTITDAVDCALDPLSETKCTLKSFTVEKGIYQTSNFRVQPTESIVRFPNITNLCPFGEVFNATRFASVYAWNRKRISNCVADYSVLYNSASFSTFKCYGVSPTKLNDLCFTNVYADSFVIRGDEVRQIAPGQTGKIADYNYKLPDDFTGCVIAWNSNNLDSKVGGNYNYLYRLFRKSNLKPFERDISTEIYQAGSTPCNGVEGFNCYFPLQSYGFQPTNGVGYQPYRVVVLSFELLHAPATVCGPKKSTNLVKNKCVNFNFNGLTGTGVLTESNKKFLPFQQFGRDIADTTDAVRDPQTLEILDITPCSFGGVSVITPGTNTSNQVAVLYQGVNCTEVPVAIHADQLTPTWRVYSTGSNVFQTRAGCLIGAEHVNNSYECDIPIGAGICASYQTQTNSPRRARSVASQSIIAYTMSLGAENSVVYSNNSIAIPTNFTISVTTEILPVSMTKTSVDCTMYICGDSTECSNLLLQYGSFCTQLNRALTGIAVEQDKNTQEVFAQVKQIYKTPPIKDFGGFNFSQILPDPSKPSKRSFIEDLLFNKVTLADAGFIKQYGDCLGDIAARDLICAQKFNGLTVLPPLLTDEMIAQYTSALLAGTITSGWTFGAGAALQIPFAMQMAYRFNGIGVTQNVLYENQKLIANQFNSAIGKIQDSLSSTASALGKLQDVVNQNAQALNTLVKQLSSNFGAISSVLNDILSRLDPPEAEVQIDRLITGRLQSLQTYVTQQLIRAAEIRASANLAATKMSECVLGQSKRVDFCGKGYHLMSFPQSAPHGVVFLHVTYVFAQEKNFTTAPAICHDGKAHFPREGVFVSNGTHWFVTQRNFYEPQIITTDNTFVSGNCDVVIGIVNNTVYDPLQPELDSGGGGSDIDPYKEFGSSYQLLNFLPLDFFPDLNALVDTATALYEEELTGREHCSPHHTAIRQALVCWDELTKLIAWMSSNITSEQVRTIIVNHVNDTWGLKVRQSLWFHLSCLTFGQHTVQEFLVSFGVWIRTPAPYRPPNAPILSTLPEHTVIC

SEQ ID NO: 10903 - protein, 1301 aa, Artificial Sequence
  SARS-CoV-2/France/HF2496/2020__EPI_ISL_418231 spike protein (1-1147)(K986P_V987P_P1069F) WhcAg construct
MFVFLVLLPLVSSQCVNLTTRTQLPPAYTNSFTRGVYYPDKVFRSSVLHSTQDLFLPFFSNVTWFHAIHVSGTNGTKRFDNPVLPFNDGVYFASTEKSNIIRGWIFGTTLDSKTQSLLIVNNATNVVIKVCEFQFCNDPFLGVYYHKNNKSWMESEFRVYSSANNCTFEYVSQPFLMDLEGKQGNFKNLREFVFKNIDGYFKIYSKHTPINLVRDLPQGFSALEPLVDLPIGINITRFQTLLALHRSYLTPGDSSSGWTAGAAAYYVGYLQPRTFLLKYNENGTITDAVDCALDPLSETKCTLKSFTVEKGIYQTSNFRVQPTESIVRFPNITNLCPFGEVFNATRFASVYAWNRKRISNCVADYSVLYNSASFSTFKCYGVSPTKLNDLCFTNVYADSFVIRGDEVRQIAPGQTGKIADYNYKLPDDFTGCVIAWNSNNLDSKVGGNYNYLYRLFRKSNLKPFERDISTEIYQAGSTPCNGVEGFNCYFPLQSYGFQPTNGVGYQPYRVVVLSFELLHAPATVCGPKKSTNLVKNKCVNFNFNGLTGTGVLTESNKKFLPFQQFGRDIADTTDAVRDPQTLEILDITPCSFGGVSVITPGTNTSNQVAVLYQGVNCTEVPVAIHADQLTPTWRVYSTGSNVFQTRAGCLIGAEHVNNSYECDIPIGAGICASYQTQTNSPRRARSVASQSIIAYTMSLGAENSVAYSNNSIAIPTNFTISVTTEILPVSMTKTSVDCTMYICGDSTECSNLLLQYGSFCTQLNRALTGIAVEQDKNTQEVFAQVKQIYKTPPIKDFGGFNFSQILPDPSKPSKRSFIEDLLFNKVTLADAGFIKQYGDCLGDIVARDLICAQKFNGLTVLPPLLTDEMIAQYTSALLAGTITSGWTFGAGAALQIPFAMQMAYRFNGIGVTQNVLYENQKLIANQFNSAIGKIQDSLSSTASALGKLQDVVNQNAQALNTLVKQLSSNFGAISSVLNDILSRLDPPEAEVQIDRLITGRLQSLQTYVTQQLIRAAEIRASANLAATKMSECVLGQSKRVDFCGKGYHLMSFPQSAPHGVVFLHVTYVFAQEKNFTTAPAICHDGKAHFPREGVFVSNGTHWFVTQRNFYEPQIITTDNTFVSGNCDVVIGIVNNTVYDPLQPELDSGGGGSDIDPYKEFGSSYQLLNFLPLDFFPDLNALVDTATALYEEELTGREHCSPHHTAIRQALVCWDELTKLIAWMSSNITSEQVRTIIVNHVNDTWGLKVRQSLWFHLSCLTFGQHTVQEFLVSFGVWIRTPAPYRPPNAPILSTLPEHTVIC

SEQ ID NO: 10904 - protein, 1301 aa, Artificial Sequence
  SARS-CoV-2/USA/WA-UW291/2020__EPI_ISL_418076 spike protein (1-1147)(K986P_V987P_P1069F) WhcAg construct
MFVFLVLLPLVSSQCVNLTTRTQLPPAYTNSFTRGVYYPDKVFRSSVLHSTQDLFLPFFSNVTWFHAIHVSGTNGTKRFDNPVLPFNDGVYFASTEKSNIIRGWIFGTTLDSKTQSLLIVNNATNVVIKVCEFQFCNDPFLGVYYHKNNKSWMESEFRVYSSANNCTFEYVSQPFLMDLEGKQGNFKNLREFVFKNIDGYFKIYSKHTPINLVRDLPQGFSALEPLVDLPIGINITRFQTLLALHRSYLTPGDSSSGWTAGAAAYYVGYLQPRTFLLKYNENGTITDAVDCALDPLSETKCTLKSFTVEKGIYQTSNFRVQPTESIVRFPNITNLCPFGEVFNATRFASVYAWNRKRISNCVADYSVLYNSASFSTFKCYGVSPTKLNDLCFTNVYADSFVIRGDEVRQIAPGQTGKIADYNYKLPDDFTGCVIAWNSNNLDSKVGGNYNYLYRLFRKSNLKPFERDISTEIYQAGSTPCNGVEGFNCYFPLQSYGFQPTNGVGYQPYRVVVLSFELLHAPATVCGPKKSTNLVKNKCVNFNFNGLTGTGVLTESNKKFLPFQQFGRDIADTTDAVRDPQTLEILDITPCSFGGVSVITPGTNTSNQVAVLYQGVNCTEVPVAIHADQLTPTWRVYSTGSNVFQTRAGCLIGAEHVNNSYECDIPIGAGICASYQTQTNSPRRARSVASQSIIAYTMSLGAENSVAYSNNSIAIPTNFTISVTTEILPVSMTKTSVDCTMYICGDSTECSNLLLQYGSFCTQLNRALTGIAVEQDKNTQEVFAQVKQIYKTPPIKDFGGFNFSQILPDPSKPSKRSFIEDLLFNKVTLADAGFIKQYGDCLGDIAARDLICAQKFNGLTVLPPLLTDEMIAQYTSALLAGTITSGWTFGAGAALQIPFAMQMAYRFNGIGVTQNVLYENQKLIANQFNSAIGKIQYSLSSTASALGKLQDVVNQNAQALNTLVKQLSSNFGAISSVLNDILSRLDPPEAEVQIDRLITGRLQSLQTYVTQQLIRAAEIRASANLAATKMSECVLGQSKRVDFCGKGYHLMSFPQSAPHGVVFLHVTYVFAQEKNFTTAPAICHDGKAHFPREGVFVSNGTHWFVTQRNFYEPQIITTDNTFVSGNCDVVIGIVNNTVYDPLQPELDSGGGGSDIDPYKEFGSSYQLLNFLPLDFFPDLNALVDTATALYEEELTGREHCSPHHTAIRQALVCWDELTKLIAWMSSNITSEQVRTIIVNHVNDTWGLKVRQSLWFHLSCLTFGQHTVQEFLVSFGVWIRTPAPYRPPNAPILSTLPEHTVIC

SEQ ID NO: 10905 - protein, 1301 aa, Artificial Sequence; identical to SEQ ID NO: 10868
  SARS-CoV-2/Portugal/PT0034/2020__EPI_ISL_418019 spike protein (1-1147)(K986P_V987P_P1069F) WhcAg construct

SEQ ID NO: 10906 - protein, 1301 aa, Artificial Sequence; identical to SEQ ID NO: 10860
  SARS-CoV-2/Iceland/202/2020__EPI_ISL_417750 spike protein (1-1147)(K986P_V987P_P1069F) WhcAg construct

SEQ ID NO: 10907 - protein, 1301 aa, Artificial Sequence
  SARS-CoV-2/USA/WA-UW261/2020__EPI_ISL_418046 spike protein (1-1147)(K986P_V987P_P1069F) WhcAg construct
MFVFLVLLPLVSSQCVNLTTRTQLPPAYTNSFTRGVYYPDKVFRSSVLHSTQDLFLPFFSNVTWFHAIHVSGTNGTKRFDNPVLPFNDGVYFASTEKSNIIRGWIFGTTLDSKTQSLLIVNNATNVVIKVCEFQFCNDPFLGVYYHKNNKSWMESEFRVYSSANNCTFEYVSQPFLMDLEGKQGNFKNLREFVFKNIDGYFKIYSKHTPINLVRDLPQGFSALEPLVDLPIGINITRFQTLLALHRSYLTPGDSSSGWTAGAAAYYVGYLQPRTFLLKYNENGTITDAVDCALDPLSETKCTLKSFTVEKGIYQTSNFRVQPTESIVRFPNITNLCPFGEVFNATRFTSVYAWNRKRISNCVADYSVLYNSASFSTFKCYGVSPTKLNDLCFTNVYADSFVIRGDEVRQIAPGQTGKIADYNYKLPDDFTGCVIAWNSNNLDSKVGGNYNYLYRLFRKSNLKPFERDISTEIYQAGSTPCNGVEGFNCYFPLQSYGFQPTNGVGYQPYRVVVLSFELLHAPATVCGPKKSTNLVKNKCVNFNFNGLTGTGVLTESNKKFLPFQQFGRDIADTTDAVRDPQTLEILDITPCSFGGVSVITPGTNTSNQVAVLYQDVNCTEVPVAIHADQLTPTWRVYSTGSNVFQTRAGCLIGAEHVNNSYECDIPIGAGICASYQTQTNSPRRARSVASQSIIAYTMSLGAENSVAYSNNSIAIPTNFTISVTTEILPVSMTKTSVDCTMYICGDSTECSNLLLQYGSFCTQLNRALTGIAVEQDKNTQEVFAQVKQIYKTPPIKDFGGFNFSQILPDPSKPSKRSFIEDLLFNKVTLADAGFIKQYGDCLGDIAARDLICAQKFNGLTVLPPLLTDEMIAQYTSALLAGTITSGWTFGAGAALQIPFAMQMAYRFNGIGVTQNVLYENQKLIANQFNSAIGKIQDSLSSTASALGKLQDVVNQNAQALNTLVKQLSSNFGAISSVLNDILSRLDPPEAEVQIDRLITGRLQSLQTYVTQQLIRAAEIRASANLAATKMSECVLGQSKRVDFCGKGYHLMSFPQSAPHGVVFLHVTYVFAQEKNFTTAPAICHDGKAHFPREGVFVSNGTHWFVTQRNFYEPQIITTDNTFVSGNCDVVIGIVNNTVYDPLQPELDSGGGGSDIDPYKEFGSSYQLLNFLPLDFFPDLNALVDTATALYEEELTGREHCSPHHTAIRQALVCWDELTKLIAWMSSNITSEQVRTIIVNHVNDTWGLKVRQSLWFHLSCLTFGQHTVQEFLVSFGVWIRTPAPYRPPNAPILSTLPEHTVIC

SEQ ID NO: 10908 - protein, 1301 aa, Artificial Sequence
  SARS-CoV-2/Portugal/PT0035/2020__EPI_ISL_418020 spike protein (1-1147)(K986P_V987P_P1069F) WhcAg construct
MFVFLVLLPLVSSQCVNLTTRTQLPPAYTNSFTRGVYYPDKVFRSSVLHSTQDLFLPFFSNVTWFHAIHVSGTNGTKRFDNPVLPFNDGVYFASTEKSNIIRGWIFGTTLDSKTQSLLIVNNATNVVIKVCEFQFCNDPFLGVYYHKNNKSWMESEFRVYSSANNCTFEYVSQPFLMDLEGKQGNFKNLREFVFKNIDGYFKIYSKHTPINLVRDLPQGFSALEPLVDLPIGINITRFQTLLALHRSYLTPGDSSSGWTAGAAAYYVGYLQPRTFLLKYNENGTITDAVDCALDPLSETKCTLKSFTVEKGIYQTSNFRVQPTESIVRFPNITNLCPFGEVFNATRFASVYAWNRKRISNCVADYSVLYNSASFSTFKCYGVSPTKLNDLCFTNVYADSFVIRGDEVRQIAPGQTGKIADYNYKLPDDFTGCVIAWNSNNLDSKVGGNYNYLYRLFRKSNLKPFERDISTEIYQAGSTPCNGVEGFNCYFPLQSYGFQPTNGVGYQPYRVVVLSFELLHAPATVCGPKKSTNLVKNKCVNFNFNGLTGTGVLTESNKKFLPFQQFGRDIADTTDAVRDPQTLEILDITPCSFGGVSVITPGTNTSNQVAVLYQDVNCTEVPVAIHADQLTPTWRVYSTGSNVFQTRAGCLIGAEHVNNSYECDIPIGAGICASYQTQTNSPRRARSVASQSIIAYTMSLGAENSVAYSNNSIAIPTNFTISVTTEILPVSMTKTSVDCTMYICGDSTECSNLLLQYGSFCTQLNRALTGIAVEQDKNTQEVFAQVKQIYKTPPIKDFGGFNFSQILPDPSKPSKRSFIEDLLFNKVTLADAGFIKQYGDCLGDISARDLICAQKFNGLTVLPPLLTDEMIAQYTSALLAGTITSGWTFGAGAALQIPFAMQMAYRFNGIGVTQNVLYENQKLIANQFNSAIGKIQDSLSSTASALGKLQDVVNQNAQALNTLVKQLSSNFGAISSVLNDILSRLDPPEAEVQIDRLITGRLQSLQTYVTQQLIRAAEIRASANLAATKMSECVLGQSKRVDFCGKGYHLMSFPQSAPHGVVFLHVTYVFAQEKNFTTAPAICHDGKAHFPREGVFVSNGTHWFVTQRNFYEPQIITTDNTFVSGNCDVVIGIVNNTVYDPLQPELDSGGGGSDIDPYKEFGSSYQLLNFLPLDFFPDLNALVDTATALYEEELTGREHCSPHHTAIRQALVCWDELTKLIAWMSSNITSEQVRTIIVNHVNDTWGLKVRQSLWFHLSCLTFGQHTVQEFLVSFGVWIRTPAPYRPPNAPILSTLPEHTVIC

SEQ ID NO: 10909 - protein, 1301 aa, Artificial Sequence
  SARS-CoV-2/USA/NY-NYUMC7/2020__EPI_ISL_418192 spike protein (1-1147)(K986P_V987P_P1069F) WhcAg construct
MFVFLVLLPLVSSQCVNLTTRTQLPPAYTNSFTRGVYYPDKVFRSSVLHSTQDLFLPFFSNVTWFHAIHVSGTNGTKRFDNPVLPFNDGVYFASTEKSNIIRGWIFGTTLDSKTQSLLIVNNATNVVIKVCEFQFCNDPFLGVYHHKNNKSWMESEFRVYSSANNCTFEYVSQPFLMDLEGKQGNFKNLREFVFKNIDGYFKIYSKHTPINLVRDLPQGFSALEPLVDLPIGINITRFQTLLALHRSYLTPGDSSSGWTAGAAAYYVGYLQPRTFLLKYNENGTITDAVDCALDPLSETKCTLKSFTVEKGIYQTSNFRVQPTESIVRFPNITNLCPFGEVFNATRFASVYAWNRKRISNCVADYSVLYNSASFSTFKCYGVSPTKLNDLCFTNVYADSFVIRGDEVRQIAPGQTGKIADYNYKLPDDFTGCVIAWNSNNLDSKVGGNYNYLYRLFRKSNLKPFERDISTEIYQAGSTPCNGVEGFNCYFPLQSYGFQPTNGVGYQPYRVVVLSFELLHAPATVCGPKKSTNLVKNKCVNFNFNGLTGTGVLTESNKKFLPFQQFGRDIADTTDAVRDPQTLEILDITPCSFGGVSVITPGTNTSNQVAVLYQGVNCTEVPVAIHADQLTPTWRVYSTGSNVFQTRAGCLIGAEHVNNSYECDIPIGAGICASYQTQTNSPRRARSVASQSIIAYTMSLGAENSVAYSNNSIAIPTNFTISVTTEILPVSMTKTSVDCTMYICGDSTECSNLLLQYGSFCTQLNRALTGIAVEQDKNTQEVFAQVKQIYKTPPIKDFGGFNFSQILPDPSKPSKRSFIEDLLFNKVTLADAGFIKQYGDCLGDIAARDLICAQKFNGLTVLPPLLTDEMIAQYTSALLAGTITSGWTFGAGAALQIPFAMQMAYRFNGIGVTQNVLYENQKLIANQFNSAIGKIQDSLSSTASALGKLQDVVNQNAQALNTLVKQLSSNFGAISSVLNDILSRLDPPEAEVQIDRLITGRLQSLQTYVTQQLIRAAEIRASANLAATKMSECVLGQSKRVDFCGKGYHLMSFPQSAPHGVVFLHVTYVFAQEKNFTTAPAICHDGKAHFPREGVFVSNGTHWFVTQRNFYEPQIITTDNTFVSGNCDVVIGIVNNTVYDPLQPELDSGGGGSDIDPYKEFGSSYQLLNFLPLDFFPDLNALVDTATALYEEELTGREHCSPHHTAIRQALVCWDELTKLIAWMSSNITSEQVRTIIVNHVNDTWGLKVRQSLWFHLSCLTFGQHTVQEFLVSFGVWIRTPAPYRPPNAPILSTLPEHTVIC

SEQ ID NO: 10910 - protein, 1301 aa, Artificial Sequence
  SARS-CoV-2/Iceland/189/2020__EPI_ISL_417709 spike protein (1-1147)(K986P_V987P_P1069F) WhcAg construct
MFVFLVLLPLVSSQCVNLTTRTQLPPAYTNSFTRGVYYPDKVFRSSVLHSTQDLFLPFFSNVTWFHAIHVSGTNGTKRFDNPVLPFNDGVYFASTEKSNIIRGWIFGTTLDSKTQSLLIVNNATNVVIKVCEFQFCNDPFLGVYYHKNNKSWMESEFRVYSSANNCTFEYVSQPFLMDLEGKQGNFKNLREFVFKNIDGYFKIYSKHTPINLVRDLPQGFSALEPLVDLPIGINITRFQTLLALHRSYLTPGDSSSGWTAGAAAYYVGYLQPRTFLLKYNENGTITDAVDCALDPLSETKCTLKSFTVEKGIYQTSNFRVQPTESIVRFPNITNLCPFGEVFNATRFASVYAWNRKRISNCVADYSVLYNSASFSTFKCYGVSPTKLNDLCFTNVYADSFVIRGDEVRQIAPGQTGKIADYNYKLPDDFTGCVIAWNSNNLDSKVGGNYNYLYRLFRKSNLKPFERDISTEIYQAGSTPCNGVEGFNCYFPLQSYGFQPTNGVGYQPYRVVVLSFELLHAPATVCGPKKSTNLVKNKCVNFNFNGLTGTGVLTESNKKFLPFQQFGRDIADTTDAVRDPQTLEILDITPCSFGGVSVITPGTNTSNQVAVLYQGVNCTEVPVAIHADQLTPTWRVYSTGSNVFQTRAGCLIGAEHVNNSYECDIPIGAGICASYQTQTNSPRRARSVASQSIIAYTMSLGAENSVAYSNNSIAIPTNFTISVTTEILPVSMTKTSVDCTMYICGDSTECSNLLLQYGSFCTQLNRALTGIAVEQDKNTQEVFAQVKQIYKTPPIKDFGGFNFSQILPDPSKPSKRSFIEDLLFNKVTLADAGFTKQYGDCLGDIAARDLICAQKFNGLTVLPPLLTDEMIAQYTSALLAGTITSGWTFGAGAALQIPFAMQMAYRFNGIGVTQNVLYENQKLIANQFNSAIGKIQDSLSSTASALGKLQDVVNQNAQALNTLVKQLSSNFGAISSVLNDILSRLDPPEAEVQIDRLITGRLQSLQTYVTQQLIRAAEIRASANLAATKMSECVLGQSKRVDFCGKGYHLMSFPQSAPHGVVFLHVTYVFAQEKNFTTAPAICHDGKAHFPREGVFVSNGTHWFVTQRNFYEPQIITTDNTFVSGNCDVVIGIVNNTVYDPLQPELDSGGGGSDIDPYKEFGSSYQLLNFLPLDFFPDLNALVDTATALYEEELTGREHCSPHHTAIRQALVCWDELTKLIAWMSSNITSEQVRTIIVNHVNDTWGLKVRQSLWFHLSCLTFGQHTVQEFLVSFGVWIRTPAPYRPPNAPILSTLPEHTVIC

SEQ ID NO: 10911 - protein, 1301 aa, Artificial Sequence
  SARS-CoV-2/Australia/NSW56/2020__EPI_ISL_417408 spike protein (1-1147)(K986P_V987P_P1069F) WhcAg construct
MFVFLVLLPLVSSQCVNLTTRTQLPPAYTNSFTRGVYYPDKVFRSSVLHSTQDLFLPFFSNVTWFHAIHVSGTNGTKRFDNPVLPFNDGVYFASTEKSNIIRGWIFGTTLDSKTQSLLIVNNATNVVIKVCEFQFCNDPFLGVYYHKNNKSWMESEFRVYSSANNCTFEYVSQPFLMDLEGKQGNFKNLREFVFKNIDGYFKIYSKHTPINLVRDLPQGFSALEPLVDLPIGINITRFQTLLALHRSYLTPGDSSSGWTAGAAAYYVGYLQPRTFLLKYNENGTITDAVDCALDPLSETKCTLKSFTVEKGIYQTSNFRVQPTESIVRFPNITNLCPFGEVFNATRFASVYAWNRKRISNCVADYSVLYNSASFSTFKCYGVSPTKLNDLCFTNVYADSFVIRGDEVRQIAPGQTGKIADYNYKLPDDFTGCVIAWNSNNLDSKVGGNYNYLYRLFRKSNLKPFERDISTEIYQAGSTPCNGVEGFNCYFPLQSYGFQPTNGVGYQPYRVVVLSFELLHAPATVCGPKKSTNLVKNKCVNFNFNGLTGTGVLTESNKKFLPFQQFGRDIADTTDAVRDPQTLEILDITPCSFGGVSVITPGTNTSNQVAVLYQDVNCTEVPVAIHADQLTPTWRVYSTGSNVFQTRAGCLIGAEHVNNSYECDIPIGAGICASYQTQTNSPRRARSVASQSIIAYTMSLGAENSVAYSNNSIAIPTNFTISVTTEILPVSMTKTSVDCTMYICGDSTECSNLLLQYGSFCTQLNRALTGIAVEQDKNTQEVFAQVKQIYKTPPIKDFGGFNFSQILPDSSKPSKRSFIEDLLFNKVTLADAGFIKQYGDCLGDIAARDLICAQKFNGLTVLPPLLTDEMIAQYTSALLAGTITSGWTFGAGAALQIPFAMQMAYRFNGIGVTQNVLYENQKLIANQFNSAIGKIQDSLSSTASALGKLQDVVNQNAQALNTLVKQLSSNFGAISSVLNDILSRLDPPEAEVQIDRLITGRLQSLQTYVTQQLIRAAEIRASANLAATKMSECVLGQSKRVDFCGKGYHLMSFPQSAPHGVVFLHVTYVFAQEKNFTTAPAICHDGKAHFPREGVFVSNGTHWFVTQRNFYEPQIITTDNTFVSGNCDVVIGIVNNTVYDPLQPELDSGGGGSDIDPYKEFGSSYQLLNFLPLDFFPDLNALVDTATALYEEELTGREHCSPHHTAIRQALVCWDELTKLIAWMSSNITSEQVRTIIVNHVNDTWGLKVRQSLWFHLSCLTFGQHTVQEFLVSFGVWIRTPAPYRPPNAPILSTLPEHTVIC

SEQ ID NO: 10912 - protein, 1301 aa, Artificial Sequence
  SARS-CoV-2/Iceland/280/2020__EPI_ISL_417608 spike protein (1-1147)(K986P_V987P_P1069F) WhcAg construct
MFVFLVLLPLVSSQCVNLTTRTQLPPAYTNSFTRGVYYPDKVFRSSVLHSTQDLFLPFFSNVTWFHAIHVSGTNGTKRFDNPVLPFNDGVYFASTEKSNIIRGWIFGTTLDSKTQSLLIVNNATNVVIKVCEFQFCNDPFLGVYYHKNNKSWMESEFRVYSSANNCTFEYVSQPFLMDLEGKQGNFKNLREFVFKNIDGYFKIYSKHTPINLVRDLPQGFSALEPLVDLPIGINITRFQTLLALHRSYLTPGDSSSGWTAGAAAYYVGYLQPRTFLLKYNENGTITDAVDCALDPLSETKCTLKSFTVEKGIYQTSNFRVQPTESIVRFPNITNLCPFGEVFNATRFASVYAWNRKRISNCVADYSVLYNSASFSTFKCYGVSPTKLNDLCFTNVYADSFVIRGDEVRQIAPGQTGKIADYNYKLPDDFTGCVIAWNSNNLDSKVGGNYNYLYRLFRKSNLKPFERDISTEIYQAGSTPCNGVEGFNCYFPLQSYGFQPTNGVGYQPYRVVVLSFELLHAPATVCGPKKSTNLVKNKCVNFNFNGLTGTGVLTESNKKFLPFQQFGRDIADTTDAVRDPQTLEILDITPCSFGGVSVITPGTNTSNQVAVLYQGVNCTEVPVAIHADQLTPTWRVYSTGSNVFQTRAGCLIGAEHVNNSYECDIPIGAGICASYHTQTNSPRRARSVASQSIIAYTMSLGAENSVAYSNNSIAIPTNFTISVTTEILPVSMTKTSVDCTMYICGDSTECSNLLLQYGSFCTQLNRALTGIAVEQDKNTQEVFAQVKQIYKTPPIKDFGGFNFSQILPDPSKPSKRSFIEDLLFNKVTLADAGFIKQYGDCLGDIAARDLICAQKFNGLTVLPPLLTDEMIAQYTSALLAGTITSGWTFGAGAALQIPFAMQMAYRFNGIGVTQNVLYENQKLIANQFNSAIGKIQDSLSSTASALGKLQDVVNQNAQALNTLVKQLSSNFGAISSVLNDILSRLDPPEAEVQIDRLITGRLQSLQTYVTQQLIRAAEIRASANLAATKMSECVLGQSKRVDFCGKGYHLMSFPQSAPHGVVFLHVTYVFAQEKNFTTAPAICHDGKAHFPREGVFVSNGTHWFVTQRNFYEPQIITTDNTFVSGNCDVVIGIVNNTVYDPLQPELDSGGGGSDIDPYKEFGSSYQLLNFLPLDFFPDLNALVDTATALYEEELTGREHCSPHHTAIRQALVCWDELTKLIAWMSSNITSEQVRTIIVNHVNDTWGLKVRQSLWFHLSCLTFGQHTVQEFLVSFGVWIRTPAPYRPPNAPILSTLPEHTVIC

SEQ ID NO: 10913 - protein, 1301 aa, Artificial Sequence; identical to SEQ ID NO: 10868
  SARS-CoV-2/Iceland/247/2020__EPI_ISL_417575 spike protein (1-1147)(K986P_V987P_P1069F) WhcAg construct

SEQ ID NO: 10914 - protein, 1301 aa, Artificial Sequence
  SARS-CoV-2/Iceland/238/2020__EPI_ISL_417566 spike protein (1-1147)(K986P_V987P_P1069F) WhcAg construct
MFVFLVLLPLVSSQCVNLTTRTQLPPAYTNSFTRGVYYPDKVFRSSVLHSTQDLFLPFFSNVTWFHAIHVSGTNGTKRFDNPVLPFNDGVYFASTEKSNIIRGWIFGTTLDSKTQSLLIVNNATNVVIKVCEFQFCNDPFLGVYYHKNNKSWMESEFRVYSSANNCTFEYVSQPFLMDLEGKQGNFKNLREFVFKNIDGYFKIYSKHTPINLVRDLPQGFSALEPLVDLPIGINITRFQTLLALHRSYLTPGDSSSGWTAGAAAYYVGYLQPRTFLLKYNENGTITDAVDCALDPLSETKCTLKSFTVEKGIYQTSNFRVQPTESIVRFPNITNLCPFGEVFNATRFASVYAWNRKRISNCVADYSVLYNSASFSTFKCYGVSPTKLNDLCFTNVYADSFVIRGDEVRQIAPGQTGKIADYNYKLPDDFTGCVIAWNSNNLDSKVGGNYNYLYRLFRKSNLKPFERDISTEIYQAGSTPCNGVEGFNCYFPLQSYGFQPTNGVGYQPYRVVVLSFELLHAPATVCGPKKSTNLVKNKCVNFNFNGLTGTGVLTESNKKFLPFQQFGRDIADTTDAVRDPQTLEILDITPCSFGGVSVITPGTNTSNQVAVLYQGVNCTEVPVAIHADQLTPTWRVYSTGSNVFQTRAGCLIGAEHVNNSYECDIPIGAGICASYQTQTNSPRRARSVASQSIIAYTMSLGAENSVAYSNNSIAIPTNFTISVTTEILPVSMTKTSVDCTMYICGDSTECSNLLLQYGSFCTQLNRALTGIAVEQDKNTQEVFAQVKQIYKTPPIKDFGGFNFSQILPDPSKPSKRSFIEDLLFNKVTLADVGFIKQYGDCLGDIAARDLICAQKFNGLTVLPPLLTDEMIAQYTSALLAGTITSGWTFGAGAALQIPFAMQMAYRFNGIGVTQNVLYENQKLIANQFNSAIGKIQDSLSSTASALGKLQDVVNQNAQALNTLVKQLSSNFGAISSVLNDILSRLDPPEAEVQIDRLITGRLQSLQTYVTQQLIRAAEIRASANLAATKMSECVLGQSKRVDFCGKGYHLMSFPQSAPHGVVFLHVTYVFAQEKNFTTAPAICHDGKAHFPREGVFVSNGTHWFVTQRNFYEPQIITTDNTFVSGNCDVVIGIVNNTVYDPLQPELDSGGGGSDIDPYKEFGSSYQLLNFLPLDFFPDLNALVDTATALYEEELTGREHCSPHHTAIRQALVCWDELTKLIAWMSSNITSEQVRTIIVNHVNDTWGLKVRQSLWFHLSCLTFGQHTVQEFLVSFGVWIRTPAPYRPPNAPILSTLPEHTVIC

SEQ ID NO: 10915 - protein, 1301 aa, Artificial Sequence
  SARS-CoV-2/Greece/16/2020__EPI_ISL_418265 spike protein (1-1147)(K986P_V987P_P1069F) WhcAg construct
MFVFLVLLPLVSSQCVNLTTRTQLPPAYTNSFTRGVYYPDKVFRSSVLHSTQDLFLPFFSNVTWFHAIHVSGTNGTKRFDNPVLPFNDGVYFASTEKSNIIRGWIFGTTLDSKTQSLLIVNNATNVVIKVCEFQFCNDPFLGVYYHKNNKSWMESEFRVYSSANNCTFEYVSQPFLMDLEGKQGNFKNLREFVFKNVDGYFKIYSKHTPINLVRDLPQGFSALEPLVDLPIGINITRFQTLLALHRSYLTPGDSSSGWTAGAAAYYVGYLQPRTFLLKYNENGTITDAVDCALDPLSETKCTLKSFTVEKGIYQTSNFRVQPTESIVRFPNITNLCPFGEVFNATRFASVYAWNRKRISNCVADYSVLYNSASFSTFKCYGVSPTKLNDLCFTNVYADSFVIRGDEVRQIAPGQTGKIADYNYKLPDDFTGCVIAWNSNNLDSKVGGNYNYLYRLFRKSNLKPFERDISTEIYQAGSTPCNGVEGFNCYFPLQSYGFQPTNGVGYQPYRVVVLSFELLHAPATVCGPKKSTNLVKNKCVNFNFNGLTGTGVLTESNKKFLPFQQFGRDIADTTDAVRDPQTLEILDITPCSFGGVSVITPGTNTSNQVAVLYQDVNCTEVPVAIHADQLTPTWRVYSTGSNVFQTRAGCLIGAEHVNNSYECDIPIGAGICASYQTQTNSPRRARSVASQSIIAYTMSLGAENSVAYSNNSIAIPTNFTISVTTEILPVSMTKTSVDCTMYICGDSTECSNLLLQYGSFCTQLNRALTGIAVEQDKNTQEVFAQVKQIYKTPPIKDFGGFNFSQILPDPSKPSKRSFIEDLLFNKVTLADAGFIKQYGDCLGDIAARDLICAQKFNGLTVLPPLLTDEMIAQYTSALLAGTITSGWTFGAGAALQIPFAMQMAYRFNGIGVTQNVLYENQKLIANQFNSAIGKIQDSLSSTASALGKLQDVVNQNAQALNTLVKQLSSNFGAISSVLNDILSRLDPPEAEVQIDRLITGRLQSLQTYVTQQLIRAAEIRASANLAATKMSECVLGQSKRVDFCGKGYHLMSFPQSAPHGVVFLHVTYVFAQEKNFTTAPAICHDGKAHFPREGVFVSNGTHWFVTQRNFYEPQIITTDNTFVSGNCDVVIGIVNNTVYDPLQPELDSGGGGSDIDPYKEFGSSYQLLNFLPLDFFPDLNALVDTATALYEEELTGREHCSPHHTAIRQALVCWDELTKLIAWMSSNITSEQVRTIIVNHVNDTWGLKVRQSLWFHLSCLTFGQHTVQEFLVSFGVWIRTPAPYRPPNAPILSTLPEHTVIC

SEQ ID NO: 10916 - protein, 1301 aa, Artificial Sequence
  SARS-CoV-2/Iceland/319/2020__EPI_ISL_417648 spike protein (1-1147)(K986P_V987P_P1069F) WhcAg construct
MFVFLVLLPLVSSQCVNLTTRTQLPPAYTNSFTRGVYYPDKVFRSSVLHSTQDLFLPFFSNVTWFHAIHVSGTNGTKRFDNPVLPFNDGVYFASTEKSNIIRGWIFGTTLDSKTQSLLIVNNATNVVIKVCEFQFCNDPFLGVYYHKNNKSWMESEFRVYSSANNCTFEYVSQPFLIDLEGKQGNFKNLREFVFKNIDGYFKIYSKHTPINLVRDLPQGFSALEPLVDLPIGINITRFQTLLALHRSYLTPGDSSSGWTAGAAAYYVGYLQPRTFLLKYNENGTITDAVDCALDPLSETKCTLKSFTVEKGIYQTSNFRVQPTESIVRFPNITNLCPFGEVFNATRFASVYAWNRKRISNCVADYSVLYNSASFSTFKCYGVSPTKLNDLCFTNVYADSFVIRGDEVRQIAPGQTGKIADYNYKLPDDFTGCVIAWNSNNLDSKVGGNYNYLYRLFRKSNLKPFERDISTEIYQAGSTPCNGVEGFNCYFPLQSYGFQPTNGVGYQPYRVVVLSFELLHAPATVCGPKKSTNLVKNKCVNFNFNGLTGTGVLTESNKKFLPFQQFGRDIADTTDAVRDPQTLEILDITPCSFGGVSVITPGTNTSNQVAVLYQGVNCTEVPVAIHADQLTPTWRVYSTGSNVFQTRAGCLIGAEHVNNSYECDIPIGAGICASYQTQTNSPRRARSVASQSIIAYTMSLGAENSVAYSNNSIAIPTNFTISVTTEILPVSMTKTSVDCTMYICGDSTECSNLLLQYGSFCTQLNRALTGIAVEQDKNTQEVFAQVKQIYKTPPIKDFGGFNFSQILPDPSKPSKRSFIEDLLFNKVTLADAGFIKQYGDCLGDIAARDLICAQKFNGLTVLPPLLTDEMIAQYTSALLAGTITSGWTFGAGAALQIPFAMQMAYRFNGIGVTQNVLYENQKLIANQFNSAIGKIQDSLSSTASALGKLQDVVNQNAQALNTLVKQLSSNFGAISSVLNDILSRLDPPEAEVQIDRLITGRLQSLQTYVTQQLIRAAEIRASANLAATKMSECVLGQSKRVDFCGKGYHLMSFPQSAPHGVVFLHVTYVFAQEKNFTTAPAICHDGKAHFPREGVFVSNGTHWFVTQRNFYEPQIITTDNTFVSGNCDVVIGIVNNTVYDPLQPELDSGGGGSDIDPYKEFGSSYQLLNFLPLDFFPDLNALVDTATALYEEELTGREHCSPHHTAIRQALVCWDELTKLIAWMSSNITSEQVRTIIVNHVNDTWGLKVRQSLWFHLSCLTFGQHTVQEFLVSFGVWIRTPAPYRPPNAPILSTLPEHTVIC

SEQ ID NO: 10917 - protein, 1301 aa, Artificial Sequence
  SARS-CoV-2/Congo/94/2020__EPI_ISL_417947 spike protein (1-1147)(K986P_V987P_P1069F) WhcAg construct
MFVFLVLLPLVSSQCVNLTTRTQLPPAYTNSFTRGVYYPDKVFRSSVLHSTQDLFLPFFSNVTWFHAIHVSGTNGTKRFDNPVLPFNDGVYFASTEKSNIIRGWIFGTTLDSKTQSLLIVNNATNVVIKVCEFQFCNDPFLGVYYHKNNKSWMESEFRVYSSANNCTFEYVSQPFLMDLEGKQGNFKNLREFVFKNIDGYFKIYSKHTPINLVRDLPQGFSALEPLVDLPIGINITRFQTLLALHRSYLTPGDSSSGWTAGAAAYYVGYLQPRTFLLKYNENGTITDAVDCALDPLSETKCTLKSFTVEKGIYQTSNFRVQPTESIVRFPNITNLCPFGEVFNATRFASVYAWNRKRISNCVADYSVLYNSASFSTFKCYGVSPTKLNDLCFTNVYADSFVIRGDEVRQIAPGQTGKIADYNYKLPDDFTGCVIAWNSNNLDSKVGGNYNYLYRLFRKSNLKPFERDISTEIYQAGSTPCNGVEGFNCYFPLQSYGFQPTNGVGYQPYRVVVLSFELLHAPATVCGPKKSTNLVKNKCVNFNFNGLTGTGVLTESNKKFLPFQQFGRDIADTTDAVRDPQTLEILDITPCSFGGVSVITPGTNTSNQVAVLYQGVNCTEVPVAIHADQLTPTWRVYSTGSNVFQTRAGCLIGAEHVNNSYECDIPIGAGICASYQTQTNSPRRARSVASQSIIAYTMSLGAENSVAYSNNSIAIPTNFTISVTTEILPVSMTKTSVDCTMYICGDSTECSNLLLQYGSFCTQLNRALTGIAVEQDKNTQEVFAQVKQIYKTPPIKDFGGFNFSQILPDPSKPSKRSFIEDILFNKVTLADAGFIKQYGDCLGDIAARDLICAQKFNGLTVLPPLLTDEMIAQYTSALLAGTITSGWTFGAGAALQIPFAMQMAYRFNGIGVTQNVLYENQKLIANQFNSAIGKIQDSLSSTASALGKLQDVVNQNAQALNTLVKQLSSNFGAISSVLNDILSRLDPPEAEVQIDRLITGRLQSLQTYVTQQLIRAAEIRASANLAATKMSECVLGQSKRVDFCGKGYHLMSFPQSAPHGVVFLHVTYVFAQEKNFTTAPAICHDGKAHFPREGVFVSNGTHWFVTQRNFYEPQIITTDNTFVSGNCDVVIGIVNNTVYDPLQPELDSGGGGSDIDPYKEFGSSYQLLNFLPLDFFPDLNALVDTATALYEEELTGREHCSPHHTAIRQALVCWDELTKLIAWMSSNITSEQVRTIIVNHVNDTWGLKVRQSLWFHLSCLTFGQHTVQEFLVSFGVWIRTPAPYRPPNAPILSTLPEHTVIC

SEQ ID NO: 10918 - protein, 1301 aa, Artificial Sequence
  SARS-CoV-2/Congo/158/2020__EPI_ISL_417950 spike protein (1-1147)(K986P_V987P_P1069F) WhcAg construct
MFVFLVLLPLVSSQCVNLTTRTQLPPAYTNSFTRGVYYPDKVFRSSVLHSTQDLFLPFFSNVTWFHAIHVSGTNGTKRFDNPVLPFNDGVYFASTEKSNIIRGWIFGTTLDSKTQSLLIVNNATNVVIKVCEFQFCNDPFLGVYYHKNNKSWMESEFRVYSSANNCTFEYVSQPFLMDLEGKQGNFKNLREFVFKNIDGYFKIYSKHTPINLVRDLPQGFSALEPLVDLPIGINITRFQTLLALHRSYLTPGDSSSGWTAGAAAYYVGYLQPRTFLLKYNENGTITDAVDCALDPLSETKCTLKSFTVEKGIYQTSNFRVQPTESIVRFPNITNLCPFGEVFNATRFASVYAWNRKRISNCVADYSVLYNSASFSTFKCYGVSPTKLNDLCFTNVYADSFVIRGDEVRQIAPGQTGKIADYNYKLPDDFTGCVIAWNSNNLDSKVGGNYNYLYRLFRKSNLKPFERDISTEIYQAGSTPCNGVEGFNCYFPLQSYGFQPTNGVGYQPYRVVVLSFELLHAPATVCGPKKSTNLVKNKCVNFNFNGLTGTGVLTESNKKFLPFQQFGRDIADTTDAVRDPQTLEILDITPCSFGGVSVITPGTNTSNQVAVLYQDVNCTEVPVAIHADQLTPTWRVYSTGSNVFQTRAGCLIGAEHVNNSYECDIPIGAGICASYQTQTNSPRRARSVASQSIIAYTMSLGAENSVAYSNNSIAIPTNFTISVTTEILPVSMTKTSVDCTMYICGDSTECSNLLLQYGSFCTQLNRALTGIAVEQDKNTQEVFAQVKQIYKTPPIKDFGGFNFSQILPDPSKPSKRSFIEDLLFNKVTLADAGFIKQYGDCLGDIAARDLICAQKFNGLTVLPPLLTDEMIAQYTSALLAGTITSGWTFGAGAALQIPFAMQMAYRFNGIGVTQNVLYENQKLIANQFNSAIGKIQDSLSSTASALGKLQDVVNQNAQALNTLVKQLSSNFGAISSVLNDILSRLDPPEAEVQIDRLITGRLQSLQTYVTQQLIRAAEIRASANLAATKMSECVLGQSKRVDFCGKGYHLMSFPQSAPHGVVFLHVTYVFAQEKNFTTAPAICHDGKAHFPREGVFVSNGTHWFVTQRNFYEPQIITTDNTFLSGNCDVVIGIVNNTVYDPLQPELDSGGGGSDIDPYKEFGSSYQLLNFLPLDFFPDLNALVDTATALYEEELTGREHCSPHHTAIRQALVCWDELTKLIAWMSSNITSEQVRTIIVNHVNDTWGLKVRQSLWFHLSCLTFGQHTVQEFLVSFGVWIRTPAPYRPPNAPILSTLPEHTVIC

SEQ ID NO: 10919 - protein, 1301 aa, Artificial Sequence
  SARS-CoV-2/USA/UT-00034/2020__EPI_ISL_417977 spike protein (1-1147)(K986P_V987P_P1069F) WhcAg construct
MFVFLVLLPLVSSQCVNLTTRTQLPPAYTNSFTRGVYYPDKVFRSSVLHSTQDLFLPFFSNVTWFHAIHVSGTNGTKRFDNPVLPFNDGVYFASTEKSNIIRGWIFGTTLDSKTQSLLIVNNATNVVIKVCEFQFCNDPFLGVYYYKNNKSWMESEFRVYSSANNCTFEYVSQPFLMDLEGKQGNFKNLREFVFKNIDGYFKIYSKHTPINLVRDLPQGFSALEPLVDLPIGINITRFQTLLALHRSYLTPGDSSSGWTAGAAAYYVGYLQPRTFLLKYNENGTITDAVDCALDPLSETKCTLKSFTVEKGIYQTSNFRVQPTESIVRFPNITNLCPFGEVFNATRFASVYAWNRKRISNCVADYSVLYNSASFSTFKCYGVSPTKLNDLCFTNVYADSFVIRGDEVRQIAPGQTGKIADYNYKLPDDFTGCVIAWNSNNLDSKVGGNYNYLYRLFRKSNLKPFERDISTEIYQAGSTPCNGVEGFNCYFPLQSYGFQPTNGVGYQPYRVVVLSFELLHAPATVCGPKKSTNLVKNKCVNFNFNGLTGTGVLTESNKKFLPFQQFGRDIADTTDAVRDPQTLEILDITPCSFGGVSVITPGTNTSNQVAVLYQGVNCTEVPVAIHADQLTPTWRVYSTGSNVFQTRAGCLIGAEHVNNSYECDIPIGAGICASYQTQTNSPRRARSVASQSIIAYTMSLGAENSVAYSNNSIAIPTNFTISVTTEILPVSMTKTSVDCTMYICGDSTECSNLLLQYGSFCTQLNRALTGIAVEQDKNTQEVFAQVKQIYKTPPIKDFGGFNFSQILPDPSKPSKRSFIEDLLFNKVTLADAGFIKQYGDCLGDIAARDLICAQKFNGLTVLPPLLTDEMIAQYTSALLAGTITSGWTFGAGAALQIPFAMQMAYRFNGIGVTQNVLYENQKLIANQFNSAIGKIQDSLSSTASALGKLQDVVNQNAQALNTLVKQLSSNFGAISSVLNDILSRLDPPEAEVQIDRLITGRLQSLQTYVTQQLIRAAEIRASANLAATKMSECVLGQSKRVDFCGKGYHLMSFPQSAPHGVVFLHVTYVFAQEKNFTTAPAICHDGKAHFPREGVFVSNGTHWFVTQRNFYEPQIITTDNTFVSGNCDVVIGIVNNTVYDPLQPELDSGGGGSDIDPYKEFGSSYQLLNFLPLDFFPDLNALVDTATALYEEELTGREHCSPHHTAIRQALVCWDELTKLIAWMSSNITSEQVRTIIVNHVNDTWGLKVRQSLWFHLSCLTFGQHTVQEFLVSFGVWIRTPAPYRPPNAPILSTLPEHTVIC

SEQ ID NO: 10920 - protein, 1301 aa, Artificial Sequence
  SARS-CoV-2/USA/UT-00033/2020__EPI_ISL_417976 spike protein (1-1147)(K986P_V987P_P1069F) WhcAg construct
MFVFLVLLPLVSSQCVNLTTRTQLPPAYTNSFTRGVYYPDKVFRSSVLHSTQDLFLPFFSNVTWFHAIHVSGTNGTKRFDNPVLPFNDGVYFASTEKSNIIRGWIFGTTLDSKTQSLLIVNNATNVVIKVCEFQFCNDPFLGVYYHKNNKSWMESEFRVYSSANNCTFEYVSQPFLMDLEGKQGNFKNLREFVFKNIDGYFKIYSKHTPINLVRDLPQGFSALEPLVDLPIGINITRFQTLLALHRSYLTPGDSSSGLTAGAAAYYVGYLQPRTFLLKYNENGTITDAVDCALDPLSETKCTLKSFTVEKGIYQTSNFRVQPTESIVRFPNITNLCPFGEVFNATRFASVYAWNRKRISNCVADYSVLYNSASFSTFKCYGVSPTKLNDLCFTNVYADSFVIRGDEVRQIAPGQTGKIADYNYKLPDDFTGCVIAWNSNNLDSKVGGNYNYLYRLFRKSNLKPFERDISTEIYQAGSTPCNGVEGFNCYFPLQSYGFQPTNGVGYQPYRVVVLSFELLHAPATVCGPKKSTNLVKNKCVNFNFNGLTGTGVLTESNKKFLPFQQFGRDIADTTDAVRDPQTLEILDITPCSFGGVSVITPGTNTSNQVAVLYQGVNCTEVPVAIHADQLTPTWRVYSTGSNVFQTRAGCLIGAEHVNNSYECDIPIGAGICASYQTQTNSPRRARSVASQSIIAYTMSLGAENSVAYSNNSIAIPTNFTISVTTEILPVSMTKTSVDCTMYICGDSTECSNLLLQYGSFCTQLNRALTGIAVEQDKNTQEVFAQVKQIYKTPPIKDFGGFNFSQILPDPSKPSKRSFIEDLLFNKVTLADAGFIKQYGDCLGDIAARDLICAQKFNGLTVLPPLLTDEMIAQYTSALLAGTITSGWTFGAGAALQIPFAMQMAYRFNGIGVTQNVLYENQKLIANQFNSAIGKIQDSLSSTASALGKLQDVVNQNAQALNTLVKQLSSNFGAISSVLNDILSRLDPPEAEVQIDRLITGRLQSLQTYVTQQLIRAAEIRASANLAATKMSECVLGQSKRVDFCGKGYHLMSFPQSAPHGVVFLHVTYVFAQEKNFTTAPAICHDGKAHFPREGVFVSNGTHWFVTQRNFYEPQIITTDNTFVSGNCDVVIGIVNNTVYDPLQPELDSGGGGSDIDPYKEFGSSYQLLNFLPLDFFPDLNALVDTATALYEEELTGREHCSPHHTAIRQALVCWDELTKLIAWMSSNITSEQVRTIIVNHVNDTWGLKVRQSLWFHLSCLTFGQHTVQEFLVSFGVWIRTPAPYRPPNAPILSTLPEHTVIC

SEQ ID NO: 10921 - protein, 1301 aa, Artificial Sequence
  SARS-CoV-2/USA/WI-13/2020__EPI_ISL_417516 spike protein (1-1147)(K986P_V987P_P1069F) WhcAg construct
MFVFLVLLPLVSSQCVNLTTRTQLPPAYTNSFTRGVYYPDKVFRSSVLHSTQDLFLPFFSNVTWFHAIHVSGTNGTKRFDNPVLPFNDGVYFASTEKSNIIRGWIFGTTLDSKTQSLLIVNNATNVVIKVCEFQFCNDPFLGVYYHKNNKSWMESEFRVYSSANNCTFEYVSQPFLMDLEGKQGNFKNLREFVFKNIDGYFKIYSKHTPINLVRDLPQGFSALEPLVDLPIGINITRFQTLLALHRSYLTPGDSSSGWTAGAAAYYVGYLQPRTFLLKYNENGTITDAVDCALDPLSETKCTLKSFTVEKGIYQTSNFRVLPTESIVRFPNITNLCPFGEVFNATRFASVYAWNRKRISNCVADYSVLYNSASFSTFKCYGVSPTKLNDLCFTNVYADSFVIRGDEVRQIAPGQTGKIADYNYKLPDDFTGCVIAWNSNNLDSKVGGNYNYLYRLFRKSNLKPFERDISTEIYQAGSTPCNGVEGFNCYFPLQSYGFQPTNGVGYQPYRVVVLSFELLHAPATVCGPKKSTNLVKNKCVNFNFNGLTGTGVLTESNKKFLPFQQFGRDIADTTDAVRDPQTLEILDITPCSFGGVSVITPGTNTSNQVAVLYQGVNCTEVPVAIHADQLTPTWRVYSTGSNVFQTRAGCLIGAEHVNNSYECDIPIGAGICASYQTQTNSPRRARSVASQSIIAYTMSLGAENSVAYSNNSIAIPTNFTISVTTEILPVSMTKTSVDCTMYICGDSTECSNLLLQYGSFCTQLNRALTGIAVEQDKNTQEVFAQVKQIYKTPPIKDFGGFNFSQILPDPSKPSKRSFIEDLLFNKVTLADAGFIKQYGDCLGDIAARDLICAQKFNGLTVLPPLLTDEMIAQYTSALLAGTITSGWTFGAGAALQIPFAMQMAYRFNGIGVTQNVLYENQKLIANQFNSAIGKIQDSLSSTASALGKLQDVVNQNAQALNTLVKQLSSNFGAISSVLNDILSRLDPPEAEVQIDRLITGRLQSLQTYVTQQLIRAAEIRASANLAATKMSECVLGQSKRVDFCGKGYHLMSFPQSAPHGVVFLHVTYVFAQEKNFTTAPAICHDGKAHFPREGVFVSNGTHWFVTQRNFYEPQIITTDNTFVSGNCDVVIGIVNNTVYDPLQPELDSGGGGSDIDPYKEFGSSYQLLNFLPLDFFPDLNALVDTATALYEEELTGREHCSPHHTAIRQALVCWDELTKLIAWMSSNITSEQVRTIIVNHVNDTWGLKVRQSLWFHLSCLTFGQHTVQEFLVSFGVWIRTPAPYRPPNAPILSTLPEHTVIC

SEQ ID NO: 10922 - protein, 1300 aa, Artificial Sequence
  SARS-CoV-2/India/1-27/2020__EPI_ISL_413522 spike protein (1-1146)(K985P_V986P_P1068F) WhcAg construct
MFVFLVLLPLVSSQCVNLTTRTQLPPAYTNSFTRGVYYPDKVFRSSVLHSTQDLFLPFFSNVTWFHAIHVSGTNGTKRFDNPVLPFNDGVYFASTEKSNIIRGWIFGTTLDSKTQSLLIVNNATNVVIKVCEFQFCNDPFLGVYHKNNKSWMESEFRVYSSANNCTFEYVSQPFLMDLEGKQGNFKNLREFVFKNIDGYFKIYSKHTPINLVRDLPQGFSALEPLVDLPIGINITRFQTLLALHRSYLTPGDSSSGWTAGAAAYYVGYLQPRTFLLKYNENGTITDAVDCALDPLSETKCTLKSFTVEKGIYQTSNFRVQPTESIVRFPNITNLCPFGEVFNATRFASVYAWNRKRISNCVADYSVLYNSASFSTFKCYGVSPTKLNDLCFTNVYADSFVIRGDEVIQIAPGQTGKIADYNYKLPDDFTGCVIAWNSNNLDSKVGGNYNYLYRLFRKSNLKPFERDISTEIYQAGSTPCNGVEGFNCYFPLQSYGFQPTNGVGYQPYRVVVLSFELLHAPATVCGPKKSTNLVKNKCVNFNFNGLTGTGVLTESNKKFLPFQQFGRDIADTTDAVRDPQTLEILDITPCSFGGVSVITPGTNTSNQVAVLYQDVNCTEVPVAIHADQLTPTWRVYSTGSNVFQTRAGCLIGAEHVNNSYECDIPIGAGICASYQTQTNSPRRARSVASQSIIAYTMSLGAENSVAYSNNSIAIPTNFTISVTTEILPVSMTKTSVDCTMYICGDSTECSNLLLQYGSFCTQLNRALTGIAVEQDKNTQEVFAQVKQIYKTPPIKDFGGFNFSQILPDPSKPSKRSFIEDLLFNKVTLADAGFIKQYGDCLGDIAARDLICAQKFNGLTVLPPLLTDEMIAQYTSALLAGTITSGWTFGAGAALQIPFAMQMAYRFNGIGVTQNVLYENQKLIANQFNSAIGKIQDSLSSTASALGKLQDVVNQNAQALNTLVKQLSSNFGAISSVLNDILSRLDPPEAEVQIDRLITGRLQSLQTYVTQQLIRAAEIRASANLAATKMSECVLGQSKRVDFCGKGYHLMSFPQSAPHGVVFLHVTYVFAQEKNFTTAPAICHDGKAHFPREGVFVSNGTHWFVTQRNFYEPQIITTDNTFVSGNCDVVIGIVNNTVYDPLQPELDSGGGGSDIDPYKEFGSSYQLLNFLPLDFFPDLNALVDTATALYEEELTGREHCSPHHTAIRQALVCWDELTKLIAWMSSNITSEQVRTIIVNHVNDTWGLKVRQSLWFHLSCLTFGQHTVQEFLVSFGVWIRTPAPYRPPNAPILSTLPEHTVIC

SEQ ID NO: 10923 - protein, 1295 aa, Artificial Sequence
  SARS-CoV-2/pangolin/Guangxi/P4L/2017__EPI_ISL_410538 spike protein (1-1141)(K980P_V981P_P1063F) WhcAg construct
MFVFLFVLPLVSSQCVNLTTRTGIPPGYTNSSTRGVYYPDKVFRSSILHLTQDLFLPFFSNVTWFNTINYQGGFKKFDNPVLPFNDGVYFASTEKSNIIRGWIFGTTLDARTQSLLIVNNATNVVIKVCEFQFCTDPFLGVYYHNNNKTWVENEFRVYSSANNCTFEYISQPFLMDLEGKQGNFKNLREFVFKNVDGYFKIYSKHTPIDLVRDLPRGFAALEPLVDLPIGINITRFQTLLALHRSYLTPGNLESGWTTGAAAYYVGYLQQRTFLLSYNQNGTITDAVDCSLDPLSETKCTLKSLTVEKGIYQTSNFRVQPTISIVRFPNITNLCPFGEVFNASKFASVYAWNRKRISNCVADYSVLYNSTSFSTFKCYGVSPTKLNDLCFTNVYADSFVVKGDEVRQIAPGQTGVIADYNYKLPDDFTGCVIAWNSVKQDALTGGNYGYLYRLFRKSKLKPFERDISTEIYQAGSTPCNGQVGLNCYYPLERYGFHPTTGVNYQPFRVVVLSFELLNGPATVCGPKLSTTLVKDKCVNFNFNGLTGTGVLTTSKKQFLPFQQFGRDISDTTDAVRDPQTLEILDITPCSFGGVSVITPGTNTSNQVAVLYQDVNCTEVPMAIHAEQLTPAWRVYSAGANVFQTRAGCLVGAEHVNNSYECDIPVGAGICASYHSMSSLRSVNQRSIIAYTMSLGAENSVAYSNNSIAIPTNFTISVTTEILPVSMTKTSVDCTMYICGDSIECSNLLLQYGSFCTQLNRALTGIAVEQDKNTQEVFAQVKQIYKTPPIKDFGGFNFSQILPDPSKPSKRSFIEDLLFNKVTLADAGFIKQYGDCLGDIAARDLICAQKFNGLTVLPPLLTDEMIAQYTSALLAGTITSGWTFGAGAALQIPFAMQMAYRFNGIGVTQNVLYENQKLIANQFNSAIGKIQDSLSSTASALGKLQDVVNQNAQALNTLVKQLSSNFGAISSVLNDILSRLDPPEAEVQIDRLITGRLQSLQTYVTQQLIRAAEIRASANLAATKMSECVLGQSKRVDFCGKGYHLMSFPQSAPHGVVFLHVTYVFAQEKNFTTAPAICHEGKAHFPREGVFVSNGTHWFITQRNFYEPQIITTDNTFVSGSCDVVIGIVNNTVYDPLQPELDSGGGGSDIDPYKEFGSSYQLLNFLPLDFFPDLNALVDTATALYEEELTGREHCSPHHTAIRQALVCWDELTKLIAWMSSNITSEQVRTIIVNHVNDTWGLKVRQSLWFHLSCLTFGQHTVQEFLVSFGVWIRTPAPYRPPNAPILSTLPEHTVIC

SEQ ID NO: 10924 - protein, 1295 aa, Artificial Sequence
  SARS-CoV-2/pangolin/Guangxi/P5L/2017__EPI_ISL_410540 spike protein (1-1141)(K980P_V981P_P1063F) WhcAg construct
MFVFLFVLPLVSSQCVNLTTRTGIPPGYTNSSTRGVYYPDKVFRSSILHLTQDLFLPFFSNVTWFNTINYQGGFKKFDNPVLPFNDGVYFASTEKSNIIRGWIFGTTLDARTQSLLIVNNATNVVIKVCEFQFCTDPFLGVYYHNNNKTWVENEFRVYSSANNCTFEYISQPFLMDLEGKQGNFKNLREFVFKNVDGYFKIYSKHTPIDLVRDLPRGFAALEPLVDLPIGINITRFQTLLALHRSYLTPGKLESGWTTGAAAYYVGYLQQRTFLLSYNQNGTITDAVDCSLDPLSETKCTLKSLTVEKGIYQTSNFRVQPTISIVRFPNITNLCPFGEVFNASKFASVYAWNRKRISNCVADYSVLYNSTSFSTFKCYGVSPTKLNDLCFTNVYADSFVVKGDEVRQIAPGQTGVIADYNYKLPDDFTGCVIAWNSVKQDALTGGNYGYLYRLFRKSKLKPFERDISTEIYQAGSTPCNGQVGLNCYYPLERYGFHPTTGVNYQPFRVVVLSFELLNGPATVCGPKLSTTLVKDKCVNFNFNGLTGTGVLTTSKKQFLPFQQFGRDISDTTDAVRDPQTLEILDITPCSFGGVSVITPGTNTSNQVAVLYQDVNCTEVPMAIHAEQLTPAWRVYSAGANVFQTRAGCLVGAEHVNNSYECDIPVGAGICASYHSMSSFRSVNQRSIIAYTMSLGAENSVAYSNNSIAIPTNFTISVTTEILPVSMTKTSVDCTMYICGDSIECSNLLLQYGSFCTQLNRALTGIAVEQDKNTQEVFAQVKQIYKTPPIKDFGGFNFSQILPDPSKPSKRSFIEDLLFNKVTLADAGFIKQYGDCLGDIAARDLICAQKFNGLTVLPPLLTDEMIAQYTSALLAGTITSGWTFGAGAALQIPFAMQMAYRFNGIGVTQNVLYENQKLIANQFNSAIGKIQDSLSSTASALGKLQDVVNQNAQALNTLVKQLSSNFGAISSVLNDILSRLDPPEAEVQIDRLITGRLQSLQTYVTQQLIRAAEIRASANLAATKMSECVLGQSKRVDFCGKGYHLMSFPQSAPHGVVFLHVTYVFAQEKNFTTAPAICHEGKAHFPREGVFVSNGTHWFITQRNFYEPQIITTDNTFVSGSCDVVIGIVNNTVYDPLQPELDSGGGGSDIDPYKEFGSSYQLLNFLPLDFFPDLNALVDTATALYEEELTGREHCSPHHTAIRQALVCWDELTKLIAWMSSNITSEQVRTIIVNHVNDTWGLKVRQSLWFHLSCLTFGQHTVQEFLVSFGVWIRTPAPYRPPNAPILSTLPEHTVIC

SEQ ID NO: 10925 - protein, 1295 aa, Artificial Sequence
  SARS-CoV-2/pangolin/Guangxi/P5E/2017__EPI_ISL_410541 spike protein (1-1141)(K980P_V981P_P1063F) WhcAg construct
MFVFLFVLPLVSSQCVNLTTRTGIPPGYTNSSTRGVYYPDKVFRSSILHLTQDLFLPFFSNVTWFNTITYQGGSKKFDNPVLPFNDGVYFASTEKSNIIRGWIFGTTLDARTQSLLIVNNATNVVIKVCEFQFCTDPFLGVYYHNNNKTWVENEFRVYSSANNCTFEYISQPFLMDLEGKQGNFKNLREFVFKNVDGYFKIYSKHTPIDLVRDLPRGFAALEPLVDLPIGINITRFQTLLALHRSYLTPGKLESGWTTGAAAYYVGYLQQRTFLLSYNQNGTITDAVDCSLDPLSETKCTLKSLTVEKGIYQTSNFRVQPTISIVRFPNITNLCPFGEVFNASKFASVYAWNRKRISNCVADYSVLYNSTSFSTFKCYGVSPTKLNDLCFTNVYADSFVVKGDEVRQIAPGQTGVIADYNYKLPDDFTGCVIAWNSVKQDALTGDNYGYLYRLFRKSKLKPFERDISTEIYQAGSTPCNGQVGLNCYYPLERYGFHPTTGVNYQPFRVVVLSFELLNGPATVCGPKLSTTLVKDKCVNFNFNGLTGTGVLTTSKKQFLPFQQFGRDISDTTDAVRDPQTLEILDITPCSFGGVSVITPGTNTSNQVAVLYQDVNCTEVPMAIHAEQLTPAWRVYSAGANVFQTRAGCLVGAEHVNNSYECDIPVGAGICASYHSMSSFRSVNQRSIIAYTMSLGAENSVAYSNNSIAIPTNFTISVTTEILPVSMTKTSVDCTMYICGDSIECSNLLLQYGSFCTQLNRALTGIAVEQDKNTQEVFAQVKQIYKTPPIKDFGGFNFSQILPDPSKPSKRSFIEDLLFNKVTLADAGFIKQYGDCLGDIAARDLICAQKFNGLTVLPPLLTDEMIAQYTSALLAGTITSGWTFGAGAALQIPFAMQMAYRFNGIGVTQNVLYENQKLIANQFNSAIGKIQDSLSSTASALGKLQDVVNQNAQALNTLVKQLSSNFGAISSVLNDILSRLDPPEAEVQIDRLITGRLQSLQTYVTQQLIRAAEIRASANLAATKMSECVLGQSKRVDFCGKGYHLMSFPQSAPHGVVFLHVTYVFAQEKNFTTAPAICHEGKAHFPREGVFVSNGTHWFITQRNFYEPQIITTDNTFVSGSCDVVIGIVNNTVYDPLQPELDSGGGGSDIDPYKEFGSSYQLLNFLPLDFFPDLNALVDTATALYEEELTGREHCSPHHTAIRQALVCWDELTKLIAWMSSNITSEQVRTIIVNHVNDTWGLKVRQSLWFHLSCLTFGQHTVQEFLVSFGVWIRTPAPYRPPNAPILSTLPEHTVIC

SEQ ID NO: 10926 - protein, 1293 aa, Artificial Sequence
  SARS-CoV-2/pangolin/Guangxi/P1E/2017__EPI_ISL_410539 spike protein (1-1139)(K978P_V979P_P1061F) WhcAg construct
MFVFLFVLPLVSSQCVNLTTRTGIQPGYTNSSTRGVYYPDKVFRSSILHLTQDLFLPFFSNVTWFNTINYQGGFKKFDNPVLPFNDGVYFASTEKSNIIRGWIFGTTLDARTQSLLIVNNATNVVIKVCEFQFCTDPFLGVYYHNNNKTWVENEFRVYSSANNCTFEYISQPFLMDLEGKQGNFKNLREFVFKNVDGYFKIYSKHTPIDLVRDLPRGFAALEPLVDLPIGINITRFQTLLALHRSYLTPGKLESGWTTGAAAYYVGYLQQRTFLLSYNQNGTITDAVDCSLDPLSETKCTLKSLTVEKGIYQTSNFRVQPTISIVRFPNITNLCPFGEVFNASKFASVYAWNRKRISNCVADYSVLYNSTSFSTFKCYGVSPTKLNDLCFTNVYADSFVVKGDEVRQIAPGQTGVIADYNYKLPDDFTGCVIAWNSVKQDALTGGNYLYRLFRKSKLKPFERDISTEIYQAGSTPCNGQVGLNCYYPLERYGFHPTTGVNYQPFRVVVLSFELLNGPATVCGPKLSTTLVKDKCVNFNFNGLTGTGVLTTSKKQFLPFQQFGRDISDTTDAVRDPQTLEILDITPCSFGGVSVITPGTNTSNQVAVLYQDVNCTEVPMAIHAEQLTPAWRVYSAGANVFQTRAGCLVGAEHVNNSYECDIPVGAGICASYHSMSSLRSVNQRSIIAYTMSLGAENSVAYSNNSIAIPTNFTISVTTEILPVSMTKTSVDCTMYICGDSIECSNLLLQYGSFCTQLNRALTGIAVEQDKNTQEVFAQVKQIYKTPPIKDFGGFNFSQILPDPSKPSKRSFIEDLLFNKVTLADAGFIKQYGDCLGDIAARDLICAQKFNGLTVLPPLLTDEMIAQYTSALLAGTITSGWTFGAGAALQIPFAMQMAYRFNGIGVTQNVLYENQKLIANQFNSAIGKIQDSLSSTASALGKLQDVVNQNAQALNTLVKQLSSNFGAISSVLNDILSRLDPPEAEVQIDRLITGRLQSLQTYVTQQLIRAAEIRASANLAATKMSECVLGQSKRVDFCGKGYHLMSFPQSAPHGVVFLHVTYVFAQEKNFTTAPAICHEGKAHFPREGVFVSNGTHWFITQRNFYEPQIITTDNTFVSGSCDVVIGIVNNTVYDPLQPELDSGGGGSDIDPYKEFGSSYQLLNFLPLDFFPDLNALVDTATALYEEELTGREHCSPHHTAIRQALVCWDELTKLIAWMSSNITSEQVRTIIVNHVNDTWGLKVRQSLWFHLSCLTFGQHTVQEFLVSFGVWIRTPAPYRPPNAPILSTLPEHTVIC

SEQ ID NO: 10927 - protein, 1301 aa, Artificial Sequence
  SARS-CoV-2/Wuhan/WIV05/2019__EPI_ISL_402128 spike protein (1-1147)(K986P_V987P_ H1048Q_H1064N_ H1083N_H1101N) WhcAg construct
MFVFLVLLPLVSSQCVNLTTRTQLPPAYTNSFTRGVYYPDKVFRSSVLHSTQDLFLPFFSNVTWFHAIHVSGTNGTKRFDNPVLPFNDGVYFASTEKSNIIRGWIFGTTLDSKTQSLLIVNNATNVVIKVCEFQFCNDPFLGVYYHKNNKSWMESEFRVYSSANNCTFEYVSQPFLMDLEGKQGNFKNLREFVFKNIDGYFKIYSKHTPINLVRDLPQGFSALEPLVDLPIGINITRFQTLLALHRSYLTPGDSSSGWTAGAAAYYVGYLQPRTFLLKYNENGTITDAVDCALDPLSETKCTLKSFTVEKGIYQTSNFRVQPTESIVRFPNITNLCPFGEVFNATRFASVYAWNRKRISNCVADYSVLYNSASFSTFKCYGVSPTKLNDLCFTNVYADSFVIRGDEVRQIAPGQTGKIADYNYKLPDDFTGCVIAWNSNNLDSKVGGNYNYLYRLFRKSNLKPFERDISTEIYQAGSTPCNGVEGFNCYFPLQSYGFQPTNGVGYQPYRVVVLSFELLHAPATVCGPKKSTNLVKNKCVNFNFNGLTGTGVLTESNKKFLPFQQFGRDIADTTDAVRDPQTLEILDITPCSFGGVSVITPGTNTSNQVAVLYQDVNCTEVPVAIHADQLTPTWRVYSTGSNVFQTRAGCLIGAEHVNNSYECDIPIGAGICASYQTQTNSPRRARSVASQSIIAYTMSLGAENSVAYSNNSIAIPTNFTISVTTEILPVSMTKTSVDCTMYICGDSTECSNLLLQYGSFCTQLNRALTGIAVEQDKNTQEVFAQVKQIYKTPPIKDFGGFNFSQILPDPSKPSKRSFIEDLLFNKVTLADAGFIKQYGDCLGDIAARDLICAQKFNGLTVLPPLLTDEMIAQYTSALLAGTITSGWTFGAGAALQIPFAMQMAYRFNGIGVTQNVLYENQKLIANQFNSAIGKIQDSLSSTASALGKLQDVVNQNAQALNTLVKQLSSNFGAISSVLNDILSRLDPPEAEVQIDRLITGRLQSLQTYVTQQLIRAAEIRASANLAATKMSECVLGQSKRVDFCGKGYQLMSFPQSAPHGVVFLNVTYVPAQEKNFTTAPAICNDGKAHFPREGVFVSNGTNWFVTQRNFYEPQIITTDNTFVSGNCDVVIGIVNNTVYDPLQPELDSGGGGSDIDPYKEFGSSYQLLNFLPLDFFPDLNALVDTATALYEEELTGREHCSPHHTAIRQALVCWDELTKLIAWMSSNITSEQVRTIIVNHVNDTWGLKVRQSLWFHLSCLTFGQHTVQEFLVSFGVWIRTPAPYRPPNAPILSTLPEHTVIC

SEQ ID NO: 10928 - protein, 1297 aa, Artificial Sequence
  SARS-CoV-2/bat/Yunnan/RaTG13/2013__EPI_ISL_402131 spike protein (1-1143)(K982P_V983P_ H1044Q_H1060N_ H1079N_H1097N) WhcAg construct
MFVFLVLLPLVSSQCVNLTTRTQLPPAYTNSSTRGVYYPDKVFRSSVLHLTQDLFLPFFSNVTWFHAIHVSGTNGIKRFDNPVLPFNDGVYFASTEKSNIIRGWIFGTTLDSKTQSLLIVNNATNVVIKVCEFQFCNDPFLGVYYHKNNKSWMESEFRVYSSANNCTFEYVSQPFLMDLEGKQGNFKNLREFVFKNIDGYFKIYSKHTPINLVRDLPPGFSALEPLVDLPIGINITRFQTLLALHRSYLTPGDSSSGWTAGAAAYYVGYLQPRTFLLKYNENGTITDAVDCALDPLSETKCTLKSFTVEKGIYQTSNFRVQPTDSIVRFPNITNLCPFGEVFNATTFASVYAWNRKRISNCVADYSVLYNSTSFSTFKCYGVSPTKLNDLCFTNVYADSFVITGDEVRQIAPGQTGKIADYNYKLPDDFTGCVIAWNSKHIDAKEGGNFNYLYRLFRKANLKPFERDISTEIYQAGSKPCNGQTGLNCYYPLYRYGFYPTDGVGHQPYRVVVLSFELLNAPATVCGPKKSTNLVKNKCVNFNFNGLTGTGVLTESNKKFLPFQQFGRDIADTTDAVRDPQTLEILDITPCSFGGVSVITPGTNASNQVAVLYQDVNCTEVPVAIHADQLTPTWRVYSTGSNVFQTRAGCLIGAEHVNNSYECDIPIGAGICASYQTQTNSRSVASQSIIAYTMSLGAENSVAYSNNSIAIPTNFTISVTTEILPVSMTKTSVDCTMYICGDSTECSNLLLQYGSFCTQLNRALTGIAVEQDKNTQEVFAQVKQIYKTPPIKDFGGFNFSQILPDPSKPSKRSFIEDLLFNKVTLADAGFIKQYGDCLGDIAARDLICAQKFNGLTVLPPLLTDEMIAQYTSALLAGTITSGWTFGAGAALQIPFAMQMAYRFNGIGVTQNVLYENQKLIANQFNSAIGKIQDSLSSTASALGKLQDVVNQNAQALNTLVKQLSSNFGAISSVLNDILSRLDPPEAEVQIDRLITGRLQSLQTYVTQQLIRAAEIRASANLAATKMSECVLGQSKRVDFCGKGYQLMSFPQSAPHGVVFLNVTYVPAQEKNFTTAPAICNDGKAHFPREGVFVSNGTNWFVTQRNFYEPQIITTDNTFVSGSCDVVIGIVNNTVYDPLQPELDSGGGGSDIDPYKEFGSSYQLLNFLPLDFFPDLNALVDTATALYEEELTGREHCSPHHTAIRQALVCWDELTKLIAWMSSNITSEQVRTIIVNHVNDTWGLKVRQSLWFHLSCLTFGQHTVQEFLVSFGVWIRTPAPYRPPNAPILSTLPEHTVIC

SEQ ID NO: 10929 - protein, 1301 aa, Artificial Sequence
  SARS-CoV-2/Wuhan/HBCDC-HB-01/2019__EPI_ISL_402132 spike protein (1-1147)(K986P_V987P_ H1048Q_H1064N_ H1083N_H1101N) WhcAg construct
MFVFLVLLPLVSSQCVNLTTRTQLPPAYTNSITRGVYYPDKVFRSSVLHSTQDLFLPFFSNVTWFHAIHVSGTNGTKRFDNPVLPFNDGVYFASTEKSNIIRGWIFGTTLDSKTQSLLIVNNATNVVIKVCEFQFCNDPFLGVYYHKNNKSWMESEFRVYSSANNCTFEYVSQPFLMDLEGKQGNFKNLREFVFKNIDGYFKIYSKHTPINLVRDLPQGFSALEPLVDLPIGINITRFQTLLALHRSYLTPGDSSSGWTAGAAAYYVGYLQPRTFLLKYNENGTITDAVDCALDPLSETKCTLKSFTVEKGIYQTSNFRVQPTESIVRFPNITNLCPFGEVFNATRFASVYAWNRKRISNCVADYSVLYNSASFSTFKCYGVSPTKLNDLCFTNVYADSFVIRGDEVRQIAPGQTGKIADYNYKLPDDFTGCVIAWNSNNLDSKVGGNYNYLYRLFRKSNLKPFERDISTEIYQAGSTPCNGVEGFNCYFPLQSYGFQPTNGVGYQPYRVVVLSFELLHAPATVCGPKKSTNLVKNKCVNFNFNGLTGTGVLTESNKKFLPFQQFGRDIADTTDAVRDPQTLEILDITPCSFGGVSVITPGTNTSNQVAVLYQDVNCTEVPVAIHADQLTPTWRVYSTGSNVFQTRAGCLIGAEHVNNSYECDIPIGAGICASYQTQTNSPRRARSVASQSIIAYTMSLGAENSVAYSNNSIAIPTNFTISVTTEILPVSMTKTSVDCTMYICGDSTECSNLLLQYGSFCTQLNRALTGIAVEQDKNTQEVFAQVKQIYKTPPIKDFGGFNFSQILPDPSKPSKRSFIEDLLFNKVTLADAGFIKQYGDCLGDIAARDLICAQKFNGLTVLPPLLTDEMIAQYTSALLAGTITSGWTFGAGAALQIPFAMQMAYRFNGIGVTQNVLYENQKLIANQFNSAIGKIQDSLSSTASALGKLQDVVNQNAQALNTLVKQLSSNFGAISSVLNDILSRLDPPEAEVQIDRLITGRLQSLQTYVTQQLIRAAEIRASANLAATKMSECVLGQSKRVDFCGKGYQLMSFPQSAPHGVVFLNVTYVPAQEKNFTTAPAICNDGKAHFPREGVFVSNGTNWFVTQRNFYEPQIITTDNTFVSGNCDVVIGIVNNTVYDPLQPELDSGGGGSDIDPYKEFGSSYQLLNFLPLDFFPDLNALVDTATALYEEELTGREHCSPHHTAIRQALVCWDELTKLIAWMSSNITSEQVRTIIVNHVNDTWGLKVRQSLWFHLSCLTFGQHTVQEFLVSFGVWIRTPAPYRPPNAPILSTLPEHTVIC

SEQ ID NO: 10930 - protein, 1301 aa, Artificial Sequence
  SARS-CoV-2/Guangdong/20SF028/2020__EPI_ISL_403936 spike protein (1-1147)(K986P_V987P_ H1048Q_H1064N_ H1083N_H1101N) WhcAg construct
MFVFLVLLPLVSSQCVNLTTRTQLPPAYTNSFTRGVYYPDKVFRSSVLYSTQDLFLPFFSNVTWFHAIHVSGTNGTKRFDNPVLPFNDGVYFASTEKSNIIRGWIFGTTLDSKTQSLLIVNNATNVVIKVCEFQFCNDPFLGVYYHKNNKSWMESEFRVYSSANNCTFEYVSQPFLMDLEGKQGNFKNLREFVFKNIDGYFKIYSKHTPINLVRDLPQGFSALEPLVDLPIGINITRFQTLLALHRSYLTPGDSSSGWTAGAAAYYVGYLQPRTFLLKYNENGTITDAVDCALDPLSETKCTLKSFTVEKGIYQTSNFRVQPTESIVRFPNITNLCPFGEVFNATRFASVYAWNRKRISNCVADYSVLYNSASFSTFKCYGVSPTKLNDLCFTNVYADSFVIRGDEVRQIAPGQTGKIADYNYKLPDDFTGCVIAWNSNNLDSKVGGNYNYLYRLFRKSNLKPFERDISTEIYQAGSTPCNGVEGFNCYFPLQSYGFQPTNGVGYQPYRVVVLSFELLHAPATVCGPKKSTNLVKNKCVNFNFNGLTGTGVLTESNKKFLPFQQFGRDIADTTDAVRDPQTLEILDITPCSFGGVSVITPGTNTSNQVAVLYQDVNCTEVPVAIHADQLTPTWRVYSTGSNVFQTRAGCLIGAEHVNNSYECDIPIGAGICASYQTQTNSPRRARSVASQSIIAYTMSLGAENSVAYSNNSIAIPTNFTISVTTEILPVSMTKTSVDCTMYICGDSTECSNLLLQYGSFCTQLNRALTGIAVEQDKNTQEVFAQVKQIYKTPPIKDFGGFNFSQILPDPSKPSKRSFIEDLLFNKVTLADAGFIKQYGDCLGDIAARDLICAQKFNGLTVLPPLLTDEMIAQYTSALLAGTITSGWTFGAGAALQIPFAMQMAYRFNGIGVTQNVLYENQKLIANQFNSAIGKIQDSLSSTASALGKLQDVVNQNAQALNTLVKQLSSNFGAISSVLNDILSRLDPPEAEVQIDRLITGRLQSLQTYVTQQLIRAAEIRASANLAATKMSECVLGQSKRVDFCGKGYQLMSFPQSAPHGVVFLNVTYVPAQEKNFTTAPAICNDGKAHFPREGVFVSNGTNWFVTQRNFYEPQIITTDNTFVSGNCDVVIGIVNNTVYDPLQPELDSGGGGSDIDPYKEFGSSYQLLNFLPLDFFPDLNALVDTATALYEEELTGREHCSPHHTAIRQALVCWDELTKLIAWMSSNITSEQVRTIIVNHVNDTWGLKVRQSLWFHLSCLTFGQHTVQEFLVSFGVWIRTPAPYRPPNAPILSTLPEHTVIC

SEQ ID NO: 10931 - protein, 1301 aa, Artificial Sequence
  SARS-CoV-2/Shenzhen/SZTH-001/2020__EPI_ISL_406592 spike protein (1-1147)(K986P_V987P_ H1048Q_H1064N_ H1083N_H1101N) WhcAg construct
MFVFLVLLPLVSSQCVNLTTRTQLPPAYTNSFTRGVYYPDKVFRSSVLHSTQDLFLPFFSNVTWFHAIHVSGTNGTKRFDNPVLPFNDGVYFASTEKSNIIRGWIFGTTLDSKTQSLLIVNNATNVVIKVCEFQFCNDPFLGVYYHKNNKSWMESEFRVYSSANNCTFEYVSQPFLMDLEGKQGNFKNLREFVFKNIDGYFKIYSKHTPINLVRDLPQGFSALEPLVDLPIGINITRFQTLLALHRSYLTPGDSSSGWTAGAAAYYVGYLQPRTFLLKYNENGTITDAVDCALDPLSETKCTLKSFTVEKGIYQTSNFRVQPTESIVRFPNITNLCPFGEVFNATRFASVYAWNRKRISNCVADYSVLYNSASFSTFKCYGVSPTKLNDLCFTNVYADSFVIRGDEVRQIAPGQTGKIADYNYKLPDDFTGCVIAWNSNNLDSKVGGNYNYLYRLFRKSNLKPFERDISTEIYQAGSTPCNGVEGFNCYFPLQSYGFQPTNGVGYQPYRVVVLSFELLHAPATVCGPKKSTNLVKNKCVNFNFNGLTGTGVLTESNKKFLPFQQFGRDIADTTDAVRDPQTLEILDITPCSFGGVSVITPGTNTSNQVAVLYQDVNCTEVPVAIHADQLTPTWRVYSTGSNVFQTRAGCLIGAEHVNNSYECDIPIGAGICASYQTQTNSPRRARSVASQSIIAYTMSLGAENSVAYSNNSIAIPTNFTISVTTEILPVSMTKTSVDCTMYICGDSTECSNLLLQYGSFCTQLNRALTGIAVEQDKNTQEVFAQVKQIYKTPPIKDFGGFNFSQILPDPSKPSKRSFIEDLLFNKVTLADAGFIKQYGDCLGDIAARDLICAQKFNGLTVLPPLLTDEMIAQYTSALLAGTITSGWTFGAGAALQIPFAMQMAYRFNGIGVTQNVLYENQKLIANQFNSAIGKIQDSLSSTASALGKLQDVVNQNAQALNTLVKQLSSNFGAISSVLNDILSRLDPPEAEVQIDRLITGRLQSLQTYVTQQLIRAAEIRASANLAATKMSECVLGQSKRVDFCGKGYQLMSFPQSAPHGVVFLNVTYVPAQEKNFTTAPAICNDGKAHFPREGVFVSNGTNWFVTQRNFYEPQIITTDNTFVSGNCDVLIGIVNNTVYDPLQPELDSGGGGSDIDPYKEFGSSYQLLNFLPLDFFPDLNALVDTATALYEEELTGREHCSPHHTAIRQALVCWDELTKLIAWMSSNITSEQVRTIIVNHVNDTWGLKVRQSLWFHLSCLTFGQHTVQEFLVSFGVWIRTPAPYRPPNAPILSTLPEHTVIC

SEQ ID NO: 10932 - protein, 1301 aa, Artificial Sequence
  SARS-CoV-2/Shenzhen/SZTH-004/2020__EPI_ISL_406595 spike protein (1-1147)(K986P_V987P_ H1048Q_H1064N_ H1083N_H1101N) WhcAg construct
MFVFLVLLPLVSSQCVNLTTRTQLPPAYTNSFTRGVYYPDKVFRSSVLHSTQDLFLPFFSNVTWFHAIHVSGTNGTKRFDNPVLPFNDGVYFASTEKSNIIRGWIFGTTLDSKTQSLLIVNNATNVVIKVCEFQFCNDPFLGVYYHKNNKSWMESEFRVYSSANNCTFEYVSQPFLMDLEGKQGNFKNLREFVFKNIDGYFKIYSKHTPINLVRDLPQGFSALEPLVDLPIGINITRFQTLLALHRSYLTPGDSSSGWTAGAAAYYVGYLQPRTFLLKYNENGTITDAVDCALDPLSETKCTLKSFTVEKGIYQTSNFRVQPTESIVRFPNITNLCPFGEVFNATRFASVYAWDRKRISNCVAYYSVLYNSASFSTFKCYGVSPTKLNDLCFTNVYADSFVIRGDEVRQIAPGQTGKIADYNYKLPDDFTGCVIAWNSNNLDSKVGGNYNYLYRLFRKSNLKPFERDISTEIYQAGSTPCNGVEGFNCYFPLQSYGFQPTNGVGYQPYRVVVLSFELLHAPATVCGPKKSTNLVKNKCVNFNFNGLTGTGVLTESNKKFLPFQQFGRDIADTTDAVRDPQTLEILDITPCSFGGVSVITPGTNTSNQVAVLYQDVNCTEVPVAIHADQLTPTWRVYSTGSNVFQTRAGCLIGAEHVNNSYECDIPIGAGICASYQTQTNSPRRARSVASQSIIAYTMSLGAENSVAYSNNSIAIPTNFTISVTTEILPVSMTKTSVDCTMYICGDSTECSNLLLQYGSFCTQLNRALTGIAVEQDKNTQEVFAQVKQIYKTPPIKDFGGFNFSQILPDPSKPSKRSFIEDLLFNKVTLADAGFIKQYGDCLGDIAARDLICAQKFNGLTVLPPLLTDEMIAQYTSALLAGTITSGWTFGAGAALQIPFAMQMAYRFNGIGVTQNVLYENQKLIANQFNSAIGKIQDSLSSTASALGKLQDVVNQNAQALNTLVKQLSSNFGAISSVLNDILSRLDPPEAEVQIDRLITGRLQSLQTYVTQQLIRAAEIRASANLAATKMSECVLGQSKRVDFCGKGYQLMSFPQSAPHGVVFLNVTYVPAQEKNFTTAPAICNDGKAHFPREGVFVSNGTNWFVTQRNFYEPQIITTDNTFVSGNCDVVIGIVNNTVYDPLQPELDSGGGGSDIDPYKEFGSSYQLLNFLPLDFFPDLNALVDTATALYEEELTGREHCSPHHTAIRQALVCWDELTKLIAWMSSNITSEQVRTIIVNHVNDTWGLKVRQSLWFHLSCLTFGQHTVQEFLVSFGVWIRTPAPYRPPNAPILSTLPEHTVIC

SEQ ID NO: 10933 - protein, 1301 aa, Artificial Sequence
  SARS-CoV-2/France/IDF0372/2020__EPI_ISL_406596 spike protein (1-1147)(K986P_V987P_ H1048Q_H1064N_ H1083N_H1101N) WhcAg construct
MFVFLVLLPLVSSQCVNLTTRTQLPPAYTNSFTRGVYYPDKVFRSSVLHSTQDLFLPFFSNVTWFHAIHVSGTNGTKRFDNPVLPFNDGVYFASTEKSNIIRGWIFGTTLDSKTQSLLIVNNATNVVIKVCEFQFCNDPFLGVYYHKNNKSWMESEFRVYSSANNCTFEYVSQPFLMDLEGKQGNFKNLREFVFKNIDGYFKIYSKHTPINLVRDLPQGFSALEPLVDLPIGINITRFQTLLALHRSYLTPGDSSSGWTAGAAAYYVGYLQPRTFLLKYNENGTITDAVDCALDPLSETKCTLKSFTVEKGIYQTSNFRVQPTESIVRFPNITNLCPFGEVFNATRFASVYAWNRKRISNCVADYSFLYNSASFSTFKCYGVSPTKLNDLCFTNVYADSFVIRGDEVRQIAPGQTGKIADYNYKLPDDFTGCVIAWNSNNLDSKVGGNYNYLYRLFRKSNLKPFERDISTEIYQAGSTPCNGVEGFNCYFPLQSYGFQPTNGVGYQPYRVVVLSFELLHAPATVCGPKKSTNLVKNKCVNFNFNGLTGTGVLTESNKKFLPFQQFGRDIADTTDAVRDPQTLEILDITPCSFGGVSVITPGTNTSNQVAVLYQDVNCTEVPVAIHADQLTPTWRVYSTGSNVFQTRAGCLIGAEHVNNSYECDIPIGAGICASYQTQTNSPRRARSVASQSIIAYTMSLGAENSVAYSNNSIAIPTNFTISVTTEILPVSMTKTSVDCTMYICGDSTECSNLLLQYGSFCTQLNRALTGIAVEQDKNTQEVFAQVKQIYKTPPIKDFGGFNFSQILPDPSKPSKRSFIEDLLFNKVTLADAGFIKQYGDCLGDIAARDLICAQKFNGLTVLPPLLTDEMIAQYTSALLAGTITSGWTFGAGAALQIPFAMQMAYRFNGIGVTQNVLYENQKLIANQFNSAIGKIQDSLSSTASALGKLQDVVNQNAQALNTLVKQLSSNFGAISSVLNDILSRLDPPEAEVQIDRLITGRLQSLQTYVTQQLIRAAEIRASANLAATKMSECVLGQSKRVDFCGKGYQLMSFPQSAPHGVVFLNVTYVPAQEKNFTTAPAICNDGKAHFPREGVFVSNGTNWFVTQRNFYEPQIITTDNTFVSGNCDVVIGIVNNTVYDPLQPELDSGGGGSDIDPYKEFGSSYQLLNFLPLDFFPDLNALVDTATALYEEELTGREHCSPHHTAIRQALVCWDELTKLIAWMSSNITSEQVRTIIVNHVNDTWGLKVRQSLWFHLSCLTFGQHTVQEFLVSFGVWIRTPAPYRPPNAPILSTLPEHTVIC

SEQ ID NO: 10934 - protein, 1301 aa, Artificial Sequence
  SARS-CoV-2/Australia/VIC01/2020__EPI_ISL_406844 spike protein (1-1147)(K986P_V987P_ H1048Q_H1064N_ H1083N_H1101N) WhcAg construct
MFVFLVLLPLVSSQCVNLTTRTQLPPAYTNSFTRGVYYPDKVFRSSVLHSTQDLFLPFFSNVTWFHAIHVSGTNGTKRFDNPVLPFNDGVYFASTEKSNIIRGWIFGTTLDSKTQSLLIVNNATNVVIKVCEFQFCNDPFLGVYYHKNNKSWMESEFRVYSSANNCTFEYVSQPFLMDLEGKQGNFKNLREFVFKNIDGYFKIYSKHTPINLVRDLPQGFSALEPLVDLPIGINITRFQTLLALHRRYLTPGDSSSGWTAGAAAYYVGYLQPRTFLLKYNENGTITDAVDCALDPLSETKCTLKSFTVEKGIYQTSNFRVQPTESIVRFPNITNLCPFGEVFNATRFASVYAWNRKRISNCVADYSVLYNSASFSTFKCYGVSPTKLNDLCFTNVYADSFVIRGDEVRQIAPGQTGKIADYNYKLPDDFTGCVIAWNSNNLDSKVGGNYNYLYRLFRKSNLKPFERDISTEIYQAGSTPCNGVEGFNCYFPLQSYGFQPTNGVGYQPYRVVVLSFELLHAPATVCGPKKSTNLVKNKCVNFNFNGLTGTGVLTESNKKFLPFQQFGRDIADTTDAVRDPQTLEILDITPCSFGGVSVITPGTNTSNQVAVLYQDVNCTEVPVAIHADQLTPTWRVYSTGSNVFQTRAGCLIGAEHVNNSYECDIPIGAGICASYQTQTNSPRRARSVASQSIIAYTMSLGAENSVAYSNNSIAIPTNFTISVTTEILPVSMTKTSVDCTMYICGDSTECSNLLLQYGSFCTQLNRALTGIAVEQDKNTQEVFAQVKQIYKTPPIKDFGGFNFSQILPDPSKPSKRSFIEDLLFNKVTLADAGFIKQYGDCLGDIAARDLICAQKFNGLTVLPPLLTDEMIAQYTSALLAGTITSGWTFGAGAALQIPFAMQMAYRFNGIGVTQNVLYENQKLIANQFNSAIGKIQDSLSSTASALGKLQDVVNQNAQALNTLVKQLSSNFGAISSVLNDILSRLDPPEAEVQIDRLITGRLQSLQTYVTQQLIRAAEIRASANLAATKMSECVLGQSKRVDFCGKGYQLMSFPQSAPHGVVFLNVTYVPAQEKNFTTAPAICNDGKAHFPREGVFVSNGTNWFVTQRNFYEPQIITTDNTFVSGNCDVVIGIVNNTVYDPLQPELDSGGGGSDIDPYKEFGSSYQLLNFLPLDFFPDLNALVDTATALYEEELTGREHCSPHHTAIRQALVCWDELTKLIAWMSSNITSEQVRTIIVNHVNDTWGLKVRQSLWFHLSCLTFGQHTVQEFLVSFGVWIRTPAPYRPPNAPILSTLPEHTVIC

SEQ ID NO: 10935 - protein, 1301 aa, Artificial Sequence
  SARS-CoV-2/Germany/BavPat1/2020__EPI_ISL_406862 spike protein (1-1147)(K986P_V987P_ H1048Q_H1064N_ H1083N_H1101N) WhcAg construct
MFVFLVLLPLVSSQCVNLTTRTQLPPAYTNSFTRGVYYPDKVFRSSVLHSTQDLFLPFFSNVTWFHAIHVSGTNGTKRFDNPVLPFNDGVYFASTEKSNIIRGWIFGTTLDSKTQSLLIVNNATNVVIKVCEFQFCNDPFLGVYYHKNNKSWMESEFRVYSSANNCTFEYVSQPFLMDLEGKQGNFKNLREFVFKNIDGYFKIYSKHTPINLVRDLPQGFSALEPLVDLPIGINITRFQTLLALHRSYLTPGDSSSGWTAGAAAYYVGYLQPRTFLLKYNENGTITDAVDCALDPLSETKCTLKSFTVEKGIYQTSNFRVQPTESIVRFPNITNLCPFGEVFNATRFASVYAWNRKRISNCVADYSVLYNSASFSTFKCYGVSPTKLNDLCFTNVYADSFVIRGDEVRQIAPGQTGKIADYNYKLPDDFTGCVIAWNSNNLDSKVGGNYNYLYRLFRKSNLKPFERDISTEIYQAGSTPCNGVEGFNCYFPLQSYGFQPTNGVGYQPYRVVVLSFELLHAPATVCGPKKSTNLVKNKCVNFNFNGLTGTGVLTESNKKFLPFQQFGRDIADTTDAVRDPQTLEILDITPCSFGGVSVITPGTNTSNQVAVLYQGVNCTEVPVAIHADQLTPTWRVYSTGSNVFQTRAGCLIGAEHVNNSYECDIPIGAGICASYQTQTNSPRRARSVASQSIIAYTMSLGAENSVAYSNNSIAIPTNFTISVTTEILPVSMTKTSVDCTMYICGDSTECSNLLLQYGSFCTQLNRALTGIAVEQDKNTQEVFAQVKQIYKTPPIKDFGGFNFSQILPDPSKPSKRSFIEDLLFNKVTLADAGFIKQYGDCLGDIAARDLICAQKFNGLTVLPPLLTDEMIAQYTSALLAGTITSGWTFGAGAALQIPFAMQMAYRFNGIGVTQNVLYENQKLIANQFNSAIGKIQDSLSSTASALGKLQDVVNQNAQALNTLVKQLSSNFGAISSVLNDILSRLDPPEAEVQIDRLITGRLQSLQTYVTQQLIRAAEIRASANLAATKMSECVLGQSKRVDFCGKGYQLMSFPQSAPHGVVFLNVTYVPAQEKNFTTAPAICNDGKAHFPREGVFVSNGTNWFVTQRNFYEPQIITTDNTFVSGNCDVVIGIVNNTVYDPLQPELDSGGGGSDIDPYKEFGSSYQLLNFLPLDFFPDLNALVDTATALYEEELTGREHCSPHHTAIRQALVCWDELTKLIAWMSSNITSEQVRTIIVNHVNDTWGLKVRQSLWFHLSCLTFGQHTVQEFLVSFGVWIRTPAPYRPPNAPILSTLPEHTVIC

SEQ ID NO: 10936 - protein, 1301 aa, Artificial Sequence
  SARS-CoV-2/Wuhan/HBCDC-HB-02/2020__EPI_ISL_412978 spike protein (1-1147)(K986P_V987P_ H1048Q_H1064N_ H1083N_H1101N) WhcAg construct
MFVFLVLLPLVSSQCVNLTTRTQLPPAYTNSFTRGVYYPDKVFRSSVLHSTQDLFLPFFSNVTWFHAIHVSGTNGTKRFDNPVLPFNDGVYFASTEKSNIIRGWIFGTTLDSKTQSLLIVNNATNVVIKVCEFQFCNDPFLGVYYHKNNKSWMESEFRVYSSANNCTFEYVSQPFLMDLEGKQGNFKNLREFVFKNIDGYFKIYSKHTPINLVRDLPQGFSALEPLVDLPIGINITRFQTLLALHRSYLTPGDSSSGWTAGAAAYYVGYLQPRTFLLKYNENGTITDAVDCALDPLSETKCTLKSFTVEKGIYQTSNFRVQPTESIVRFPNITNLCPFGEVFNATRFASVYAWNRKRISNCVADYSVLYNSASFSTFKCYGVSPTKLNDLCFTNVYADSFVIRGDEVRQIAPGQTGKIADYNYKLPDDFTGCVIAWNSNNLDSKVGGNYNYLYRLFRKSNLKPFERDISTEIYQAGSTPCNGVEGFNCYFPLQSYGFQPTNGVGYQPYRVVVLSFELLHAPATVCGPKKSTNLVKNKCVNFNFNGLTGTGVLTESNKKFLPFQQFGRDIADTTDAVRDPQTLEILDITPCSFGGVSVITPGTNTSNQVAVLYQDVNCTEVPVAIHADQLTPTWRVYSTGSNVFQTRAGCLIGAEHVNNSYECDIPIGAGICASYQTQTNSPRRARSVASQSIIAYTMSLGAENSVAYSNNSIAIPTNFTISVTTEILPVSMTKTSVDCTMYICGDSTECSNFLLQYGSFCTQLNRALTGIAVEQDKNTQEVFAQVKQIYKTPPIKDFGGFNFSQILPDPSKPSKRSFIEDLLFNKVTLADAGFIKQYGDCLGDIAARDLICAQKFNGLTVLPPLLTDEMIAQYTSALLAGTITSGWTFGAGAALQIPFAMQMAYRFNGIGVTQNVLYENQKLIANQFNSAIGKIQDSLSSTASALGKLQDVVNQNAQALNTLVKQLSSNFGAISSVLNDILSRLDPPEAEVQIDRLITGRLQSLQTYVTQQLIRAAEIRASANLAATKMSECVLGQSKRVDFCGKGYQLMSFPQSAPHGVVFLNVTYVPAQEKNFTTAPAICNDGKAHFPREGVFVSNGTNWFVTQRNFYEPQIITTDNTFVSGNCDVVIGIVNNTVYDPLQPELDSGGGGSDIDPYKEFGSSYQLLNFLPLDFFPDLNALVDTATALYEEELTGREHCSPHHTAIRQALVCWDELTKLIAWMSSNITSEQVRTIIVNHVNDTWGLKVRQSLWFHLSCLTFGQHTVQEFLVSFGVWIRTPAPYRPPNAPILSTLPEHTVIC

SEQ ID NO: 10937 - protein, 1301 aa, Artificial Sequence
  SARS-CoV-2/Australia/QLD02/2020__EPI_ISL_407896 spike protein (1-1147)(K986P_V987P_ H1048Q_H1064N_ H1083N_H1101N) WhcAg construct
MFVFLVLLPLVSSQCVNLTTRTQLPPAYTNSFTRGVYYPDKVFRSSVLHSTQDLFLPFFSNVTWFHAIHVSGTNGTKRFDNPVLPFNDGVYFASTEKSNIIRGWIFGTTLDSKTQSLLIVNNATNVVIKVCEFQFCNDPFLGVYYHKNNKSWMESEFRVYSSANNCTFEYVSQPFLMDLEGKQGNFKNLREFVFKNIDGYFKIYSKHTPINLVRDLPQGFSALEPLVDLPIGINITRFQTLLALHRSYLTPGDSSSGWTAGAAAYYVGYLQPRTFLLKYNENGTITDAVDCALDPLSETKCTLKSFTVEKGIYQTSNFRVQPTESIVRFPNITNLCPFGEVFNATRFASVYAWNRKRISNCVADYSVLYNSASFSTFKCYGVSPTKLNDLCFTNVYADSFVIRGDEVRQIAPGQTGKIADYNYKLPDDFTGCVIAWNSNNLDSKVGGNYNYLYRLFRKSNLKPFERDISTEIYQAGSTPCNGVEGFNCYFPLQSYGFQPTNGVGYQPYRVVVLSFELLHAPATVCGPKKSTNLVKNKCVNFNFNGLTGTGVLTESNKKFLPFQQFGRDIADTTDAVRDPQTLEILDITPCSFGGVSVITPGTNTSNQVAVLYQDVNCTEVPVAIHADQLTPTWRVYSTGSNVFQTRAGCLIGAEHVNNSYECDIPIGAGICASYQTQTNSPRRARSVASQSIIAYTMSLGAENSVAYSNNSIAIPTNFTISVTTEILPVSMTKTSVDCTMYICGDSTECSNLLLQYGSFCTQLNRALTGIAVEQDKNTQEVFAQVKQIYKTPPIKDFGGFNFSQILPDPSKPSKRSFIEDLLFNKVTLADAGFIKQYGDCLGDIAARDLICAQKFNGLTVLPPLLTDEMIAQYTSALLAGTITSGWTFGAGAALQIPFAMQMAYRFNGIGVTQNVLYENQKLIANQFNSAIGKIQDSLSSTASALGKLQDVVNQNAQALNTLVKQLSSNFGAISSVLNDILSRLDPPEAEVQIDRLITGRLQSLQTYVTQQLIRAAEIRASANLAATKMSECVLGQSKRVDFCGKGYQLMSFPQSAPHGVVFLNVTYVPAQEKNFTTAPAICNDGKAHFPREGVFVSNGTNWFVTQRNFYEPQIITTDNTFVSGNCDVVIGIVNNTVYDPLQLELDSGGGGSDIDPYKEFGSSYQLLNFLPLDFFPDLNALVDTATALYEEELTGREHCSPHHTAIRQALVCWDELTKLIAWMSSNITSEQVRTIIVNHVNDTWGLKVRQSLWFHLSCLTFGQHTVQEFLVSFGVWIRTPAPYRPPNAPILSTLPEHTVIC

SEQ ID NO: 10938 - protein, 1301 aa, Artificial Sequence
  SARS-CoV-2/India/1-31/2020__EPI_ISL_413523 spike protein (1-1147)(K986P_V987P_ H1048Q_H1064N_ H1083N_H1101N) WhcAg construct
MFVFLVLLPLVSSQCVNLTTRTQLPPAYTNSFTRGVYYPDKVFRSSVLHSTQDLFLPFFSNVTWFHAIHVSGTNGTKRFDNPVLPFNDGVYFASTEKSNIIRGWIFGTTLDSKTQSLLIVNNATNVVIKVCEFQFCNDPFLGVYYHKNNKSWMESEFRVYSSANNCTFEYVSQPFLMDLEGKQGNFKNLREFVFKNIDGYFKIYSKHTPINLVRDLPQGFSALEPLVDLPIGINITRFQTLLALHRSYLTPGDSSSGWTAGAAAYYVGYLQPRTFLLKYNENGTITDAVDCALDPLSETKCTLKSFTVEKGIYQTSNFRVQPTESIVRFPNITNLCPFGEVFNATRFASVYAWNRKRISNCVADYSVLYNSASFSTFKCYGVSPTKLNDLCFTNVYADSFVIRGDEVRQIAPGQTGKIADYNYKLPDDFTGCVIAWNSNNLDSKVGGNYNYLYRLFRKSNLKPFERDISTEIYQAGSTPCNGVEGFNCYFPLQSYGFQPTNGVGYQPYRVVVLSFELLHAPATVCGPKKSTNLVKNKCVNFNFNGLTGTGVLTESNKKFLPFQQFGRDIADTTDAVRDPQTLEILDITPCSFGGVSVITPGTNTSNQVAVLYQDVNCTEVPVAIHADQLTPTWRVYSTGSNVFQTRAGCLIGAEHVNNSYECDIPIGAGICASYQTQTNSPRRARSVASQSIIAYTMSLGAENSVAYSNNSIAIPTNFTISVTTEILPVSMTKTSVDCTMYICGDSTECSNLLLQYGSFCTQLNRALTGIAVEQDKNTQEVFAQVKQIYKTPPIKDFGGFNFSQILPDPSKPSKRSFIEDLLFNKVTLADAGFIKQYGDCLGDIAARDLICAQKFNGLTVLPPLLTDEMIAQYTSALLAGTITSGWTFGAGAALQIPFAMQMAYRFNGIGVTQNVLYENQKLIANQFNSVIGKIQDSLSSTASALGKLQDVVNQNAQALNTLVKQLSSNFGAISSVLNDILSRLDPPEAEVQIDRLITGRLQSLQTYVTQQLIRAAEIRASANLAATKMSECVLGQSKRVDFCGKGYQLMSFPQSAPHGVVFLNVTYVPAQEKNFTTAPAICNDGKAHFPREGVFVSNGTNWFVTQRNFYEPQIITTDNTFVSGNCDVVIGIVNNTVYDPLQPELDSGGGGSDIDPYKEFGSSYQLLNFLPLDFFPDLNALVDTATALYEEELTGREHCSPHHTAIRQALVCWDELTKLIAWMSSNITSEQVRTIIVNHVNDTWGLKVRQSLWFHLSCLTFGQHTVQEFLVSFGVWIRTPAPYRPPNAPILSTLPEHTVIC

SEQ ID NO: 10939 - protein, 1301 aa, Artificial Sequence
  SARS-CoV-2/Guangdong/GD2020087-P0008/2020__EPI_ISL_413863 spike protein (1-1147)(K986P_V987P_ H1048Q_H1064N_ H1083N_H1101N) WhcAg construct
MFVFLVLLPLVSSQCVNLTTRTQLPPAYTNSFTRGVYYPDKVFRSSVLHSTQDLFLPFFSNVTWFHAIHVSGTNGTKRFDNPVLPFNDGVYFASTEKSNIIRGWIFGTTLDSKTQSLLIVNNATNVVIKVCEFQFCNDPFLGVYYHKNNKSWMESEFRVYSSANNCTFEYVSQPFLMDLEGKQGNFKNLREFVFKNIDGYFKIYSKHTPINLVRDLPQGFSALEPLVDLPIGINITRFQTLLALHRSYLTPGDSSSGWTAGAAAYYVGYLQPRTFLLKYNENGTITDAVDCALDPLSETKCTLKSFTVEKGIYQTSNFRVQPTESIVRFPNITNLCPFGEVFNATRFASVYAWNRKRISNCVADYSVLYNSASFSTFKCYGVSPTKLNDLCFTNVYADSFVIRGDEVREIAPGQTGKIADYNYKLPDDFTGCVIAWNSNNLDSKVGGNYNYLYRLFRKSNLKPFERDISTEIYQAGSTPCNGVEGFNCYFPLQSYGFQPTNGVGYQPYRVVVLSFELLHAPATVCGPKKSTNLVKNKCVNFNFNGLTGTGVLTESNKKFLPFQQFGRDIADTTDAVRDPQTLEILDITPCSFGGVSVITPGTNTSNQVAVLYQDVNCTEVPVAIHADQLTPTWRVYSTGSNVFQTRAGCLIGAEHVNNSYECDIPIGAGICASYQTQTNSPRRARSVASQSIIAYTMSLGAENSVAYSNNSIAIPTNFTISVTTEILPVSMTKTSVDCTMYICGDSTECSNLLLQYGSFCTQLNRALTGIAVEQDKNTQEVFAQVKQIYKTPPIKDFGGFNFSQILPDPSKPSKRSFIEDLLFNKVTLADAGFIKQYGDCLGDIAARDLICAQKFNGLTVLPPLLTDEMIAQYTSALLAGTITSGWTFGAGAALQIPFAMQMAYRFNGIGVTQNVLYENQKLIANQFNSAIGKIQDSLSSTASALGKLQDVVNQNAQALNTLVKQLSSNFGAISSVLNDILSRLDPPEAEVQIDRLITGRLQSLQTYVTQQLIRAAEIRASANLAATKMSECVLGQSKRVDFCGKGYQLMSFPQSAPHGVVFLNVTYVPAQEKNFTTAPAICNDGKAHFPREGVFVSNGTNWFVTQRNFYEPQIITTDNTFVSGNCDVVIGIVNNTVYDPLQPELDSGGGGSDIDPYKEFGSSYQLLNFLPLDFFPDLNALVDTATALYEEELTGREHCSPHHTAIRQALVCWDELTKLIAWMSSNITSEQVRTIIVNHVNDTWGLKVRQSLWFHLSCLTFGQHTVQEFLVSFGVWIRTPAPYRPPNAPILSTLPEHTVIC

SEQ ID NO: 10940 - protein, 1301 aa, Artificial Sequence
  SARS-CoV-2/Sweden/01/2020__EPI_ISL_411951 spike protein (1-1147)(K986P_V987P_ H1048Q_H1064N_ H1083N_H1101N) WhcAg construct
MFVFLVLLPLVSSQCVNLTTRTQLPPAYTNSFTRGVYYPDKVFRSSVLHSTQDLFLPFFSNVTWFHAIHVSGTNGTKRFDNPVLPFNDGVYFASTEKSNIIRGWIFGTTLDSKTQSLLIVNNATNVVIKVCEFQFCNDPFLGVYYHKNNKSWMESEFRVYSSANNCTFEYVSQPFLMDLEGKQGNFKNLREFVFKNIDGYFKIYSKHTPINLVRDLPQGFSALEPLVDLPIGINITRFQTLLALHRSYLTPGDSSSGWTAGAAAYYVGYLQPRTFLLKYNENGTITDAVDCALDPLSETKCTLKSFTVEKGIYQTSNFRVQPTESIVRFPNITNLCPFGEVFNATRFASVYAWNRKRISNCVADYSVLYNSASFSTFKCYGVSPTKLNDLCFTNVYADSFVIRGDEVRQIAPGQTGKIADYNYKLPDDFTGCVIAWNSNNLDSKVGGNYNYLYRLFRKSNLKPFERDISTEIYQAGSTPCNGVEGFNCYFPLQSYGFQPTNGVGYQPYRVVVLSFELLHAPATVCGPKKSTNLVKNKCVNFNFNGLTGTGVLTESNKKFLPFQQFGRDIADTTDAVRDPQTLEILDITPCSFGGVSVITPGTNTSNQVAVLYQDVNCTEVPVAIHADQLTPTWRVYSTGSNVFQTRAGCLIGAEHVNNSYECDIPIGAGICASYQTQTNSPRRARSVASQSIIAYTMSLGAENSVAYSNNSIAIPTNFTISVTTEILPVSMTKTSVDCTMYICGDSTECSNLLLQYGSFCTQLNRALTGIAVEQDKNTQEVFAQVKQIYKTPPIKDCGGFNFSQILPDPSKPSKRSFIEDLLFNKVTLADAGFIKQYGDCLGDIAARDLICAQKFNGLTVLPPLLTDEMIAQYTSALLAGTITSGWTFGAGAALQIPFAMQMAYRFNGIGVTQNVLYENQKLIANQFNSAIGKIQDSLSSTASALGKLQDVVNQNAQALNTLVKQLSSNFGAISSVLNDILSRLDPPEAEVQIDRLITGRLQSLQTYVTQQLIRAAEIRASANLAATKMSECVLGQSKRVDFCGKGYQLMSFPQSAPHGVVFLNVTYVPAQEKNFTTAPAICNDGKAHFPREGVFVSNGTNWFVTQRNFYEPQIITTDNTFVSGNCDVVIGIVNNTVYDPLQPELDSGGGGSDIDPYKEFGSSYQLLNFLPLDFFPDLNALVDTATALYEEELTGREHCSPHHTAIRQALVCWDELTKLIAWMSSNITSEQVRTIIVNHVNDTWGLKVRQSLWFHLSCLTFGQHTVQEFLVSFGVWIRTPAPYRPPNAPILSTLPEHTVIC

SEQ ID NO: 10941 - protein, 1301 aa, Artificial Sequence
  SARS-CoV-2/Tianmen/HBCDC-HB-07/2020__EPI_ISL_412983 spike protein (1-1147)(K986P_V987P_ H1048Q_H1064N_ H1083N_H1101N) WhcAg construct
MFVFLVLLPLVSSQCVNLTTRTQLPPAYTNSFTRGVYYPDKVFRSSVLHSTQDLFLPFFSNVTWFHAIHVSGTNGTKRFDNPVLPFNDGVYFASTEKSNIIRGWIFGTTLDSKTQSLLIVNNATNVVIKVCEFQFCNDPFLGVYYHKNNKSWMESEFRVYSSANNCTFEYVSQPFLMDLEGKQGNFKNLREFVFKNIDGYFKIYSKHTPINLVRDLPQGFSALEPLVDLPIGINITRFQTLLALHRSYLTPGDSSSGWTAGAAAYYVGYLQPRTFLLKYNENGTITDAVDCALDPLSETKCTLKSFTVEKGIYQTSNFRVQPTESIVRFPNITNLCPFGEVFNATRFASVYAWNRKRISNCVADYSVLYNSASFSTFKCYGVSPTKLNDLCFTNVYADSFVIRGDEVRQIAPGQTGKIADYNYKLPDDFTGCVIAWNSNNLDSKVGGNYNYLYRLFRKSNLKPFERDISTEIYQAGSTPCNGVEGFNCYFPLQSYGFQPTNGVGYQPYRVVVLSFELLHAPATVCGPKKSTNLVKNKCVNFNFNGLTGTGVLTESNKKFLPFQQFGRDIADTTDAVRDPQTLEILDITPCSFGGVSVITPGTNTSNQVAVLYQDLNCTEVPVAIHADQLTPTWRVYSTGSNVFQTRAGCLIGAEHVNNSYECDIPIGAGICASYQTQTNSPRRARSVASQSIIAYTMSLGAENSVAYSNNSIAIPTNFTISVTTEILPVSMTKTSVDCTMYICGDSTECSNLLLQYGSFCTQLNRALTGIAVEQDKNTQEVFAQVKQIYKTPPIKDFGGFNFSQILPDPSKPSKRSFIEDLLFNKVTLADAGFIKQYGDCLGDIAARDLICAQKFNGLTVLPPLLTDEMIAQYTSALLAGTITSGWTFGAGAALQIPFAMQMAYRFNGIGVTQNVLYENQKLIANQFNSAIGKIQDSLSSTASALGKLQDVVNQNAQALNTLVKQLSSNFGAISSVLNDILSRLDPPEAEVQIDRLITGRLQSLQTYVTQQLIRAAEIRASANLAATKMSECVLGQSKRVDFCGKGYQLMSFPQSAPHGVVFLNVTYVPAQEKNFTTAPAICNDGKAHFPREGVFVSNGTNWFVTQRNFYEPQIITTDNTFVSGNCDVVIGIVNNTVYDPLQPELDSGGGGSDIDPYKEFGSSYQLLNFLPLDFFPDLNALVDTATALYEEELTGREHCSPHHTAIRQALVCWDELTKLIAWMSSNITSEQVRTIIVNHVNDTWGLKVRQSLWFHLSCLTFGQHTVQEFLVSFGVWIRTPAPYRPPNAPILSTLPEHTVIC

SEQ ID NO: 10942 - protein, 1301 aa, Artificial Sequence
  SARS-CoV-2/Hong Kong/case42_VM20002493/2020__EPI_ISL_414527 spike protein (1-1147)(K986P_V987P_ H1048Q_H1064N_ H1083N_H1101N) WhcAg construct
MFVFLVLLPLVSSQCVNLTTRTQLPPAYTNSFTRGVYYPDKVFRSSVLHSTQDLFLPFFSNVTWFHAIHVSGTNGTKRFDNPVLPFNDGVYFASTEKSNIIRGWIFGTTLDSKTQSLLIVNNATNVVIKVCEFQFCNDPFLGVYYHKNNKSWMESEFRVYSSANNCTFEYVSQPFLMDLEGKQGNFKNLREFVFKNIDGYFKIYSKHTPINLVRDLPQGFSALEPLVDLPIGINITRFQTLLALHRSYLTPGDSSSGWTAGAAAYYVGYLQPRTFLLKYNENGTITDAVDCALDPLSETKCTLKSFTVEKGIYQTSNFRVQPTESIVRFPNITNLCPFGEVFNATRFASVYAWNRKRISNCVADYSVLYNSASFSTFKCYGVSPTKLNDLCFTNVYADSFVIRGDEVRQIAPGQTGKIADYNYKLPDDFTGCVIAWNSNNLDSKVGGNYNYLYRLFRKSNLKPFERDISTEIYQAGSTPCNGVEGFNCYFPLQSYGFQPTNGVGYQPYRVVVLSFELLHAPATVCGPKKSTNLVKNKCVNFNFNGLTGTGVLTESNKKFLPFQQFGRDIADTTDAVRDPQTLEILDITPCSFGGVSVITPGTNTSNQVAVLYQDVNCTEVPVAIHADQLTPTWRVYSTGSNVFQTRAGCLIGAEHVNNSYECDIPIGAGICASYQTQTNSPRRARSVASQSIIAYTMSLGAENSVAYSNNSIAIPTNFAISVTTEILPVSMTKTSVDCTMYICGDSTECSNLLLQYGSFCTQLNRALTGIAVEQDKNTQEVFAQVKQIYKTPPIKDFGGFNFSQILPDPSKPSKRSFIEDLLFNKVTLADAGFIKQYGDCLGDIAARDLICAQKFNGLTVLPPLLTDEMIAQYTSALLAGTITSGWTFGAGAALQIPFAMQMAYRFNGIGVTQNVLYENQKLIANQFNSAIGKIQDSLSSTASALGKLQDVVNQNAQALNTLVKQLSSNFGAISSVLNDILSRLDPPEAEVQIDRLITGRLQSLQTYVTQQLIRAAEIRASANLAATKMSECVLGQSKRVDFCGKGYQLMSFPQSAPHGVVFLNVTYVPAQEKNFTTAPAICNDGKAHFPREGVFVSNGTNWFVTQRNFYEPQIITTDNTFVSGNCDVVIGIVNNTVYDPLQPELDSGGGGSDIDPYKEFGSSYQLLNFLPLDFFPDLNALVDTATALYEEELTGREHCSPHHTAIRQALVCWDELTKLIAWMSSNITSEQVRTIIVNHVNDTWGLKVRQSLWFHLSCLTFGQHTVQEFLVSFGVWIRTPAPYRPPNAPILSTLPEHTVIC

SEQ ID NO: 10943 - protein, 1301 aa, Artificial Sequence
  SARS-CoV-2/USA/CruiseA-23/2020__EPI_ISL_414482 spike protein (1-1147)(K986P_V987P_ H1048Q_H1064N_ H1083N_H1101N) WhcAg construct
MFVFLVLLPLVSSQCVNLTTRTQLPPAYTNSFTRGVYYPDKVFRSSVLHSTQDLFLPFFSNVTWFHAIHVSGTNGTKRFDNPVLPFNDGVYFASTEKSNIIRGWIFGTTLDSKTQSLLIVNNATNVVIKVCEFQFCNDPFLGVYYHKNNKSWMESEFRVYSSANNCTFEYVSQPFLMDLEVKQGNFKNLREFVFKNIDGYFKIYSKHTPINLVRDLPQGFSALEPLVDLPIGINITRFQTLLALHRSYLTPGDSSSGWTAGAAAYYVGYLQPRTFLLKYNENGTITDAVDCALDPLSETKCTLKSFTVEKGIYQTSNFRVQPTESIVRFPNITNLCPFGEVFNATRFASVYAWNRKRISNCVADYSVLYNSASFSTFKCYGVSPTKLNDLCFTNVYADSFVIRGDEVRQIAPGQTGKIADYNYKLPDDFTGCVIAWNSNNLDSKVGGNYNYLYRLFRKSNLKPFERDISTEIYQAGSTPCNGVEGFNCYFPLQSYGFQPTNGVGYQPYRVVVLSFELLHAPATVCGPKKSTNLVKNKCVNFNFNGLTGTGVLTESNKKFLPFQQFGRDIADTTDAVRDPQTLEILDITPCSFGGVSVITPGTNTSNQVAVLYQDVNCTEVPVAIHADQLTPTWRVYSTGSNVFQTRAGCLIGAEHVNNSYECDIPIGAGICASYQTQTNSPRRARSVASQSIIAYTMSLGAENSVAYSNNSIAIPTNFTISVTTEILPVSMTKTSVDCTMYICGDSTECSNLLLQYGSFCTQLNRALTGIAVEQDKNTQEVFAQVKQIYKTPPIKDFGGFNFSQILPDPSKPSKRSFIEDLLFNKVTLADAGFIKQYGDCLGDIAARDLICAQKFNGLTVLPPLLTDEMIAQYTSALLAGTITSGWTFGAGAALQIPFAMQMAYRFNGIGVTQNVLYENQKLIANQFNSAIGKIQDSLSSTASALGKLQDVVNQNAQALNTLVKQLSSNFGAISSVLNDILSRLDPPEAEVQIDRLITGRLQSLQTYVTQQLIRAAEIRASANLAATKMSECVLGQSKRVDFCGKGYQLMSFPQSAPHGVVFLNVTYVPAQEKNFTTAPAICNDGKAHFPREGVFVSNGTNWFVTQRNFYEPQIITTDNTFVSGNCDVVIGIVNNTVYDPLQPELDSGGGGSDIDPYKEFGSSYQLLNFLPLDFFPDLNALVDTATALYEEELTGREHCSPHHTAIRQALVCWDELTKLIAWMSSNITSEQVRTIIVNHVNDTWGLKVRQSLWFHLSCLTFGQHTVQEFLVSFGVWIRTPAPYRPPNAPILSTLPEHTVIC

SEQ ID NO: 10944 - protein, 1301 aa, Artificial Sequence
  SARS-CoV-2/Hong Kong/case85_VM20002868/2020__EPI_ISL_414519 spike protein (1-1147)(K986P_V987P_ H1048Q_H1064N_ H1083N_H1101N) WhcAg construct
MFVFLVLVPLVSSQCVNLTTRTQLPPAYTNSFTRGVYYPDKVFRSSVLHSTQDLFLPFFSNVTWFHAIHVSGTNGTKRFDNPVLPFNDGVYFASTEKSNIIRGWIFGTTLDSKTQSLLIVNNATNVVIKVCEFQFCNDPFLGVYYHKNNKSWMESEFRVYSSANNCTFEYVSQPFLMDLEGKQGNFKNLREFVFKNIDGYFKIYSKHTPINLVRDLPQGFSALEPLVDLPIGINITRFQTLLALHRSYLTPGDSSSGWTAGAAAYYVGYLQPRTFLLKYNENGTITDAVDCALDPLSETKCTLKSFTVEKGIYQTSNFRVQPTESIVRFPNITNLCPFGEVFNATRFASVYAWNRKRISNCVADYSVLYNSASFSTFKCYGVSPTKLNDLCFTNVYADSFVIRGDEVRQIAPGQTGKIADYNYKLPDDFTGCVIAWNSNNLDSKVGGNYNYLYRLFRKSNLKPFERDISTEIYQAGSTPCNGVEGFNCYFPLQSYGFQPTNGVGYQPYRVVVLSFELLHAPATVCGPKKSTNLVKNKCVNFNFNGLTGTGVLTESNKKFLPFQQFGRDIADTTDAVRDPQTLEILDITPCSFGGVSVITPGTNTSNQVAVLYQDVNCTEVPVAIHADQLTPTWRVYSTGSNVFQTRAGCLIGAEHVNNSYECDIPIGAGICASYQTQTNSPRRARSVASQSIIAYTMSLGAENSVAYSNNSIAIPTNFTISVTTEILPVSMTKTSVDCTMYICGDSTECSNLLLQYGSFCTQLNRALTGIAVEQDKNTQEVFAQVKQIYKTPPIKDFGGFNFSQILPDPSKPSKRSFIEDLLFNKVTLADAGFIKQYGDCLGDIAARDLICAQKFNGLTVLPPLLTDEMIAQYTSALLAGTITSGWTFGAGAALQIPFAMQMAYRFNGIGVTQNVLYENQKLIANQFNSAIGKIQDSLSSTASALGKLQDVVNQNAQALNTLVKQLSSNFGAISSVLNDILSRLDPPEAEVQIDRLITGRLQSLQTYVTQQLIRAAEIRASANLAATKMSECVLGQSKRVDFCGKGYQLMSFPQSAPHGVVFLNVTYVPAQEKNFTTAPAICNDGKAHFPREGVFVSNGTNWFVTQRNFYEPQIITTDNTFVSGNCDVVIGIVNNTVYDPLQPELDSGGGGSDIDPYKEFGSSYQLLNFLPLDFFPDLNALVDTATALYEEELTGREHCSPHHTAIRQALVCWDELTKLIAWMSSNITSEQVRTIIVNHVNDTWGLKVRQSLWFHLSCLTFGQHTVQEFLVSFGVWIRTPAPYRPPNAPILSTLPEHTVIC

SEQ ID NO: 10945 - protein, 1301 aa, Artificial Sequence; identical to SEQ ID NO: 10935
  SARS-CoV-2/England/200990660/2020__EPI_ISL_414523 spike protein (1-1147)(K986P_V987P_ H1048Q_H1064N_ H1083N_H1101N) WhcAg construct

SEQ ID NO: 10946 - protein, 1301 aa, Artificial Sequence
  SARS-CoV-2/Australia/NSW09/2020__EPI_ISL_413595 spike protein (1-1147)(K986P_V987P_ H1048Q_H1064N_ H1083N_H1101N) WhcAg construct
MFVFLVLLPLVSSQCVNLTTRTQLPPAYTNSFTRGVYYPDKVFRSSVLHSTQDLFLPFFSNVTWFHAIHVSGTNGTKRFDNPVLPFNDGVYFASTEKSNIIRGWIFGTTLDSKTQSLLIVNNATNVVIKVCEFQFCNDPFLGVYYHKNNKSWMESEFRVYSSANNCTFEYVSQPFLMDLEGKQGNFKNLREFVFKNIDGYFKIYSKHTPINLVRDLPQGFSALEPLVDLPIGINITRFQTLLALHRSYLTPGDSSSGWTAGAAAYYVGYLQPRTFLLKYNENGTITDAVDCALDPLSETKCTLKSFTVEKGIYQTSNFRVQPTESIVRFPNITNLCPFGEVFNATRFASVYAWNRKRISNCVADYSVLYNSASFSTFKCYGVSPTKLNDLCFTNVYADSFVIRGDEVRQIAPGQTGKIADYNYKLPDDFTGCVIAWNSNNLDSKVGGNYNYLYRLFRKSNLKPFERDISTEIYQAGSTPCNGVEGFNCYFPLQSYGFQPTNGVGYQPYRVVVLSFELLHAPATVCGPKKSTNLVKNKCVNFNFNGLTGTGVLTESNKKFLPFQQFGRDIADTTDAVRDPQTLEILDITPCSFGGVSVITPGTNTSNQVAVLYQDVNCTEVPVAIHADQLTPTWRVYSTGSNVFQTRAGCLIGAEHVNNSYECDIPIGAGICASYQTQTNSPRRARSVASQSIIAYTMSLGAENSVAYSNNSIAIPTNFTISVTTEILPVSMTKTSVDCTMYICGDSTECSNLLLQYGSFCTQLNRALTGIAVEQDKNTQEVFAQVKQIYKTPPIKDFGGFNFSQILPDPSKPSKRSFIEDLLFNKVTLADAGFIKQYGDCLGDIAARDLICAQKFNGLTVLPPLLTDEMIAQYTSALLAGTITSGWTFGAGAALQIPFAMQMAYRFNGIGVTQNVLYENQKLIANQFNSAIGKIQDSLSFTASALGKLQDVVNQNAQALNTLVKQLSSNFGAISSVLNDILSRLDPPEAEVQIDRLITGRLQSLQTYVTQQLIRAAEIRASANLAATKMSECVLGQSKRVDFCGKGYQLMSFPQSAPHGVVFLNVTYVPAQEKNFTTAPAICNDGKAHFPREGVFVSNGTNWFVTQRNFYEPQIITTDNTFVSGNCDVVIGIVNNTVYDPLQPELDSGGGGSDIDPYKEFGSSYQLLNFLPLDFFPDLNALVDTATALYEEELTGREHCSPHHTAIRQALVCWDELTKLIAWMSSNITSEQVRTIIVNHVNDTWGLKVRQSLWFHLSCLTFGQHTVQEFLVSFGVWIRTPAPYRPPNAPILSTLPEHTVIC

SEQ ID NO: 10947 - protein, 1301 aa, Artificial Sequence; identical to SEQ ID NO: 10927
  SARS-CoV-2/Australia/NSW10/2020__EPI_ISL_413596 spike protein (1-1147)(K986P_V987P_ H1048Q_H1064N_ H1083N_H1101N) WhcAg construct

SEQ ID NO: 10948 - protein, 1301 aa, Artificial Sequence
  SARS-CoV-2/Switzerland/1000477797/2020__EPI_ISL_413023 spike protein (1-1147)(K986P_V987P_ H1048Q_H1064N_ H1083N_H1101N) WhcAg construct
MFVFLVLLPLVSSQCVNLTTRTQLPPAYTNSFTRGVYYPDKVFRSSVLHSTQDLFLPFFSNVTWFHAIHVSGTNGTKRFDNPVLPFNDGVYFASTEKSNIIRGWIFGTTLDSKTQSLLIVNNATNVVIKVCEFQFCNDPFLGVYYHKNNKSWMESEFRVYSSANNCTFEYVSQPFLMDLEGKQGNFKNLREFVFKNIDGYFNIYSKHTPINLVRDLPQGFSALEPLVDLPIGINITRFQTLLALHRSYLTPGDSSSGWTAGAAAYYVGYLQPRTFLLKYNENGTITDAVDCALDPLSETKCTLKSFTVEKGIYQTSNFRVQPTESIVRFPNITNLCPFGEVFNATRFASVYAWNRKRISNCVADYSVLYNSASFSTFKCYGVSPTKLNDLCFTNVYADSFVIRGDEVRQIAPGQTGKIADYNYKLPDDFTGCVIAWNSNNLDSKVGGNYNYLYRLFRKSNLKPFERDISTEIYQAGSTPCNGVEGFNCYFPLQSYGFQPTNGVGYQPYRVVVLSFELLHAPATVCGPKKSTNLVKNKCVNFNFNGLTGTGVLTESNKKFLPFQQFGRDIADTTDAVRDPQTLEILDITPCSFGGVSVITPGTNTSNQVAVLYQGVNCTEVPVAIHADQLTPTWRVYSTGSNVFQTRAGCLIGAEHVNNSYECDIPIGAGICASYQTQTNSPRRARSVASQSIIAYTMSLGAENSVAYSNNSIAIPTNFTISVTTEILPVSMTKTSVDCTMYICGDSTECSNLLLQYGSFCTQLNRALTGIAVEQDKNTQEVFAQVKQIYKTPPIKDFGGFNFSQILPDPSKPSKRSFIEDLLFNKVTLADAGFIKQYGDCLGDIAARDLICAQKFNGLTVLPPLLTDEMIAQYTSALLAGTITSGWTFGAGAALQIPFAMQMAYRFNGIGVTQNVLYENQKLIANQFNSAIGKIQDSLSSTASALGKLQDVVNQNAQALNTLVKQLSSNFGAISSVLNDILSRLDPPEAEVQIDRLITGRLQSLQTYVTQQLIRAAEIRASANLAATKMSECVLGQSKRVDFCGKGYQLMSFPQSAPHGVVFLNVTYVPAQEKNFTTAPAICNDGKAHFPREGVFVSNGTNWFVTQRNFYEPQIITTDNTFVSGNCDVVIGIVNNTVYDPLQPELDSGGGGSDIDPYKEFGSSYQLLNFLPLDFFPDLNALVDTATALYEEELTGREHCSPHHTAIRQALVCWDELTKLIAWMSSNITSEQVRTIIVNHVNDTWGLKVRQSLWFHLSCLTFGQHTVQEFLVSFGVWIRTPAPYRPPNAPILSTLPEHTVIC

SEQ ID NO: 10949 - protein, 1301 aa, Artificial Sequence
  SARS-CoV-2/Belgium/BA-02291/2020__EPI_ISL_415159 spike protein (1-1147)(K986P_V987P_ H1048Q_H1064N_ H1083N_H1101N) WhcAg construct
MFVFLVLLPLVSSQCVNLTTRTQLPPAYTNSFTRGVYYPDKVFRSSVLHSTQDLFLPFFSNVTWFHAIHVSGTNGTKRFDNPVLPFNDGVYFASTEKSNIIRGWIFGTTLDSKTQSLLIVNNATNVVIKVCEFQFCNDPFLGVYYHKNNKSWMESEFRVYSSANNCTFEYVSQPFLMDLEGKQGNFKNLREFVFKNIDGYFKIYSKHTPINLVRDLPQGFSALEPLVDLPIGINITRFQTLLALHRSYLTPGDSSSGWTAGAAAYYVGYLQPRTFLLKYNENGTITDAVDCALDPLSETKCTLKSFTVEKGIYQTSNFRVQPTESIVRFPNITNLCPFGEVFNATRFASVYAWNRKRISNCVADYSVLYNSASFSTFKCYGVSPTKLNDLCFTNVYADSFVIRGDEVRQIAPGQTGKIADYNYKLPDDFTGCVIAWNSNNLDSKVGGNYNYLYRLFRRSNLKPFERDISTEIYQAGSTPCNGVEGFNCYFPLQSYGFQPTNGVGYQPYRVVVLSFELLPAPATVCGPKKSTNLVKNKCVNFNFNGLTGTGVLTESNKKFLPFQQFGRDIADTTDAVRDPQTLEILDITPCSFGGVSVITPGTNTSNQVAVLYQGVNCTEVPVAIHADQLTPTWRVYSTGSNVFQTRAGCLIGAEHVNNSYECDIPIGAGICASYQTQTNSPRRARSVASQSIIAYTMSLGAENSVAYSNNSIAIPTNFTISVTTEILPVSMTKTSVDCTMYICGDSTECSNLLLQYGSFCTQLNRALTGIAVEQDKNTQEVFAQVKQIYKTPPIKDFGGFNFSQILPDPSKPSKRSFIEDLLFNKVTLADAGFIKQYGDCLGDIAARDLICAQKFNGLTVLPPLLTDEMIAQYTSALLAGTITSGWTFGAGAALQIPFAMQMAYRFNGIGVTQNVLYENQKLIANQFNSAIGKIQDSLSSAAPALGKLQDVVNQNAQALNTLVKQLSSNFGAISSVLNDILSRLDPPEAEVQIDRLITGRLQSLQTYVTQQLIRAAEIRASANLAATKMSECVLGQSKRVDFCGKGYQLMSFPQSAPHGVVFLNVTYVPAQEKNFTTAPAICNDGKAHFPREGVFVSNGTNWFVTQRNFYEPQIITTDNTFVSGNCDVVIGIVNNTVYDPLQPELDSGGGGSDIDPYKEFGSSYQLLNFLPLDFFPDLNALVDTATALYEEELTGREHCSPHHTAIRQALVCWDELTKLIAWMSSNITSEQVRTIIVNHVNDTWGLKVRQSLWFHLSCLTFGQHTVQEFLVSFGVWIRTPAPYRPPNAPILSTLPEHTVIC

SEQ ID NO: 10950 - protein, 1301 aa, Artificial Sequence
  SARS-CoV-2/USA/WA8-UW5/2020__EPI_ISL_413486 spike protein (1-1147)(K986P_V987P_ H1048Q_H1064N_ H1083N_H1101N) WhcAg construct
MFVFLVLLPLVSSQCVNLTTRTQLPPAYTNSFTRGVYYPDKVFRSSVLHSTQDLFLPFFSNVTWFHAIHVSGTNGTKRFDNPVLPFNDGVYFASTEKSNIIRGWIFGTTLDSKTQSLLIVNNATNVVIKVCEFQFCNDPFLGVYYHKNNKSWMESEFRVYSSANNCTFEYVSQPFLMDLEGKQGNFKNLREFVFKNIDGYFKIYSKHTPINLVRDLPQGFSALEPLVDLPIGINITRFQTLLALHRSYLTPGDSSSGWTAGAAAYYVGYLQPRTFLLKYNENGTITDAVDCALDPLSETKCTLKSFTVEKGIYQTSNFRVQPTESIVRFPNITNLCPFGEVFNATRFASVYAWNRKRISNCVADYSVLYNSASFSTFKCYGVSPTKLNDLCFTNVYADSFVIRGDEVRQIAPGQTGKIADYNYKLPDDFTGCVIAWNSNNLDSKVGGNYNYLYRLFRKSNLKPFERDISTEIYQAGSTPCNGVEGFNCYFPLQSYGFQPTNGVGYQPYRVVVLSFELLHAPATVCGPKKSTNLVKNKCVNFNFNGLTGTGVLTESNKKFLPFQQFGRDIADTTDAVRDPQTLEILDITPCSFGGVSVITPGTNTSNQVAVLYQDVNCTEVPVAIHADQLTPTWRVYSTGSNVFQTRAGCLIGAEYVNNSYECDIPIGAGICASYQTQTNSPRRARSVASQSIIAYTMSLGAENSVAYSNNSIAIPTNFTISVTTEILPVSMTKTSVDCTMYICGDSTECSNLLLQYGSFCTQLNRALTGIAVEQDKNTQEVFAQVKQIYKTPPIKDFGGFNFSQILPDPSKPSKRSFIEDLLFNKVTLADAGFIKQYGDCLGDIAARDLICAQKFNGLTVLPPLLTDEMIAQYTSALLAGTITSGWTFGAGAALQIPFAMQMAYRFNGIGVTQNVLYENQKLIANQFNSAIGKIQDSLSSTASALGKLQDVVNQNAQALNTLVKQLSSNFGAISSVLNDILSRLDPPEAEVQIDRLITGRLQSLQTYVTQQLIRAAEIRASANLAATKMSECVLGQSKRVDFCGKGYQLMSFPQSAPHGVVFLNVTYVPAQEKNFTTAPAICNDGKAHFPREGVFVSNGTNWFVTQRNFYEPQIITTDNTFVSGNCDVVIGIVNNTVYDPLQPELDSGGGGSDIDPYKEFGSSYQLLNFLPLDFFPDLNALVDTATALYEEELTGREHCSPHHTAIRQALVCWDELTKLIAWMSSNITSEQVRTIIVNHVNDTWGLKVRQSLWFHLSCLTFGQHTVQEFLVSFGVWIRTPAPYRPPNAPILSTLPEHTVIC

SEQ ID NO: 10951 - protein, 1301 aa, Artificial Sequence
  SARS-CoV-2/England/20102000506/2020__EPI_ISL_415147 spike protein (1-1147)(K986P_V987P_ H1048Q_H1064N_ H1083N_H1101N) WhcAg construct
MFVFLVLLPLVSSQCVNLTTRTQLPPAYTNSFTRGVYYPDKVFRSSVLHSTQDLFLPFFSNVTWFHAIHVSGTNGTKRFDNPVLPFNDGVYFASTEKSNIIRGWIFGTTLDSKTQSLLIVNNATNVVIKVCEFQFCNDPFLGVYYHKNNKSWMESEFRVYSSANNCTFEYVSQPFLMDLEGKQGNFKNLREFVFKNIDGYFKIYSKHTPINLVRDLPQGFSALEPLVDLPIGINITRFQTLLALHRSYLTPGDSSSGWTAGAAAYYVGYLQPRTFLLKYNENGTITDAVDCALDPLSETKCTLKSFTVEKGIYQTSNFRVQPTESIVRFPNITNLCPFGEVFNATRFASVYAWNRKRISNCVADYSVLYNSASFSTFKCYGVSPTKLNDLCFTNVYADSFVIRGDEVRQIAPGQTGKIADYNYKLPDDFTGCVIAWNSNNLDSKVGGNYNYLYRLFRKSNLKPFERDISTEIYQAGSTPCNGVEGFNCYFPLQSYGFQPTNGVGYQPYRVVVLSFELLHAPATVCGPKKSTNLVKNKCVNFNFNGLTGTGVLTESNKKFLPFQQFGRDIADTTDAVRDPQTLEILDITPCSFGGVSVITPGTNTSNQVAVLYQGVNCTEVPVAIHADQLTPTWRVYSTGSNVFQTRAGCLIGAEHVNNSYECDIPIGAGICASYQTQTNSPRRARSVASQSIIAYTMSLGAENSVAYSNNSIAIPTNFTISVTTEILPVSMTKTSVDCTMYICGDSTECSNLLLQYGSFCTQLNRALTGIAVEQDKNTQEVFAQVKQIYKTPPIKDFGGFNFSQILPDPSKPSKRSFIEDLLFNKVTLADAGFIKQYGYCLGDIAARDLICAQKFNGLTVLPPLLTDEMIAQYTSALLAGTITSGWTFGAGAALQIPFAMQMAYRFNGIGVTQNVLYENQKLIANQFNSAIGKIQDSLSSTASALGKLQDVVNQNAQALNTLVKQLSSNFGAISSVLNDILSRLDPPEAEVQIDRLITGRLQSLQTYVTQQLIRAAEIRASANLAATKMSECVLGQSKRVDFCGKGYQLMSFPQSAPHGVVFLNVTYVPAQEKNFTTAPAICNDGKAHFPREGVFVSNGTNWFVTQRNFYEPQIITTDNTFVSGNCDVVIGIVNNTVYDPLQPELDSGGGGSDIDPYKEFGSSYQLLNFLPLDFFPDLNALVDTATALYEEELTGREHCSPHHTAIRQALVCWDELTKLIAWMSSNITSEQVRTIIVNHVNDTWGLKVRQSLWFHLSCLTFGQHTVQEFLVSFGVWIRTPAPYRPPNAPILSTLPEHTVIC

SEQ ID NO: 10952 - protein, 1301 aa, Artificial Sequence
  SARS-CoV-2/Belgium/VAG-03013/2020__EPI_ISL_415155 spike protein (1-1147)(K986P_V987P_ H1048Q_H1064N_ H1083N_H1101N) WhcAg construct
MFVFLVLLPLVSSQCVNLTTRTQLPPAYTNSFTRGVYYPDKVFRSSVLHSTQDLFLPFFSNVTWFHAIHVSGTNGTKRFDNPVLPFNDGVYFASTEKSNIIRGWIFGTTLDSKTQSLLIVNNATNVVIKVCEFQFCNDPFLGVYYHKNNKSWMESEFRVYSSANNCTFEYVSQPFLMDLEGKQGNFKNLREFVFKNIDGYFKIYSKHTPINLVRDLPQGFSALEPLVDLPIGINITRFQTLLALHRSYLTPGDSSSGWTAGAAAYYVGYLQPRTFLLKYNENGTITDAVDCALDPLSETKCTLKSFTVEKGIYQTSNFRVQPTESIVRFPNITNLCPFGEVFNATRFASVYAWNRKRISNCVADYSVLYNSASFSTFKCYGVSPTKLNDLCFTNVYADSFVIRGDEVRQIAPGQTGKIADYNYKLPDDFTGCVIAWNSNNLDSKVGGNYNYLYRLFRKSNLKPFERDISTEIYQAGSTPCNGVEGFNCYFPLQSYGFQPTNGVGYQPYRVVVLSFELLHAPATVCGPKKSTNLVKNKCVNFNFNGLTGTGVLTESNKKFLPFQQFGRDIADTTDAVRDPQTLEILDITPCSFGGVSVITPGTNTSNQVAVLYQGVNCTEVPVAIHADQLTPTWRVYSTGSNVFQTRAGCLIGAEHVNNSYECDIPIGAGICASYQTQTNSPRRARSVASQSIIAYTMSLGAENSVAYSNNSIAIPTNFTISVTTEILPVSMTKTSVDCTMYICGDSTECSNLLLQYGSFCTQLNRALTGIAVEQDKNTQEVFAQVKQIYKTPPIKDFGGFNFSQILPDPSKPSKRSFIEDLLFNKVTLADAGFIKQYGDCLGDIAARDLICAQKFNGLTVLPPLLTDEMIAQYTSALLAGTITSGWTFGAGAALQIPFAMQMAYRFNGIGVTQNVLYENQKLIANQFNSAIGKIQDSLSSTATALGKLQDVVNQNAQALNTLVKQLSSNFGAISSVLNDILSRLDPPEAEVQIDRLITGRLQSLQTYVTQQLIRAAEIRASANLAATKMSECVLGQSKRVDFCGKGYQLMSFPQSAPHGVVFLNVTYVPAQEKNFTTAPAICNDGKAHFPREGVFVSNGTNWFVTQRNFYEPQIITTDNTFVSGNCDVVIGIVNNTVYDPLQPELDSGGGGSDIDPYKEFGSSYQLLNFLPLDFFPDLNALVDTATALYEEELTGREHCSPHHTAIRQALVCWDELTKLIAWMSSNITSEQVRTIIVNHVNDTWGLKVRQSLWFHLSCLTFGQHTVQEFLVSFGVWIRTPAPYRPPNAPILSTLPEHTVIC

SEQ ID NO: 10953 - protein, 1301 aa, Artificial Sequence
  SARS-CoV-2/Belgium/BC-03016/2020__EPI_ISL_415157 spike protein (1-1147)(K986P_V987P_ H1048Q_H1064N_ H1083N_H1101N) WhcAg construct
MFVFLVLLPLVSSQCVNLTTRTQLPPAYTNSFTRGVYYPDKVFRSSVLHSTQDLFLPFFSNVTWFHAIHVSGTNGTKRFDNPVLPFNDGVYFASTEKSNIIRGWIFGTTLDSKTQSLLIVNNATNVVIKVCEFQFCNDPFLGVYYHKNNKSWMESEFRVYSSANNCTFEYVSQPFLMDLEGKQGNFKNLREFVFKNIDGYFKIYSKHTPINLVRDLPQGFSALEPLVDLPIGINITRFQTLLALHRSYLTPGDSSSGWTAGAAAYYVGYLQPRTFLLKYNENGTITDAVDCALDPLSETKCTLKSFTVEKGIYQTSNFRVQPTESIVRFPNITNLCPFGEVFNATRFASVYAWNRKRISNCVADYSVLYNSASFSTFKCYGVSPTKLNDLCFTNVYADSFVIRGDEVRQIAPGQTGKIADYNYKLPDDFTGCVIAWNSNNLDSKVGGNYNYLYRLFRKSNLKPFERDISTEIYQAGSTPCNGVEGFNCYFPLQSYGFQPTNGVGYQPYRVVVLSFELLHAPATVCGPKKSTNLVKNKCVNFNFNGLTGTGVLTESNKKFLPFQQFGRDIADTTDAVRDPQTLEILDITPCSFGGVSVITPGTNTSNQVAVLYQGVNCTEVPVAIHADQLTPTWRVYSTGSNVFQTRAGCLIGAEHVNNSYECDIPIGAGICASYQTQTNSPRRARSVASQSIIAYTMSLGAENSVAYSNNSIAIPTNFTISVTTEILPVSMTKTSVDCTMYICGDSTECSNLLLQYGSFCTQLNRALTGIAVEQDKNTQEVFAQVKQIYKTPPIKDFGGFNFSQILPDPSKPSKRSFIEDLLFNKVTLADAGFIKQYGDCLGDIAARDLICAQKFNGLTVLPPLLTDEMIAQYTSALLAGTITSGWTFGAGAALQIPFAMQMAYRFNGIGVTQNVLYENQKLIANQFNSAIGKIQDSLSSTAPALGKLQDVVNQNAQALNTLVKQLSSNFGAISSVLNDILSRLDPPEAEVQIDRLITGRLQSLQTYVTQQLIRAAEIRASANLAATKMSECVLGQSKRVDFCGKGYQLMSFPQSAPHGVVFLNVTYVPAQEKNFTTAPAICNDGKAHFPREGVFVSNGTNWFVTQRNFYEPQIITTDNTFVSGNCDVVIGIVNNTVYDPLQPELDSGGGGSDIDPYKEFGSSYQLLNFLPLDFFPDLNALVDTATALYEEELTGREHCSPHHTAIRQALVCWDELTKLIAWMSSNITSEQVRTIIVNHVNDTWGLKVRQSLWFHLSCLTFGQHTVQEFLVSFGVWIRTPAPYRPPNAPILSTLPEHTVIC

SEQ ID NO: 10954 - protein, 1301 aa, Artificial Sequence
  SARS-CoV-2/Germany/BavPat3/2020__EPI_ISL_414521 spike protein (1-1147)(K986P_V987P_ H1048Q_H1064N_ H1083N_H1101N) WhcAg construct
MFVFLVLLPLVSSQCVNLTTRTQLPPAYTNSFTRGVYYPDKVFRSSVLHSTQDLFLPFFSNVTWFHAIHVSGTNGTKRFDNPVLPFNDGVYFASTEKSNIIRGWIFGTTLDSKTQSLLIVNNATNVVIKVCEFQFCNDPFLGVYYHKNNKSWMESEFRVYSSANNCTFEYVSQPFLMDLEGKQGNFKNLREFVFKNIDGYFKIYSKHTPINLVRDLPQGFSALEPLVDLPIGINITRFQTLLALHRSYLTPGDSSSGWTAGAAAYYVGYLQPRTFLLKYNENGTITDAVDCALDPLSETKCTLKSFTVEKGIYQTSNFRVQPTESIVRFPNITNLCPFGEVFNATRFASVYAWNRKRISNCVADYSVLYNSASFSTFKCYGVSPTKLNDLCFTNVYADSFVIRGDEVRQIAPGQTGKIADYNYKLPDDFTGCVIAWNSNNLDSKVGGNYNYLYRLFRKSNLKPFERDISTEIYQAGSTPCNGVEGFNCYFPLQSYGFQPTNGVGYQPYRVVVLSFELLHAPATVCGPKKSTNLVKNKCVNFNFNGLTGTGVLTESNKKFLPFQQFGRDIADTTDAVRDPQTLEILDITPCSFGGVSVITPGTNTSNQVAVLYQDVNCTEVPVAIHADQLTPTWRVYSTGSNVFQTRAGCLIGAEHVNNSYECDIPIGAGICASYQTQTNSPRRARSVASQSIIAYTMSLGAENSVAYSNNSIAIPTNFTISVTTEILPVSMTKTSVDCTMYICGDSTECSNLLLQYGSFCTQLNRALTGIAVEQDKNTQQVFAQVKQIYKTPPIKDFGGFNFSQILPDPSKPSKRSFIEDLLFNKVTLADAGFIKQYGDCLGDIAARDLICAQKFNGLTVLPPLLTDEMIAQYTSALLAGTITSGWTFGAGAALQIPFAMQMAYRFNGIGVTQNVLYENQKLIANQFNSAIGKIQDSLSSTASALGKLQDVVNQNAQALNTLVKQLSSNFGAISSVLNDILSRLDPPEAEVQIDRLITGRLQSLQTYVTQQLIRAAEIRASANLAATKMSECVLGQSKRVDFCGKGYQLMSFPQSAPHGVVFLNVTYVPAQEKNFTTAPAICNDGKAHFPREGVFVSNGTNWFVTQRNFYEPQIITTDNTFVSGNCDVVIGIVNNTVYDPLQPELDSGGGGSDIDPYKEFGSSYQLLNFLPLDFFPDLNALVDTATALYEEELTGREHCSPHHTAIRQALVCWDELTKLIAWMSSNITSEQVRTIIVNHVNDTWGLKVRQSLWFHLSCLTFGQHTVQEFLVSFGVWIRTPAPYRPPNAPILSTLPEHTVIC

SEQ ID NO: 10955 - protein, 1301 aa, Artificial Sequence
  SARS-CoV-2/France/HF1805/2020__EPI_ISL_414628 spike protein (1-1147)(K986P_V987P_ H1048Q_H1064N_ H1083N_H1101N) WhcAg construct
MFVFLVLLPLVSSQCVNLTTRTQLPPAYTNSFTRGVYYPDKVFRSSVLHSTQDLFLPFFSNVTWFHAIHVSGTNGTKRFDNPVLPFNDGVYFASTEKSNIIRGWIFGTTLDSKTQSLLIVNNATNVVIKVCEFQFCNDPFLGVYYHKNNKSWMESEFRVYSSANNCTFEYVSQPFLMDLEGKQGNFKNLREFVFKNIDGYFKIYSKHTPINLVRDLPQGFSALEPLVDLPIGINITRFQTLLALHRSYLTPGDSSSGWTAGAAAYYVGYLQPRTFLLKYNENGTITDAVDCALDPLSETKCTLKSFTVEKGIYQTSNFRVQPTESIVRFPNITNLCPFGEVFNATRFASVYAWNRKRISNCVADYSVLYNSASFSTFKCYGVSPTKLNDLCFTNVYADSFVIRGDEVRQIAPGQTGKIADYNYKLPDDFTGCVIAWNSNNLDSKVGGNYNYLYRLFRKSNLKPFERDISTEIYQAGSTPCNGVEGFNCYFPLQSYGFQPTNGVGYQPYRVVVLSFELLHAPATVCGPKKSTNLVKNKCVNFNFNGLTGTGVLTESNKKFLPFQQFGRDIADTTDAVRDPQTLEILDITPCSFGGVSVITPGTNTSNQVAVLYQGVNCTEVPVAIHADQLTPTWRVYSTGSNVFQTRAGCLIGAEHVNNSYECDIPIGAGICASYQTQTNSPRRARSVASQSIIAYTMSLGAENSVAYSNNSIAIPTNFTISVTTEILPVSMTKTSVDCTMYICGDSTECSNLLLQYGSFCTQLNRALTGIAVEQDKNTQEVFAQVKQIYKTPPIKDFGGFNFSQILPDPSKPSKRSFIEDLLFNKVTLADAGFIKQYGDCLGDIAARDLICAQKFNGLTVLPPLLTDEMIAQYTSALLAGTITSGWTFGAGAALQIPFAMQMAYRFNGIGVTQNVLYENQKLIANQFNSAIGKIQDSLSSTASALGKLQDVVNQNAQALNTLVKQLSSNFGAISSVLNDILSRLDPPEAEVQIDRLITGRLQSLQTYVTQQLIRAAEIRASANLAATKMSECVLGQSKRVDFCGKGYQLMSFPQSAPHGVVFLNVTYVPAQEKNFTTAPAICNDGKAHFPREGVFVSNGTNWFVTQRNFYEPQIITTDNTFVSGNCDVVIGVVNNTVYDPLQPELDSGGGGSDIDPYKEFGSSYQLLNFLPLDFFPDLNALVDTATALYEEELTGREHCSPHHTAIRQALVCWDELTKLIAWMSSNITSEQVRTIIVNHVNDTWGLKVRQSLWFHLSCLTFGQHTVQEFLVSFGVWIRTPAPYRPPNAPILSTLPEHTVIC

SEQ ID NO: 10956 - protein, 1301 aa, Artificial Sequence
  SARS-CoV-2/Netherlands/ZuidHolland_9/2020__EPI_ISL_414445 spike protein (1-1147)(K986P_V987P_ H1048Q_H1064N_ H1083N_H1101N) WhcAg construct
MFVFLVLLPLVSSQCVNLTTRTQLPPAYTNSFTRGVYYPDKVFRSSVLHSTQDLFLPFFSNVTWFHAIHVSGTNGTKRFDNPVLPFNDGVYFASTEKSNIIRGWIFGTTLDSKTQSLLIVNNATNVVIKVCEFQFCNDPFLGVYYHKNNKSWMESEFRVYSSANNCTFEYVSQPFLMDLEGKQGNFKNLREFVFKNIDGYFKIYSKHTPINLVRDLPQGFSALEPLVDLPIGINITRFQTLLALHRSYLTPGDSSSGWTAGAAAYYVGYLQPRTFLLKYNENGTITDAVDCALDPLSETKCTLKSFTVEKGIYQTSNFRVQPTESIVRFPNITNLCPFGEVFNATRFASVYAWNRKRISNCVADYSVLYNSASFSTFKCYGVSPTKLNDLCFTNVYADSFVIRGDEVRQIAPGQTGKIADYNYKLPDDFTGCVIAWNSNNLDSKVGGNYNYLYRLFRKSNLKPFERDISTEIYQAGSTPCNGVEGFNCYFPLQSYGFQPTNGVGYQPYRVVVLSFELLHAPATVCGPKKSTNLVKNKCVNFNFNGLTGTGVLTESNKKFLPFQQFGRDIADTTDAVRDPQTLEILDITPCSFGGVSVITPGTNTSNQVAVLYQGVNCTEVPVAIHADQLTPTWRVYSTGSNVFQTRAGCLIGAEHVNNSYECDIPIGAGICASYQTQTNSPRRARSVASQSIIAYTMSLGAENSVAYSNNSIAIPTNFTISVTTEILPVSMTKTSVDCTMYICGDSTECSNLLLQYGSFCTQLNRALTGIAVEQDKNTQEVFAQVKQIYKTPPIKDFGGFNFSQILPDPSKPSKRSFIEDLLFNKVTLADAGFIKQYGDCLGDIAARDLICVQKFNGLTVLPPLLTDEMIAQYTSALLAGTITSGWTFGAGAALQIPFAMQMAYRFNGIGVTQNVLYENQKLIANQFNSAIGKIQDSLSSTASALGKLQDVVNQNAQALNTLVKQLSSNFGAISSVLNDILSRLDPPEAEVQIDRLITGRLQSLQTYVTQQLIRAAEIRASANLAATKMSECVLGQSKRVDFCGKGYQLMSFPQSAPHGVVFLNVTYVPAQEKNFTTAPAICNDGKAHFPREGVFVSNGTNWFVTQRNFYEPQIITTDNTFVSGNCDVVIGIVNNTVYDPLQPELDSGGGGSDIDPYKEFGSSYQLLNFLPLDFFPDLNALVDTATALYEEELTGREHCSPHHTAIRQALVCWDELTKLIAWMSSNITSEQVRTIIVNHVNDTWGLKVRQSLWFHLSCLTFGQHTVQEFLVSFGVWIRTPAPYRPPNAPILSTLPEHTVIC

SEQ ID NO: 10957 - protein, 1301 aa, Artificial Sequence
  SARS-CoV-2/Finland/FIN03032020A/2020__EPI_ISL_413602 spike protein (1-1147)(K986P_V987P_ H1048Q_H1064N_ H1083N_H1101N) WhcAg construct
MFVFLVLLPLVSSQCVNLTTRTQLPPAYTNSFTRGVYYPDKVFRSSVLHSTQDLFLPFFSNVTWFHAIHVSGTNGTKRFDNPVLPFNDGVYFASTEKSNIIRGWIFGTTLDSKTQSLLIVNNATNVVIKVCEFQFCNDPFLGVYYHKNNKSWMESEFRVYSSANNCTFEYVSQPFLMDLEGKQGNFKNLREFVFKNIDGYFKIYSKHTPINLVRDLPQGFSALEPLVDLPIGINITRFQTLLALHRSYLTPGDSSSGWTAGAAAYYVGYLQPRTFLLKYNENGTITDAVDCALDPLSETKCTLKSFTVEKGIYQTSNFRVQPTESIVRFPNITNLCPFGEVFNATRFASVYAWNRKRISNCVADYSVLYNSASFSTFKCYGVSPTKLNDLCFTNVYADSFVIRGDEVRQIAPGQTGKIADYNYKLPDDFTGCVISWNSNNLDSKVGGNYNYLYRLFRKSNLKPFERDISTEIYQAGSTPCNGVEGFNCYFPLQSYGFQPTNGVGYQPYRVVVLSFELLHAPATVCGPKKSTNLVKNKCVNFNFNGLTGTGVLTESNKKFLPFQQFGRDIADTTDAVRDPQTLEILDITPCSFGGVSVITPGTNTSNQVAVLYQGVNCTEVPVAIHADQLTPTWRVYSTGSNVFQTRAGCLIGAEHVNNSYECDIPIGAGICASYQTQTNSPRRARSVASQSIIAYTMSLGAENSVAYSNNSIAIPTNFTISVTTEILPVSMTKTSVDCTMYICGDSTECSNLLLQYGSFCTQLNRALTGIAVEQDKNTQEVFAQVKQIYKTPPIKDFGGFNFSQILPDPSKPSKRSFIEDLLFNKVTLADAGFIKQYGDCLGDIAARDLICAQKFNGLTVLPPLLTDEMIAQYTSALLAGTITSGWTFGAGAALQIPFAMQMAYRFNGIGVTQNVLYENQKLIANQFNSAIGKIQDSLSSTASALGKLQDVVNQNAQALNTLVKQLSSNFGAISSVLNDILSRLDPPEAEVQIDRLITGRLQSLQTYVTQQLIRAAEIRASANLAATKMSECVLGQSKRVDFCGKGYQLMSFPQSAPHGVVFLNVTYVPAQEKNFTTAPAICNDGKAHFPREGVFVSNGTNWFVTQRNFYEPQIITTDNTFVSGNCDVVIGIVNNTVYDPLQPELDSGGGGSDIDPYKEFGSSYQLLNFLPLDFFPDLNALVDTATALYEEELTGREHCSPHHTAIRQALVCWDELTKLIAWMSSNITSEQVRTIIVNHVNDTWGLKVRQSLWFHLSCLTFGQHTVQEFLVSFGVWIRTPAPYRPPNAPILSTLPEHTVIC

SEQ ID NO: 10958 - protein, 1301 aa, Artificial Sequence
  SARS-CoV-2/France/GE1977/2020__EPI_ISL_414632 spike protein (1-1147)(K986P_V987P_ H1048Q_H1064N_ H1083N_H1101N) WhcAg construct
MFVFLVLLPLVSSQCVNLTTRTQLPPAYTNSFTRGVYYPDKVFRSSVLHSTQDLFLPFFSNVTWFHAIHVSGTNGTKRFDNPVLPFNDGVYFASTEKSNIIRGWIFGTTLDSKTQSLLIVNNATNVVIKVCEFQFCNDPFLGVYYHKNNKSWMESEFRVYSSANNCTFEYVSQPFLMDLEGKQGNFKNLREFVFKNIDGYFKIYSKHTPINLVRDLPQGFSALEPLVDLPIGINITRFQTLLALHRSYLTPGDSSSGWTAGAAAYYVGYLQPRTFLLKYNENGTITDAVDCALDPLSETKCTLKSFTVEKGIYQTSNFRVQPTESIVRFPNITNLCPFGEVFNATRFASVYAWNRKRISNCVADYSVLYNSASFSTFKCYGVSPTKLNDLCFTNVYADSFVIRGDEVRQIAPGQTGKIADYNYKLPDDFTGCVIAWNSNNLDSKVGGNYNYLYRLFRKSNLKPFERDISTEIYQAGSTPCNGVEGFNCYFPLQSYGFQPTNGVGYQPYRVVVLSFELLHAPATVCGPKKSTNLVKNKCVNFNFNGLTGTGVLTESNKKFLPFQQFGRDIADTTDAVRDPQTLEILDITPCSFGGVSVITPGTNTSNQVAVLYQGVNCTEVPVAIHADQLTPTWRVYSTGSNVFQTRAGCLIGAEHVNNSYECDIPIGAGICASYQTQTNSPRRARSVASQSIIAYTMSLGAENSVAYSNNSIAIPTNFTISVTTEILPVSMTKTSVDCTMYICGDSTECSNLLLQYGSFCTQLNRALTGIAVEQDKNTQEVFAQVKQIYKTPPIKDFGGFNFSQILPDPSKPSKRSFIEDLLFNKVTLADAGFIKQYGDCLGDIAARDLICAQKFNGLTVLPPLLTDEMIAQYTSALLAGTITSGWTFGAGAALQIPFAMQMAYRFNGIGVTQNVLYENQKLIANQFNSAIGKIQDSLFSTASALGKLQDVVNQNAQALNTLVKQLSSNFGAISSVLNDILSRLDPPEAEVQIDRLITGRLQSLQTYVTQQLIRAAEIRASANLAATKMSECVLGQSKRVDFCGKGYQLMSFPQSAPHGVVFLNVTYVPAQEKNFTTAPAICNDGKAHFPREGVFVSNGTNWFVTQRNFYEPQIITTDNTFVSGNCDVVIGIVNNTVYDPLQPELDSGGGGSDIDPYKEFGSSYQLLNFLPLDFFPDLNALVDTATALYEEELTGREHCSPHHTAIRQALVCWDELTKLIAWMSSNITSEQVRTIIVNHVNDTWGLKVRQSLWFHLSCLTFGQHTVQEFLVSFGVWIRTPAPYRPPNAPILSTLPEHTVIC

SEQ ID NO: 10959 - protein, 1301 aa, Artificial Sequence
  SARS-CoV-2/Finland/FIN-313/2020__EPI_ISL_414641 spike protein (1-1147)(K986P_V987P_ H1048Q_H1064N_ H1083N_H1101N) WhcAg construct
MFVFLVLLPLVSSQCVNLTTRTQLPPAYTNSFTRGVYYPDKVFRSSVLHSTQDLFLPFFSNVTWFHAIHVSGTNGTKRFDNPVLPFNDGVYFASTEKSNIIRGWIFGTTLDSKTQSLLIVNNATNVVIKVCEFQFCNDPFLGVYYHKNNKSWMESEFRVYSSANNCTFEYVSQPFLMDLEGKQGNFKNLREFVFKNIDGYFKIYSKHTPINLVRDLPQGFSALEPLVDLPIGINITRFKTLLALHRSYLTPGDSSSGWTAGAAAYYVGYLQPRTFLLKYNENGTITDAVDCALDPLSETKCTLKSFTVEKGIYQTSNFRVQPTESIVRFPNITNLCPFGEVFNATRFASVYAWNRKRISNCVADYSVLYNSASFSTFKCYGVSPTKLNDLCFTNVYADSFVIRGDEVRQIAPGQTGKIADYNYKLPDDFTGCVIAWNSNNLDSKVGGNYNYLYRLFRKSNLKPFERDISTEIYQAGSTPCNGVEGFNCYFPLQSYGFQPTNGVGYQPYRVVVLSFELLHAPATVCGPKKSTNLVKNKCVNFNFNGLTGTGVLTESNKKFLPFQQFGRDIADTTDAVRDPQTLEILDITPCSFGGVSVITPGTNTSNQVAVLYQGVNCTEVPVAIHADQLTPTWRVYSTGSNVFQTRAGCLIGAEHVNNSYECDIPIGAGICASYQTQTNSPRRARSVASQSIIAYTMSLGAENSVAYSNNSIAIPTNFTISVTTEILPVSMTKTSVDCTMYICGDSTECSNLLLQYGSFCTQLNRALTGIAVEQDKNTQEVFAQVKQIYKTPPIKDFGGFNFSQILPDPSKPSKRSFIEDLLFNKVTLADAGFIKQYGDCLGDIAARDLICAQKFNGLTVLPPLLTDEMIAQYTSALLAGTITSGWTFGAGAALQIPFAMQMAYRFNGIGVTQNVLYENQKLIANQFNSAIGKIQDSLSSTASALGKLQDVVNQNAQALNTLVKQLSSNFGAISSVLNDILSRLDPPEAEVQIDRLITGRLQSLQTYVTQQLIRAAEIRASANLAATKMSECVLGQSKRVDFCGKGYQLMSFPQSAPHGVVFLNVTYVPAQEKNFTTAPAICNDGKAHFPREGVFVSNGTNWFVTQRNFYEPQIITTDNTFVSGNCDVVIGIVNNTVYDPLQPELDSGGGGSDIDPYKEFGSSYQLLNFLPLDFFPDLNALVDTATALYEEELTGREHCSPHHTAIRQALVCWDELTKLIAWMSSNITSEQVRTIIVNHVNDTWGLKVRQSLWFHLSCLTFGQHTVQEFLVSFGVWIRTPAPYRPPNAPILSTLPEHTVIC

SEQ ID NO: 10960 - protein, 1301 aa, Artificial Sequence
  SARS-CoV-2/Netherlands/ZuidHolland_2/2020__EPI_ISL_414556 spike protein (1-1147)(K986P_V987P_ H1048Q_H1064N_ H1083N_H1101N) WhcAg construct
MFVFLVLLPLVSSQCVNLTTRTQLPPAYTNSFTRGVYYPDKVFRSSVLHSTQDLFLPFFSNVTWFHAIHVSGTNGTKRFDNPVLPFNDGVYFASTEKSNIIRGWIFGTTLDSKTQSLLIVNNATNVVIKVCEFQFCNDPFLGVYYHKNNKSWMESEFRVYSSANNCTFEYVSQPFLMDLEGKQGNFKNLREFVFKNIDGYFKIYSKHTPINLVRDLPQGFSALEPLVDLPIGINITRFQTLLALHRSYLTPGDSSSGWTAGAAAYYVGYLQPRTFLLKYNENGTITDAVDCALDPLSETKCTLKSFTVEKGIYQTSNFRVQPTESIVRFPNITNLCPFGEVFNATRFASVYAWNRKRISNCVADYSVLYNSASFSTFKCYGVSPTKLNDLCFTNVYADSFVIRGDEVRQIAPGQTGKIADYNYKLPDDFTGCVIAWNSNNLDSKVGGNYNYLYRLFRKSNLKPFERDISTEIYQAGSTPCNGVEGFNCYFPLQSYGFQPTNGVGYQPYRVVVLSFELLHAPATVCGPKKSTNLVKNKCVNFNFNGLTGTGVLTESNKKFLPFQQFGRDIADTTDAVRDPQTLEILDITPCSFGGVSVITPGTNTSNQVAVLYQGVNCTEVPVAIHADQLTPTWRVYSTGSNVFQTRAGCLIGAEHVNNSYECDIPIGAGICASYQTQTNSPRRARSVASQSIIAYTMSLGAENSVAYSNNSIAIPTNFTISVTTEILPVSMTKTSVDCTMYICGDSTECSNLLLQYGSFCTQLNRALTGIALEQDKNTQEVFAQVKQIYKTPPIKDFGGFNFSQILPDPSKPSKRSFIEDLLFNKVTLADAGFIKQYGDCLGDIAARDLICAQKFNGLTVLPPLLTDEMIAQYTSALLAGTITSGWTFGAGAALQIPFAMQMAYRFNGIGVTQNVLYENQKLIANQFNSAIGKIQDSLSSTASALGKLQDVVNQNAQALNTLVKQLSSNFGAISSVLNDILSRLDPPEAEVQIDRLITGRLQSLQTYVTQQLIRAAEIRASANLAATKMSECVLGQSKRVDFCGKGYQLMSFPQSAPHGVVFLNVTYVPAQEKNFTTAPAICNDGKAHFPREGVFVSNGTNWFVTQRNFYEPQIITTDNTFVSGNCDVVIGIVNNTVYDPLQPELDSGGGGSDIDPYKEFGSSYQLLNFLPLDFFPDLNALVDTATALYEEELTGREHCSPHHTAIRQALVCWDELTKLIAWMSSNITSEQVRTIIVNHVNDTWGLKVRQSLWFHLSCLTFGQHTVQEFLVSFGVWIRTPAPYRPPNAPILSTLPEHTVIC

SEQ ID NO: 10961 - protein, 1301 aa, Artificial Sequence
  SARS-CoV-2/USA/WA-UW31/2020__EPI_ISL_414618 spike protein (1-1147)(K986P_V987P_ H1048Q_H1064N_ H1083N_H1101N) WhcAg construct
MFVFLVLLPLVSSQCVNLTTRTQLPPAYTNSFTRGVYYPDKVFRSSVLHSTQDLFLPFFSNVTWFHAIHVSGTNGTKRFDNPVLPFNDGVYFASTEKSNIIRGWIFGTTLDSKTQSLLIVNNATNVVIKVCEFQFCNDPFLGVYYHKNNKSWMESEFRVYSSANNCTFEYVSQPFLMDLEGKQGNFKNLREFVFKNIDGYFKIYSKHTPINLVRDLPQGFSALEPLVDLPIGINITRFQTLLALHRSYLTPGDSSSGWTAGAAAYYVGYLQPRTFLLKYNENGTITDAVDCALDPLSETKCTLKSFTVEKGIYQTSNFRVQPTESIVRFPNITNLCPFGEVFNATRFASVYAWNRKRISNCVADYSVLYNSASFSTFKCYGVSPTKLNDLCFTNVYADSFVIRGDEVRQIAPGQTGKIADYNYKLPDDFTGCVIAWNSNNLDSKVGGNYNYLYRLFRKSNLKPFERDISTEIYQAGSTPCNGAEGFNCYFPLQSYGFQPTNGVGYQPYRVVVLSFELLHAPATVCGPKKSTNLVKNKCVNFNFNGLTGTGVLTESNKKFLPFQQFGRDIADTTDAVRDPQTLEILDITPCSFGGVSVITPGTNTSNQVAVLYQDVNCTEVPVAIHADQLTPTWRVYSTGSNVFQTRAGCLIGAEHVNNSYECDIPIGAGICASYQTQTNSPRRARSVASQSIIAYTMSLGAENSVAYSNNSIAIPTNFTISVTTEILPVSMTKTSVDCTMYICGDSTECSNLLLQYGSFCTQLNRALTGIAVEQDKNTQEVFAQVKQIYKTPPIKDFGGFNFSQILPDPSKPSKRSFIEDLLFNKVTLADAGFIKQYGDCLGDIAARDLICAQKFNGLTVLPPLLTDEMIAQYTSALLAGTITSGWTFGAGAALQIPFAMQMAYRFNGIGVTQNVLYENQKLIANQFNSAIGKIQDSLSSTASALGKLQDVVNQNAQALNTLVKQLSSNFGAISSVLNDILSRLDPPEAEVQIDRLITGRLQSLQTYVTQQLIRAAEIRASANLAATKMSECVLGQSKRVDFCGKGYQLMSFPQSAPHGVVFLNVTYVPAQEKNFTTAPAICNDGKAHFPREGVFVSNGTNWFVTQRNFYEPQIITTDNTFVSGNCDVVIGIVNNTVYDPLQPELDSGGGGSDIDPYKEFGSSYQLLNFLPLDFFPDLNALVDTATALYEEELTGREHCSPHHTAIRQALVCWDELTKLIAWMSSNITSEQVRTIIVNHVNDTWGLKVRQSLWFHLSCLTFGQHTVQEFLVSFGVWIRTPAPYRPPNAPILSTLPEHTVIC

SEQ ID NO: 10962 - protein, 1301 aa, Artificial Sequence
  SARS-CoV-2/South Korea/SNU01/2020__EPI_ISL_411929 spike protein (1-1147)(K986P_V987P_ H1048Q_H1064N_ H1083N_H1101N) WhcAg construct
MFVFLVLLPLVSSQCVNLTTRTQLPPAYTNSFTRGVYYPDKVFRSSVLHSTQDLFLPFFSNVTWFHAIHVSGTNGTKRFDNPVLPFNDGVYFASTEKSNIIRGWIFGTTLDSKTQSLLIVNNATNVVIKVCEFQFCNDPFLGVYYHKNNKSWMESEFRVYSSANNCTFEYVSQPFLMDLEGKQGNFKNLREFVFKNIDGYFKIYSKHTPINLVRDLPQGFWALEPLVDLPIGINITRFQTLLALHRSYLTPGDSSSGWTAGAAAYYVGYLQPRTFLLKYNENGTITDAVDCALDPLSETKCTLKSFTVEKGIYQTSNFRVQPTESIVRFPNITNLCPFGEVFNATRFASVYAWNRKRISNCVADYSVLYNSASFSTFKCYGVSPTKLNDLCFTNVYADSFVIRGDEVRQIAPGQTGKIADYNYKLPDDFTGCVIAWNSNNLDSKVGGNYNYLYRLFRKSNLKPFERDISTEIYQAGSTPCNGVEGFNCYFPLQSYGFQPTNGVGYQPYRVVVLSFELLHAPATVCGPKKSTNLVKNKCVNFNFNGLTGTGVLTESNKKFLPFQQFGRDIADTTDAVRDPQTLEILDITPCSFGGVSVITPGTNTSNQVAVLYQDVNCTEVPVAIHADQLTPTWRVYSTGSNVFQTRAGCLIGAEHVNNSYECDIPIGAGICASYQTQTNSPRRARSVASQSIIAYTMSLGAENSVAYSNNSIAIPTNFTISVTTEILPVSMTKTSVDCTMYICGDSTECSNLLLQYGSFCTQLNRALTGIAVEQDKNTQEVFAQVKQIYKTPPIKDFGGFNFSQILPDPSKPSKRSFIEDLLFNKVTLADAGFIKQYGDCLGDIAARDLICAQKFNGLTVLPPLLTDEMIAQYTSALLAGTITSGWTFGAGAALQIPFAMQMAYRFNGIGVTQNVLYENQKLIANQFNSAIGKIQDSLSSTASALGKLQDVVNQNAQALNTLVKQLSSNFGAISSVLNDILSRLDPPEAEVQIDRLITGRLQSLQTYVTQQLIRAAEIRASANLAATKMSECVLGQSKRVDFCGKGYQLMSFPQSAPHGVVFLNVTYVPAQEKNFTTAPAICNDGKAHFPREGVFVSNGTNWFVTQRNFYEPQIITTDNTFVSGNCDVVIGIVNNTVYDPLQPELDSGGGGSDIDPYKEFGSSYQLLNFLPLDFFPDLNALVDTATALYEEELTGREHCSPHHTAIRQALVCWDELTKLIAWMSSNITSEQVRTIIVNHVNDTWGLKVRQSLWFHLSCLTFGQHTVQEFLVSFGVWIRTPAPYRPPNAPILSTLPEHTVIC

SEQ ID NO: 10963 - protein, 1301 aa, Artificial Sequence
  SARS-CoV-2/China/WF0004/2020__EPI_ISL_413694 spike protein (1-1147)(K986P_V987P_ H1048Q_H1064N_ H1083N_H1101N) WhcAg construct
MFVFLVLLPLVSSQCVNLTTRTQLPPAYTNSFTRGVYYPDKVFRSSVLHSTQDLFLPFFSNVTWFHAIHVSGTNGTKRFDNPVLPFNDGVYFASTEKSNIIRGWIFGTTLDSKTQSLLIVNNATNVVIKVCEFQFCNDPFLGVYYHKNNKSWTESEFRVYSSANNCTFEYVSQPFLMDLEGKQGNFKNLREFVFKNIDGYFKIYSKHTPINLVRDLPQGFSALEPLVDLPIGINITRFQTLLALHRSYLTPGDSSSGWTAGAAAYYVGYLQPRTFLLKYNENGTITDAVDCALDPLSETKCTLKSFTVEKGIYQTSNFRVQPTESIVRFPNITNLCPFGEVFNATRFASVYAWNRKRISNCVADYSVLYNSASFSTFKCYGVSPTKLNDLCFTNVYADSFVIRGDEVRQIAPGQTGKIADYNYKLPDDFTGCVIAWNSNNLDSKVGGNYNYLYRLFRKSNLKPFERDISTEIYQAGSTPCNGVEGFNCYFPLQSYGFQPTNGVGYQPYRVVVLSFELLHAPATVCGPKKSTNLVKNKCVNFNFNGLTGTGVLTESNKKFLPFQQFGRDIADTTDAVRDPQTLEILDITPCSFGGVSVITPGTNTSNQVAVLYQDVNCTEVPVAIHADQLTPTWRVYSTGSNVFQTRAGCLIGAEHVNNSYECDIPIGAGICASYQTQTNSPRRARSVASQSIIAYTMSLGAENSVAYSNNSIAIPTNFTISVTTEILPVSMTKTSVDCTMYICGDSTECSNLLLQYGSFCTQLNRALTGIAVEQDKNTQEVFAQVKQIYKTPPIKDFGGFNFSQILPDPSKPSKRSFIEDLLFNKVTLADAGFIKQYGDCLGDIAARDLICAQKFNGLTVLPPLLTDEMIAQYTSALLAGTITSGWTFGAGAALQIPFAMQMAYRFNGIGVTQNVLYENQKLIANQFNSAIGKIQDSLSSTASALGKLQDVVNQNAQALNTLVKQLSSNFGAISSVLNDILSRLDPPEAEVQIDRLITGRLQSLQTYVTQQLIRAAEIRASANLAATKMSECVLGQSKRFDFCGKGYQLMSFPQSAPHGVVFLNVTYVPAQEKNFTTAPAICNDGKAHFPREGVFVSNGTNWFVTQRNFYEPQIITTDNTFVSGNCDVVIGIVNNTVYDPLQPELDSGGGGSDIDPYKEFGSSYQLLNFLPLDFFPDLNALVDTATALYEEELTGREHCSPHHTAIRQALVCWDELTKLIAWMSSNITSEQVRTIIVNHVNDTWGLKVRQSLWFHLSCLTFGQHTVQEFLVSFGVWIRTPAPYRPPNAPILSTLPEHTVIC

SEQ ID NO: 10964 - protein, 1301 aa, Artificial Sequence
  SARS-CoV-2/China/WF0028/2020__EPI_ISL_413791 spike protein (1-1147)(K986P_V987P_ H1048Q_H1064N_ H1083N_H1101N) WhcAg construct
MFVFLVLLPLVSSQCVNLTTRTQLPPAYTNSFTRGVYYPDKVFRSSVLHSTQDLFLPFFSNVTWFHAIHVSGTNGTKRFDNPVLPFNDGVYFASTEKSNIIRGWIFGTTLDSKTQSLLIVNNATNVVIKVCEFQFCNDPFLGVYYHKNNKSWMESEFRVYSSANNCTFEYVSQPFLMDLEGKQGNFKNLREFVFKNIDGYFKIYSKHTPINLVRDLPQGFSALEPLVDLPIGINITRFQTLLALHRSYLTPGDSSSGWTAGAAAYYVGYLQPRTFLLKYNENGTITDAVDCALDPLSETKCTLKSFTVEKGIYQTSNFRVQPTESIVRFPNITNLCPFGEVFNATRFASVYAWNRKRISNCVADYSVLYNSASFSTFKCYGVSPTKLNDLCFTNVYADSFVIRGDEVRQIAPGQTGKIADYNYKLPDDFTGCVIAWNSNNLDSKVGGNYNYLYRLFRKSNLKPFERDISTEIYQAGSTPCNGVEGFNCYFPLQSYGFQPTNGVGYQPYRVVVLSFELLHAPATVCGPKKSTNLVKNKCVNFNFNGLTGTGVLTESNKKFLPFQQFGRDIADTTDAVRDPQTLEILDITPCSFGGVSVITPGTNTSNQVAVLYQDVNCTEVPVAIHADQLTPTWRVYSTGSNVFQTRAGCLIGAEHVNNSYECDIPIGAGICASYQTQTNSPRRARSVASQSIIAYTMSLGAENSVAYSNNSIAIPTNFTISVTTEILPVSMTKTSVDCTMYICGDSTECSNLLLQYGSFCTQLNRALTGIAVEQDKNTQEVFAQVKQIYKTPPIKDFGGFNFSQILPDPSKPSKRSFIEDLLFNKVTLADAGFIKQYGDCLGDIAARDLICAQKFNGLTVLPPLLTDEMIAQYTSALLAGTITSGWTFGAGAALQIPFAMQMAYRFNGIGVTQNVLYENQKLIANQFNSAIGKIQDSLSSTASALGKLQDVVNQNAQALNTLVKQLSSNFGAISSVLNDILSRLDPPEAEVQIDRLITGRLQSLQTYVTQQLIRAAEIRASANLAATKMSECVLGQSKRVDFCGKGYQLMSFPQSAPHGVVFLNVTYVPAQEKNFTTAPAICNDGKAHFPREGVFVSNGTNWFVTQRNFYEPQIITTDNTFVSGNCDVVIGIVNNTVYDPLQPELESGGGGSDIDPYKEFGSSYQLLNFLPLDFFPDLNALVDTATALYEEELTGREHCSPHHTAIRQALVCWDELTKLIAWMSSNITSEQVRTIIVNHVNDTWGLKVRQSLWFHLSCLTFGQHTVQEFLVSFGVWIRTPAPYRPPNAPILSTLPEHTVIC

SEQ ID NO: 10965 - protein, 1301 aa, Artificial Sequence
  SARS-CoV-2/2019-nCoV/USA-CruiseA-18/2020__MT159716.1 spike protein (1-1147)(K986P_V987P_ H1048Q_H1064N_ H1083N_H1101N) WhcAg construct
MFVFLVLLPLVSSQCVNLTTRTQLPPAYTNSFTRGVYYPDKVFRSSVLHSTQDLFLPFFSNVTWFHAIHVSGTNGTKRFDNPVLPFNDGVYFASTEKSNIIRGWIFGTTLDSKTQSLLIVNNATNVVIKVCEFQFCNDPFLGVYYHKNNKSWMESELRVYSSANNCTFEYVSQPFLMDLEGKQGNFKNLREFVFKNIDGYFKIYSKHTPINLVRDLPQGFSALEPLVDLPIGINITRFQTLLALHRSYLTPGDSSSGWTAGAAAYYVGYLQPRTFLLKYNENGTITDAVDCALDPLSETKCTLKSFTVEKGIYQTSNFRVQPTESIVRFPNITNLCPFGEVFNATRFASVYAWNRKRISNCVADYSVLYNSASFSTFKCYGVSPTKLNDLCFTNVYADSFVIRGDEVRQIAPGQTGKIADYNYKLPDDFTGCVIAWNSNNLDSKVGGNYNYLYRLFRKSNLKPFERDISTEIYQAGSTPCNGVEGFNCYFPLQSYGFQPTNGVGYQPYRVVVLSFELLHAPATVCGPKKSTNLVKNKCVNFNFNGLTGTGVLTESNKKFLPFQQFGRDIADTTDAVRDPQTLEILDITPCSFGGVSVITPGTNTSNQVAVLYQDVNCTEVPVAIHADQLTPTWRVYSTGSNVFQTRAGCLIGAEHVNNSYECDIPIGAGICASYQTQTNSPRRARSVASQSIIAYTMSLGAENSVAYSNNSIAIPTNFTISVTTEILPVSMTKTSVDCTMYICGDSTECSNLLLQYGSFCTQLNRALTGIAVEQDKNTQEVFAQVKQIYKTPPIKDFGGFNFSQILPDPSKPSKRSFIEDLLFNKVTLADAGFIKQYGDCLGDIAARDLICAQKFNGLTVLPPLLTDEMIAQYTSALLAGTITSGWTFGAGAALQIPFAMQMAYRFNGIGVTQNVLYENQKLIANQFNSAIGKIQDSLSSTASALGKLQDVVNQNAQALNTLVKQLSSNFGAISSVLNDILSRLDPPEAEVQIDRLITGRLQSLQTYVTQQLIRAAEIRASANLAATKMSECVLGQSKRVDFCGKGYQLMSFPQSAPHGVVFLNVTYVPAQEKNFTTAPAICNDGKAHFPREGVFVSNGTNWFVTQRNFYEPQIITTDNTFVSGNCDVVIGIVNNTVYDPLQPELDSGGGGSDIDPYKEFGSSYQLLNFLPLDFFPDLNALVDTATALYEEELTGREHCSPHHTAIRQALVCWDELTKLIAWMSSNITSEQVRTIIVNHVNDTWGLKVRQSLWFHLSCLTFGQHTVQEFLVSFGVWIRTPAPYRPPNAPILSTLPEHTVIC

SEQ ID NO: 10966 - protein, 1301 aa, Artificial Sequence
  SARS-CoV-2/SARS-CoV-2/Yunnan-01/human/2020/CHN__MT049951.1 spike protein (1-1147)(K986P_V987P_ H1048Q_H1064N_ H1083N_H1101N) WhcAg construct
MFVFLVLLPLVSSQCVNLTTRTQLPPANTNSFTRGVYYPDKVFRSSVLHSTQDLFLPFFSNVTWFHAIHVSGTNGTKRFDNPVLPFNDGVYFASTEKSNIIRGWIFGTTLDSKTQSLLIVNNATNVVIKVCEFQFCNDPFLGVYYHKNNKSWMESEFRVYSSANNCTFEYVSQPFLMDLEGKQGNFKNLREFVFKNIDGYFKIYSKHTPINLVRDLPQGFSALEPLVDLPIGINITRFQTLLALHRSYLTPGDSSSGWTAGAAAYYVGYLQPRTFLLKYNENGTITDAVDCALDPLSETKCTLKSFTVEKGIYQTSNFRVQPTESIVRFPNITNLCPFGEVFNATRFASVYAWNRKRISNCVADYSVLYNSASFSTFKCYGVSPTKLNDLCFTNVYADSFVIRGDEVRQIAPGQTGKIADYNYKLPDDFTGCVIAWNSNNLDSKVGGNYNYLYRLFRKSNLKPFERDISTEIYQAGSTPCNGVEGFNCYFPLQSYGFQPTNGVGYQPYRVVVLSFELLHAPATVCGPKKSTNLVKNKCVNFNFNGLTGTGVLTESNKKFLPFQQFGRDIADTTDAVRDPQTLEILDITPCSFGGVSVITPGTNTSNQVAVLYQDVNCTEVPVAIHADQLTPTWRVYSTGSNVFQTRAGCLIGAEHVNNSYECDIPIGAGICASYQTQTNSPRRARSVASQSIIAYTMSLGAENSVAYSNNSIAIPTNFTISVTTEILPVSMTKTSVDCTMYICGDSTECSNLLLQYGSFCTQLNRALTGIAVEQDKNTQEVFAQVKQIYKTPPIKDFGGFNFSQILPDPSKPSKRSFIEDLLFNKVTLADAGFIKQYGDCLGDIAARDLICAQKFNGLTVLPPLLTDEMIAQYTSALLAGTITSGWTFGAGAALQIPFAMQMAYRFNGIGVTQNVLYENQKLIANQFNSAIGKIQDSLSSTASALGKLQDVVNQNAQALNTLVKQLSSNFGAISSVLNDILSRLDPPEAEVQIDRLITGRLQSLQTYVTQQLIRAAEIRASANLAATKMSECVLGQSKRVDFCGKGYQLMSFPQSAPHGVVFLNVTYVPAQEKNFTTAPAICNDGKAHFPREGVFVSNGTNWFVTQRNFYEPQIITTDNTFVSGNCDVVIGIVNNTVYDPLQPELDSGGGGSDIDPYKEFGSSYQLLNFLPLDFFPDLNALVDTATALYEEELTGREHCSPHHTAIRQALVCWDELTKLIAWMSSNITSEQVRTIIVNHVNDTWGLKVRQSLWFHLSCLTFGQHTVQEFLVSFGVWIRTPAPYRPPNAPILSTLPEHTVIC

SEQ ID NO: 10967 - protein, 1301 aa, Artificial Sequence
  SARS-CoV-2/USA/WA-UW292/2020__EPI_ISL_418077 spike protein (1-1147)(K986P_V987P_ H1048Q_H1064N_ H1083N_H1101N) WhcAg construct
MFVFLVLLPLVSSQCVNLTTRTQLPPAYTNSFTRGVYYPDKVFRSSVLHSTQDLFLPFFSNVTWFHAIHVSGTNGTKRFDNPVLPFNDGVYFASTEKSNIIRGWIFGTTLDSKTQSLLIVNNATNVVIKVCEFQFCNDPFLGVYYHKNNKSWMESEFRVYSSANNCTFEYVSQPFLMDLEGKQGNFKNLREFVFKNIDGYFKIYSKHTPINLVRDLPQGFSALEPLVDLPIGINITRFQTLLALHRSYLTPGDSSSGWTAGAAAYYVGYLQPRTFLLKYNENGTITDAVDCALDPLSETKCTLKSFTVEKGIYQTSNFRVQPTESIVRFPNITNLCPFGEVFNATRFASVYAWNRKRISNCVADYSVLYNSASFSTFKCYGVSPTKLNDLCFTNVYADSFVIRGDEVRQIAPGQTGKIADYNYKLPDDFTGCVIAWNSNNLDSKVGGNYNYLYRLFRKSNLKPFERDISTEIYQASSTPCNGVEGFNCYFPLQSYGFQPTNGVGYQPYRVVVLSFELLHAPATVCGPKKSTNLVKNKCVNFNFNGLTGTGVLTESNKKFLPFQQFGRDIADTTDAVRDPQTLEILDITPCSFGGVSVITPGTNTSNQVAVLYQDVNCTEVPVAIHADQLTPTWRVYSTGSNVFQTRAGCLIGAEHVNNSYECDIPIGAGICASYQTQTNSPRRARSVASQSIIAYTMSLGAENSVAYSNNSIAIPTNFTISVTTEILPVSMTKTSVDCTMYICGDSTECSNLLLQYGSFCTQLNRALTGIAVEQDKNTQEVFAQVKQIYKTPPIKDFGGFNFSQILPDPSKPSKRSFIEDLLFNKVTLADAGFIKQYGDCLGDIAARDLICAQKFNGLTVLPPLLTDEMIAQYTSALLAGTITSGWTFGAGAALQIPFAMQMAYRFNGIGVTQNVLYENQKLIANQFNSAIGKIQDSLSSTASALGKLQDVVNQNAQALNTLVKQLSSNFGAISSVLNDILSRLDPPEAEVQIDRLITGRLQSLQTYVTQQLIRAAEIRASANLAATKMSECVLGQSKRVDFCGKGYQLMSFPQSAPHGVVFLNVTYVPAQEKNFTTAPAICNDGKAHFPREGVFVSNGTNWFVTQRNFYEPQIITTDNTFVSGNCDVVIGIVNNTVYDPLQPELDSGGGGSDIDPYKEFGSSYQLLNFLPLDFFPDLNALVDTATALYEEELTGREHCSPHHTAIRQALVCWDELTKLIAWMSSNITSEQVRTIIVNHVNDTWGLKVRQSLWFHLSCLTFGQHTVQEFLVSFGVWIRTPAPYRPPNAPILSTLPEHTVIC

SEQ ID NO: 10968 - protein, 1301 aa, Artificial Sequence
  SARS-CoV-2/Iceland/192/2020__EPI_ISL_417819 spike protein (1-1147)(K986P_V987P_ H1048Q_H1064N_ H1083N_H1101N) WhcAg construct
MFVFFVLLPLVSSQCVNLTTRTQLPPAYTNSFTRGVYYPDKVFRSSVLHSTQDLFLPFFSNVTWFHAIHVSGTNGTKRFDNPVLPFNDGVYFASTEKSNIIRGWIFGTTLDSKTQSLLIVNNATNVVIKVCEFQFCNDPFLGVYYHKNNKSWMESEFRVYSSANNCTFEYVSQPFLMDLEGKQGNFKNLREFVFKNIDGYFKIYSKHTPINLVRDLPQGFSALEPLVDLPIGINITRFQTLLALHRSYLTPGDSSSGWTAGAAAYYVGYLQPRTFLLKYNENGTITDAVDCALDPLSETKCTLKSFTVEKGIYQTSNFRVQPTESIVRFPNITNLCPFGEVFNATRFASVYAWNRKRISNCVADYSVLYNSASFSTFKCYGVSPTKLNDLCFTNVYADSFVIRGDEVRQIAPGQTGKIADYNYKLPDDFTGCVIAWNSNNLDSKVGGNYNYLYRLFRKSNLKPFERDISTEIYQAGSTPCNGVEGFNCYFPLQSYGFQPTNGVGYQPYRVVVLSFELLHAPATVCGPKKSTNLVKNKCVNFNFNGLTGTGVLTESNKKFLPFQQFGRDIADTTDAVRDPQTLEILDITPCSFGGVSVITPGTNTSNQVAVLYQGVNCTEVPVAIHADQLTPTWRVYSTGSNVFQTRAGCLIGAEHVNNSYECDIPIGAGICASYQTQTNSPRRARSVASQSIIAYTMSLGAENSVAYSNNSIAIPTNFTISVTTEILPVSMTKTSVDCTMYICGDSTECSNLLLQYGSFCTQLNRALTGIAVEQDKNTQEVFAQVKQIYKTPPIKDFGGFNFSQILPDPSKPSKRSFIEDLLFNKVTLADAGFIKQYGDCLGDIAARDLICAQKFNGLTVLPPLLTDEMIAQYTSALLAGTITSGWTFGAGAALQIPFAMQMAYRFNGIGVTQNVLYENQKLIANQFNSAIGKIQDSLSSTASALGKLQDVVNQNAQALNTLVKQLSSNFGAISSVLNDILSRLDPPEAEVQIDRLITGRLQSLQTYVTQQLIRAAEIRASANLAATKMSECVLGQSKRVDFCGKGYQLMSFPQSAPHGVVFLNVTYVPAQEKNFTTAPAICNDGKAHFPREGVFVSNGTNWFVTQRNFYEPQIITTDNTFVSGNCDVVIGIVNNTVYDPLQPELDSGGGGSDIDPYKEFGSSYQLLNFLPLDFFPDLNALVDTATALYEEELTGREHCSPHHTAIRQALVCWDELTKLIAWMSSNITSEQVRTIIVNHVNDTWGLKVRQSLWFHLSCLTFGQHTVQEFLVSFGVWIRTPAPYRPPNAPILSTLPEHTVIC

SEQ ID NO: 10969 - protein, 1301 aa, Artificial Sequence
  SARS-CoV-2/Belgium/ULG-6939/2020__EPI_ISL_417020 spike protein (1-1147)(K986P_V987P_ H1048Q_H1064N_ H1083N_H1101N) WhcAg construct
MFVFLVLLPLVSSQCVNLTTRTQLPPAYTNSFTRGVYYPDKVFRSSVLHSTQDLFLPFFSNVTWFHAIHVSGTNGTKRFDNPVLPFNDGVYFASTEKSNIIRGWIFGTTLDSKTQSLLIVNNATNVVIKVCEFQFCNDPFLGVYYHKNNKSWMESEFRVYSSANNCTFEYVSQPFLMDLEGKQGNFKNLREFVFKNIDGYFKIYSKHTPINLVRDLPQGFSALEPLVDLPIGINITRFQTLLALHRSYLTPGDSSSGWTAGAAAYYVGYLQPRTFLLKYNENGTITDAVDCALDPLSETKCTLKSFTVEKGIYQTSNFRVQPTESIVRFPNITNLCPFGEVFNATRFASVYAWNRKRISNCVADYSVLYNSASFSTFKCYGVSPTKLNDLCFTNVYADSFVIRGDEVRQIAPGQTGKIADYNYKLPDDFTGCVIAWNSNNLDSKVGGNYNYLYRLFRKSNLKPFERDISTEIYQAGSTPCNGVEGFNCYFPLQSYGFQPTNGVGYQPYRVVVLSFELLHAPATVCGPKKSTNLVKNKCVNFNFNGLTGTGVLTESNKKFLPFQQFGRDIADTTDAVRDPQTLEILDITPCSFGGVSVITPGTNTSNQVAVLYQGVNCTEVPVAIHADQLTPTWRVYSTGSNVFQTRAGCLIGAEHVNNSYECDIPIGAGICASYQTQTNSPRRARSVASQSIIAYTMSLGAENSVVYSNNSIAIPTNFTISVTTEILPVSMTKTSVDCTMYICGDSTECSNLLLQYGSFCTQLNRALTGIAVEQDKNTQEVFAQVKQIYKTPPIKDFGGFNFSQILPDPSKPSKRSFIEDLLFNKVTLADAGFIKQYGDCLGDIAARDLICAQKFNGLTVLPPLLTDEMIAQYTSALLAGTITSGWTFGAGAALQIPFAMQMAYRFNGIGVTQNVLYENQKLIANQFNSAIGKIQDSLSSTASALGKLQDVVNQNAQALNTLVKQLSSNFGAISSVLNDILSRLDPPEAEVQIDRLITGRLQSLQTYVTQQLIRAAEIRASANLAATKMSECVLGQSKRVDFCGKGYQLMSFPQSAPHGVVFLNVTYVPAQEKNFTTAPAICNDGKAHFPREGVFVSNGTNWFVTQRNFYEPQIITTDNTFVSGNCDVVIGIVNNTVYDPLQPELDSGGGGSDIDPYKEFGSSYQLLNFLPLDFFPDLNALVDTATALYEEELTGREHCSPHHTAIRQALVCWDELTKLIAWMSSNITSEQVRTIIVNHVNDTWGLKVRQSLWFHLSCLTFGQHTVQEFLVSFGVWIRTPAPYRPPNAPILSTLPEHTVIC

SEQ ID NO: 10970 - protein, 1301 aa, Artificial Sequence
  SARS-CoV-2/France/HF2496/2020__EPI_ISL_418231 spike protein (1-1147)(K986P_V987P_ H1048Q_H1064N_ H1083N_H1101N) WhcAg construct
MFVFLVLLPLVSSQCVNLTTRTQLPPAYTNSFTRGVYYPDKVFRSSVLHSTQDLFLPFFSNVTWFHAIHVSGTNGTKRFDNPVLPFNDGVYFASTEKSNIIRGWIFGTTLDSKTQSLLIVNNATNVVIKVCEFQFCNDPFLGVYYHKNNKSWMESEFRVYSSANNCTFEYVSQPFLMDLEGKQGNFKNLREFVFKNIDGYFKIYSKHTPINLVRDLPQGFSALEPLVDLPIGINITRFQTLLALHRSYLTPGDSSSGWTAGAAAYYVGYLQPRTFLLKYNENGTITDAVDCALDPLSETKCTLKSFTVEKGIYQTSNFRVQPTESIVRFPNITNLCPFGEVFNATRFASVYAWNRKRISNCVADYSVLYNSASFSTFKCYGVSPTKLNDLCFTNVYADSFVIRGDEVRQIAPGQTGKIADYNYKLPDDFTGCVIAWNSNNLDSKVGGNYNYLYRLFRKSNLKPFERDISTEIYQAGSTPCNGVEGFNCYFPLQSYGFQPTNGVGYQPYRVVVLSFELLHAPATVCGPKKSTNLVKNKCVNFNFNGLTGTGVLTESNKKFLPFQQFGRDIADTTDAVRDPQTLEILDITPCSFGGVSVITPGTNTSNQVAVLYQGVNCTEVPVAIHADQLTPTWRVYSTGSNVFQTRAGCLIGAEHVNNSYECDIPIGAGICASYQTQTNSPRRARSVASQSIIAYTMSLGAENSVAYSNNSIAIPTNFTISVTTEILPVSMTKTSVDCTMYICGDSTECSNLLLQYGSFCTQLNRALTGIAVEQDKNTQEVFAQVKQIYKTPPIKDFGGFNFSQILPDPSKPSKRSFIEDLLFNKVTLADAGFIKQYGDCLGDIVARDLICAQKFNGLTVLPPLLTDEMIAQYTSALLAGTITSGWTFGAGAALQIPFAMQMAYRFNGIGVTQNVLYENQKLIANQFNSAIGKIQDSLSSTASALGKLQDVVNQNAQALNTLVKQLSSNFGAISSVLNDILSRLDPPEAEVQIDRLITGRLQSLQTYVTQQLIRAAEIRASANLAATKMSECVLGQSKRVDFCGKGYQLMSFPQSAPHGVVFLNVTYVPAQEKNFTTAPAICNDGKAHFPREGVFVSNGTNWFVTQRNFYEPQIITTDNTFVSGNCDVVIGIVNNTVYDPLQPELDSGGGGSDIDPYKEFGSSYQLLNFLPLDFFPDLNALVDTATALYEEELTGREHCSPHHTAIRQALVCWDELTKLIAWMSSNITSEQVRTIIVNHVNDTWGLKVRQSLWFHLSCLTFGQHTVQEFLVSFGVWIRTPAPYRPPNAPILSTLPEHTVIC

SEQ ID NO: 10971 - protein, 1301 aa, Artificial Sequence
  SARS-CoV-2/USA/WA-UW291/2020__EPI_ISL_418076 spike protein (1-1147)(K986P_V987P_ H1048Q_H1064N_ H1083N_H1101N) WhcAg construct
MFVFLVLLPLVSSQCVNLTTRTQLPPAYTNSFTRGVYYPDKVFRSSVLHSTQDLFLPFFSNVTWFHAIHVSGTNGTKRFDNPVLPFNDGVYFASTEKSNIIRGWIFGTTLDSKTQSLLIVNNATNVVIKVCEFQFCNDPFLGVYYHKNNKSWMESEFRVYSSANNCTFEYVSQPFLMDLEGKQGNFKNLREFVFKNIDGYFKIYSKHTPINLVRDLPQGFSALEPLVDLPIGINITRFQTLLALHRSYLTPGDSSSGWTAGAAAYYVGYLQPRTFLLKYNENGTITDAVDCALDPLSETKCTLKSFTVEKGIYQTSNFRVQPTESIVRFPNITNLCPFGEVFNATRFASVYAWNRKRISNCVADYSVLYNSASFSTFKCYGVSPTKLNDLCFTNVYADSFVIRGDEVRQIAPGQTGKIADYNYKLPDDFTGCVIAWNSNNLDSKVGGNYNYLYRLFRKSNLKPFERDISTEIYQAGSTPCNGVEGFNCYFPLQSYGFQPTNGVGYQPYRVVVLSFELLHAPATVCGPKKSTNLVKNKCVNFNFNGLTGTGVLTESNKKFLPFQQFGRDIADTTDAVRDPQTLEILDITPCSFGGVSVITPGTNTSNQVAVLYQGVNCTEVPVAIHADQLTPTWRVYSTGSNVFQTRAGCLIGAEHVNNSYECDIPIGAGICASYQTQTNSPRRARSVASQSIIAYTMSLGAENSVAYSNNSIAIPTNFTISVTTEILPVSMTKTSVDCTMYICGDSTECSNLLLQYGSFCTQLNRALTGIAVEQDKNTQEVFAQVKQIYKTPPIKDFGGFNFSQILPDPSKPSKRSFIEDLLFNKVTLADAGFIKQYGDCLGDIAARDLICAQKFNGLTVLPPLLTDEMIAQYTSALLAGTITSGWTFGAGAALQIPFAMQMAYRFNGIGVTQNVLYENQKLIANQFNSAIGKIQYSLSSTASALGKLQDVVNQNAQALNTLVKQLSSNFGAISSVLNDILSRLDPPEAEVQIDRLITGRLQSLQTYVTQQLIRAAEIRASANLAATKMSECVLGQSKRVDFCGKGYQLMSFPQSAPHGVVFLNVTYVPAQEKNFTTAPAICNDGKAHFPREGVFVSNGTNWFVTQRNFYEPQIITTDNTFVSGNCDVVIGIVNNTVYDPLQPELDSGGGGSDIDPYKEFGSSYQLLNFLPLDFFPDLNALVDTATALYEEELTGREHCSPHHTAIRQALVCWDELTKLIAWMSSNITSEQVRTIIVNHVNDTWGLKVRQSLWFHLSCLTFGQHTVQEFLVSFGVWIRTPAPYRPPNAPILSTLPEHTVIC

SEQ ID NO: 10972 - protein, 1301 aa, Artificial Sequence; identical to SEQ ID NO: 10935
  SARS-CoV-2/Portugal/PT0034/2020__EPI_ISL_418019 spike protein (1-1147)(K986P_V987P_ H1048Q_H1064N_ H1083N_H1101N) WhcAg construct

SEQ ID NO: 10973 - protein, 1301 aa, Artificial Sequence; identical to SEQ ID NO: 10927
  SARS-CoV-2/Iceland/202/2020__EPI_ISL_417750 spike protein (1-1147)(K986P_V987P_ H1048Q_H1064N_ H1083N_H1101N) WhcAg construct

SEQ ID NO: 10974 - protein, 1301 aa, Artificial Sequence
  SARS-CoV-2/USA/WA-UW261/2020__EPI_ISL_418046 spike protein (1-1147)(K986P_V987P_ H1048Q_H1064N_ H1083N_H1101N) WhcAg construct
MFVFLVLLPLVSSQCVNLTTRTQLPPAYTNSFTRGVYYPDKVFRSSVLHSTQDLFLPFFSNVTWFHAIHVSGTNGTKRFDNPVLPFNDGVYFASTEKSNIIRGWIFGTTLDSKTQSLLIVNNATNVVIKVCEFQFCNDPFLGVYYHKNNKSWMESEFRVYSSANNCTFEYVSQPFLMDLEGKQGNFKNLREFVFKNIDGYFKIYSKHTPINLVRDLPQGFSALEPLVDLPIGINITRFQTLLALHRSYLTPGDSSSGWTAGAAAYYVGYLQPRTFLLKYNENGTITDAVDCALDPLSETKCTLKSFTVEKGIYQTSNFRVQPTESIVRFPNITNLCPFGEVFNATRFTSVYAWNRKRISNCVADYSVLYNSASFSTFKCYGVSPTKLNDLCFTNVYADSFVIRGDEVRQIAPGQTGKIADYNYKLPDDFTGCVIAWNSNNLDSKVGGNYNYLYRLFRKSNLKPFERDISTEIYQAGSTPCNGVEGFNCYFPLQSYGFQPTNGVGYQPYRVVVLSFELLHAPATVCGPKKSTNLVKNKCVNFNFNGLTGTGVLTESNKKFLPFQQFGRDIADTTDAVRDPQTLEILDITPCSFGGVSVITPGTNTSNQVAVLYQDVNCTEVPVAIHADQLTPTWRVYSTGSNVFQTRAGCLIGAEHVNNSYECDIPIGAGICASYQTQTNSPRRARSVASQSIIAYTMSLGAENSVAYSNNSIAIPTNFTISVTTEILPVSMTKTSVDCTMYICGDSTECSNLLLQYGSFCTQLNRALTGIAVEQDKNTQEVFAQVKQIYKTPPIKDFGGFNFSQILPDPSKPSKRSFIEDLLFNKVTLADAGFIKQYGDCLGDIAARDLICAQKFNGLTVLPPLLTDEMIAQYTSALLAGTITSGWTFGAGAALQIPFAMQMAYRFNGIGVTQNVLYENQKLIANQFNSAIGKIQDSLSSTASALGKLQDVVNQNAQALNTLVKQLSSNFGAISSVLNDILSRLDPPEAEVQIDRLITGRLQSLQTYVTQQLIRAAEIRASANLAATKMSECVLGQSKRVDFCGKGYQLMSFPQSAPHGVVFLNVTYVPAQEKNFTTAPAICNDGKAHFPREGVFVSNGTNWFVTQRNFYEPQIITTDNTFVSGNCDVVIGIVNNTVYDPLQPELDSGGGGSDIDPYKEFGSSYQLLNFLPLDFFPDLNALVDTATALYEEELTGREHCSPHHTAIRQALVCWDELTKLIAWMSSNITSEQVRTIIVNHVNDTWGLKVRQSLWFHLSCLTFGQHTVQEFLVSFGVWIRTPAPYRPPNAPILSTLPEHTVIC

SEQ ID NO: 10975 - protein, 1301 aa, Artificial Sequence
  SARS-CoV-2/Portugal/PT0035/2020__EPI_ISL_418020 spike protein (1-1147)(K986P_V987P_ H1048Q_H1064N_ H1083N_H1101N) WhcAg construct
MFVFLVLLPLVSSQCVNLTTRTQLPPAYTNSFTRGVYYPDKVFRSSVLHSTQDLFLPFFSNVTWFHAIHVSGTNGTKRFDNPVLPFNDGVYFASTEKSNIIRGWIFGTTLDSKTQSLLIVNNATNVVIKVCEFQFCNDPFLGVYYHKNNKSWMESEFRVYSSANNCTFEYVSQPFLMDLEGKQGNFKNLREFVFKNIDGYFKIYSKHTPINLVRDLPQGFSALEPLVDLPIGINITRFQTLLALHRSYLTPGDSSSGWTAGAAAYYVGYLQPRTFLLKYNENGTITDAVDCALDPLSETKCTLKSFTVEKGIYQTSNFRVQPTESIVRFPNITNLCPFGEVFNATRFASVYAWNRKRISNCVADYSVLYNSASFSTFKCYGVSPTKLNDLCFTNVYADSFVIRGDEVRQIAPGQTGKIADYNYKLPDDFTGCVIAWNSNNLDSKVGGNYNYLYRLFRKSNLKPFERDISTEIYQAGSTPCNGVEGFNCYFPLQSYGFQPTNGVGYQPYRVVVLSFELLHAPATVCGPKKSTNLVKNKCVNFNFNGLTGTGVLTESNKKFLPFQQFGRDIADTTDAVRDPQTLEILDITPCSFGGVSVITPGTNTSNQVAVLYQDVNCTEVPVAIHADQLTPTWRVYSTGSNVFQTRAGCLIGAEHVNNSYECDIPIGAGICASYQTQTNSPRRARSVASQSIIAYTMSLGAENSVAYSNNSIAIPTNFTISVTTEILPVSMTKTSVDCTMYICGDSTECSNLLLQYGSFCTQLNRALTGIAVEQDKNTQEVFAQVKQIYKTPPIKDFGGFNFSQILPDPSKPSKRSFIEDLLFNKVTLADAGFIKQYGDCLGDISARDLICAQKFNGLTVLPPLLTDEMIAQYTSALLAGTITSGWTFGAGAALQIPFAMQMAYRFNGIGVTQNVLYENQKLIANQFNSAIGKIQDSLSSTASALGKLQDVVNQNAQALNTLVKQLSSNFGAISSVLNDILSRLDPPEAEVQIDRLITGRLQSLQTYVTQQLIRAAEIRASANLAATKMSECVLGQSKRVDFCGKGYQLMSFPQSAPHGVVFLNVTYVPAQEKNFTTAPAICNDGKAHFPREGVFVSNGTNWFVTQRNFYEPQIITTDNTFVSGNCDVVIGIVNNTVYDPLQPELDSGGGGSDIDPYKEFGSSYQLLNFLPLDFFPDLNALVDTATALYEEELTGREHCSPHHTAIRQALVCWDELTKLIAWMSSNITSEQVRTIIVNHVNDTWGLKVRQSLWFHLSCLTFGQHTVQEFLVSFGVWIRTPAPYRPPNAPILSTLPEHTVIC

SEQ ID NO: 10976 - protein, 1301 aa, Artificial Sequence
  SARS-CoV-2/USA/NY-NYUMC7/2020__EPI_ISL_418192 spike protein (1-1147)(K986P_V987P_ H1048Q_H1064N_ H1083N_H1101N) WhcAg construct
MFVFLVLLPLVSSQCVNLTTRTQLPPAYTNSFTRGVYYPDKVFRSSVLHSTQDLFLPFFSNVTWFHAIHVSGTNGTKRFDNPVLPFNDGVYFASTEKSNIIRGWIFGTTLDSKTQSLLIVNNATNVVIKVCEFQFCNDPFLGVYHHKNNKSWMESEFRVYSSANNCTFEYVSQPFLMDLEGKQGNFKNLREFVFKNIDGYFKIYSKHTPINLVRDLPQGFSALEPLVDLPIGINITRFQTLLALHRSYLTPGDSSSGWTAGAAAYYVGYLQPRTFLLKYNENGTITDAVDCALDPLSETKCTLKSFTVEKGIYQTSNFRVQPTESIVRFPNITNLCPFGEVFNATRFASVYAWNRKRISNCVADYSVLYNSASFSTFKCYGVSPTKLNDLCFTNVYADSFVIRGDEVRQIAPGQTGKIADYNYKLPDDFTGCVIAWNSNNLDSKVGGNYNYLYRLFRKSNLKPFERDISTEIYQAGSTPCNGVEGFNCYFPLQSYGFQPTNGVGYQPYRVVVLSFELLHAPATVCGPKKSTNLVKNKCVNFNFNGLTGTGVLTESNKKFLPFQQFGRDIADTTDAVRDPQTLEILDITPCSFGGVSVITPGTNTSNQVAVLYQGVNCTEVPVAIHADQLTPTWRVYSTGSNVFQTRAGCLIGAEHVNNSYECDIPIGAGICASYQTQTNSPRRARSVASQSIIAYTMSLGAENSVAYSNNSIAIPTNFTISVTTEILPVSMTKTSVDCTMYICGDSTECSNLLLQYGSFCTQLNRALTGIAVEQDKNTQEVFAQVKQIYKTPPIKDFGGFNFSQILPDPSKPSKRSFIEDLLFNKVTLADAGFIKQYGDCLGDIAARDLICAQKFNGLTVLPPLLTDEMIAQYTSALLAGTITSGWTFGAGAALQIPFAMQMAYRFNGIGVTQNVLYENQKLIANQFNSAIGKIQDSLSSTASALGKLQDVVNQNAQALNTLVKQLSSNFGAISSVLNDILSRLDPPEAEVQIDRLITGRLQSLQTYVTQQLIRAAEIRASANLAATKMSECVLGQSKRVDFCGKGYQLMSFPQSAPHGVVFLNVTYVPAQEKNFTTAPAICNDGKAHFPREGVFVSNGTNWFVTQRNFYEPQIITTDNTFVSGNCDVVIGIVNNTVYDPLQPELDSGGGGSDIDPYKEFGSSYQLLNFLPLDFFPDLNALVDTATALYEEELTGREHCSPHHTAIRQALVCWDELTKLIAWMSSNITSEQVRTIIVNHVNDTWGLKVRQSLWFHLSCLTFGQHTVQEFLVSFGVWIRTPAPYRPPNAPILSTLPEHTVIC

SEQ ID NO: 10977 - protein, 1301 aa, Artificial Sequence
  SARS-CoV-2/Iceland/189/2020__EPI_ISL_417709 spike protein (1-1147)(K986P_V987P_ H1048Q_H1064N_ H1083N_H1101N) WhcAg construct
MFVFLVLLPLVSSQCVNLTTRTQLPPAYTNSFTRGVYYPDKVFRSSVLHSTQDLFLPFFSNVTWFHAIHVSGTNGTKRFDNPVLPFNDGVYFASTEKSNIIRGWIFGTTLDSKTQSLLIVNNATNVVIKVCEFQFCNDPFLGVYYHKNNKSWMESEFRVYSSANNCTFEYVSQPFLMDLEGKQGNFKNLREFVFKNIDGYFKIYSKHTPINLVRDLPQGFSALEPLVDLPIGINITRFQTLLALHRSYLTPGDSSSGWTAGAAAYYVGYLQPRTFLLKYNENGTITDAVDCALDPLSETKCTLKSFTVEKGIYQTSNFRVQPTESIVRFPNITNLCPFGEVFNATRFASVYAWNRKRISNCVADYSVLYNSASFSTFKCYGVSPTKLNDLCFTNVYADSFVIRGDEVRQIAPGQTGKIADYNYKLPDDFTGCVIAWNSNNLDSKVGGNYNYLYRLFRKSNLKPFERDISTEIYQAGSTPCNGVEGFNCYFPLQSYGFQPTNGVGYQPYRVVVLSFELLHAPATVCGPKKSTNLVKNKCVNFNFNGLTGTGVLTESNKKFLPFQQFGRDIADTTDAVRDPQTLEILDITPCSFGGVSVITPGTNTSNQVAVLYQGVNCTEVPVAIHADQLTPTWRVYSTGSNVFQTRAGCLIGAEHVNNSYECDIPIGAGICASYQTQTNSPRRARSVASQSIIAYTMSLGAENSVAYSNNSIAIPTNFTISVTTEILPVSMTKTSVDCTMYICGDSTECSNLLLQYGSFCTQLNRALTGIAVEQDKNTQEVFAQVKQIYKTPPIKDFGGFNFSQILPDPSKPSKRSFIEDLLFNKVTLADAGFTKQYGDCLGDIAARDLICAQKFNGLTVLPPLLTDEMIAQYTSALLAGTITSGWTFGAGAALQIPFAMQMAYRFNGIGVTQNVLYENQKLIANQFNSAIGKIQDSLSSTASALGKLQDVVNQNAQALNTLVKQLSSNFGAISSVLNDILSRLDPPEAEVQIDRLITGRLQSLQTYVTQQLIRAAEIRASANLAATKMSECVLGQSKRVDFCGKGYQLMSFPQSAPHGVVFLNVTYVPAQEKNFTTAPAICNDGKAHFPREGVFVSNGTNWFVTQRNFYEPQIITTDNTFVSGNCDVVIGIVNNTVYDPLQPELDSGGGGSDIDPYKEFGSSYQLLNFLPLDFFPDLNALVDTATALYEEELTGREHCSPHHTAIRQALVCWDELTKLIAWMSSNITSEQVRTIIVNHVNDTWGLKVRQSLWFHLSCLTFGQHTVQEFLVSFGVWIRTPAPYRPPNAPILSTLPEHTVIC

SEQ ID NO: 10978 - protein, 1301 aa, Artificial Sequence
  SARS-CoV-2/Australia/NSW56/2020__EPI_ISL_417408 spike protein (1-1147)(K986P_V987P_ H1048Q_H1064N_ H1083N_H1101N) WhcAg construct
MFVFLVLLPLVSSQCVNLTTRTQLPPAYTNSFTRGVYYPDKVFRSSVLHSTQDLFLPFFSNVTWFHAIHVSGTNGTKRFDNPVLPFNDGVYFASTEKSNIIRGWIFGTTLDSKTQSLLIVNNATNVVIKVCEFQFCNDPFLGVYYHKNNKSWMESEFRVYSSANNCTFEYVSQPFLMDLEGKQGNFKNLREFVFKNIDGYFKIYSKHTPINLVRDLPQGFSALEPLVDLPIGINITRFQTLLALHRSYLTPGDSSSGWTAGAAAYYVGYLQPRTFLLKYNENGTITDAVDCALDPLSETKCTLKSFTVEKGIYQTSNFRVQPTESIVRFPNITNLCPFGEVFNATRFASVYAWNRKRISNCVADYSVLYNSASFSTFKCYGVSPTKLNDLCFTNVYADSFVIRGDEVRQIAPGQTGKIADYNYKLPDDFTGCVIAWNSNNLDSKVGGNYNYLYRLFRKSNLKPFERDISTEIYQAGSTPCNGVEGFNCYFPLQSYGFQPTNGVGYQPYRVVVLSFELLHAPATVCGPKKSTNLVKNKCVNFNFNGLTGTGVLTESNKKFLPFQQFGRDIADTTDAVRDPQTLEILDITPCSFGGVSVITPGTNTSNQVAVLYQDVNCTEVPVAIHADQLTPTWRVYSTGSNVFQTRAGCLIGAEHVNNSYECDIPIGAGICASYQTQTNSPRRARSVASQSIIAYTMSLGAENSVAYSNNSIAIPTNFTISVTTEILPVSMTKTSVDCTMYICGDSTECSNLLLQYGSFCTQLNRALTGIAVEQDKNTQEVFAQVKQIYKTPPIKDFGGFNFSQILPDSSKPSKRSFIEDLLFNKVTLADAGFIKQYGDCLGDIAARDLICAQKFNGLTVLPPLLTDEMIAQYTSALLAGTITSGWTFGAGAALQIPFAMQMAYRFNGIGVTQNVLYENQKLIANQFNSAIGKIQDSLSSTASALGKLQDVVNQNAQALNTLVKQLSSNFGAISSVLNDILSRLDPPEAEVQIDRLITGRLQSLQTYVTQQLIRAAEIRASANLAATKMSECVLGQSKRVDFCGKGYQLMSFPQSAPHGVVFLNVTYVPAQEKNFTTAPAICNDGKAHFPREGVFVSNGTNWFVTQRNFYEPQIITTDNTFVSGNCDVVIGIVNNTVYDPLQPELDSGGGGSDIDPYKEFGSSYQLLNFLPLDFFPDLNALVDTATALYEEELTGREHCSPHHTAIRQALVCWDELTKLIAWMSSNITSEQVRTIIVNHVNDTWGLKVRQSLWFHLSCLTFGQHTVQEFLVSFGVWIRTPAPYRPPNAPILSTLPEHTVIC

SEQ ID NO: 10979 - protein, 1301 aa, Artificial Sequence
  SARS-CoV-2/Iceland/280/2020__EPI_ISL_417608 spike protein (1-1147)(K986P_V987P_ H1048Q_H1064N_ H1083N_H1101N) WhcAg construct
MFVFLVLLPLVSSQCVNLTTRTQLPPAYTNSFTRGVYYPDKVFRSSVLHSTQDLFLPFFSNVTWFHAIHVSGTNGTKRFDNPVLPFNDGVYFASTEKSNIIRGWIFGTTLDSKTQSLLIVNNATNVVIKVCEFQFCNDPFLGVYYHKNNKSWMESEFRVYSSANNCTFEYVSQPFLMDLEGKQGNFKNLREFVFKNIDGYFKIYSKHTPINLVRDLPQGFSALEPLVDLPIGINITRFQTLLALHRSYLTPGDSSSGWTAGAAAYYVGYLQPRTFLLKYNENGTITDAVDCALDPLSETKCTLKSFTVEKGIYQTSNFRVQPTESIVRFPNITNLCPFGEVFNATRFASVYAWNRKRISNCVADYSVLYNSASFSTFKCYGVSPTKLNDLCFTNVYADSFVIRGDEVRQIAPGQTGKIADYNYKLPDDFTGCVIAWNSNNLDSKVGGNYNYLYRLFRKSNLKPFERDISTEIYQAGSTPCNGVEGFNCYFPLQSYGFQPTNGVGYQPYRVVVLSFELLHAPATVCGPKKSTNLVKNKCVNFNFNGLTGTGVLTESNKKFLPFQQFGRDIADTTDAVRDPQTLEILDITPCSFGGVSVITPGTNTSNQVAVLYQGVNCTEVPVAIHADQLTPTWRVYSTGSNVFQTRAGCLIGAEHVNNSYECDIPIGAGICASYHTQTNSPRRARSVASQSIIAYTMSLGAENSVAYSNNSIAIPTNFTISVTTEILPVSMTKTSVDCTMYICGDSTECSNLLLQYGSFCTQLNRALTGIAVEQDKNTQEVFAQVKQIYKTPPIKDFGGFNFSQILPDPSKPSKRSFIEDLLFNKVTLADAGFIKQYGDCLGDIAARDLICAQKFNGLTVLPPLLTDEMIAQYTSALLAGTITSGWTFGAGAALQIPFAMQMAYRFNGIGVTQNVLYENQKLIANQFNSAIGKIQDSLSSTASALGKLQDVVNQNAQALNTLVKQLSSNFGAISSVLNDILSRLDPPEAEVQIDRLITGRLQSLQTYVTQQLIRAAEIRASANLAATKMSECVLGQSKRVDFCGKGYQLMSFPQSAPHGVVFLNVTYVPAQEKNFTTAPAICNDGKAHFPREGVFVSNGTNWFVTQRNFYEPQIITTDNTFVSGNCDVVIGIVNNTVYDPLQPELDSGGGGSDIDPYKEFGSSYQLLNFLPLDFFPDLNALVDTATALYEEELTGREHCSPHHTAIRQALVCWDELTKLIAWMSSNITSEQVRTIIVNHVNDTWGLKVRQSLWFHLSCLTFGQHTVQEFLVSFGVWIRTPAPYRPPNAPILSTLPEHTVIC

SEQ ID NO: 10980 - protein, 1301 aa, Artificial Sequence; identical to SEQ ID NO: 10935
  SARS-CoV-2/Iceland/247/2020__EPI_ISL_417575 spike protein (1-1147)(K986P_V987P_ H1048Q_H1064N_ H1083N_H1101N) WhcAg construct

SEQ ID NO: 10981 - protein, 1301 aa, Artificial Sequence
  SARS-CoV-2/Iceland/238/2020__EPI_ISL_417566 spike protein (1-1147)(K986P_V987P_ H1048Q_H1064N_ H1083N_H1101N) WhcAg construct
MFVFLVLLPLVSSQCVNLTTRTQLPPAYTNSFTRGVYYPDKVFRSSVLHSTQDLFLPFFSNVTWFHAIHVSGTNGTKRFDNPVLPFNDGVYFASTEKSNIIRGWIFGTTLDSKTQSLLIVNNATNVVIKVCEFQFCNDPFLGVYYHKNNKSWMESEFRVYSSANNCTFEYVSQPFLMDLEGKQGNFKNLREFVFKNIDGYFKIYSKHTPINLVRDLPQGFSALEPLVDLPIGINITRFQTLLALHRSYLTPGDSSSGWTAGAAAYYVGYLQPRTFLLKYNENGTITDAVDCALDPLSETKCTLKSFTVEKGIYQTSNFRVQPTESIVRFPNITNLCPFGEVFNATRFASVYAWNRKRISNCVADYSVLYNSASFSTFKCYGVSPTKLNDLCFTNVYADSFVIRGDEVRQIAPGQTGKIADYNYKLPDDFTGCVIAWNSNNLDSKVGGNYNYLYRLFRKSNLKPFERDISTEIYQAGSTPCNGVEGFNCYFPLQSYGFQPTNGVGYQPYRVVVLSFELLHAPATVCGPKKSTNLVKNKCVNFNFNGLTGTGVLTESNKKFLPFQQFGRDIADTTDAVRDPQTLEILDITPCSFGGVSVITPGTNTSNQVAVLYQGVNCTEVPVAIHADQLTPTWRVYSTGSNVFQTRAGCLIGAEHVNNSYECDIPIGAGICASYQTQTNSPRRARSVASQSIIAYTMSLGAENSVAYSNNSIAIPTNFTISVTTEILPVSMTKTSVDCTMYICGDSTECSNLLLQYGSFCTQLNRALTGIAVEQDKNTQEVFAQVKQIYKTPPIKDFGGFNFSQILPDPSKPSKRSFIEDLLFNKVTLADVGFIKQYGDCLGDIAARDLICAQKFNGLTVLPPLLTDEMIAQYTSALLAGTITSGWTFGAGAALQIPFAMQMAYRFNGIGVTQNVLYENQKLIANQFNSAIGKIQDSLSSTASALGKLQDVVNQNAQALNTLVKQLSSNFGAISSVLNDILSRLDPPEAEVQIDRLITGRLQSLQTYVTQQLIRAAEIRASANLAATKMSECVLGQSKRVDFCGKGYQLMSFPQSAPHGVVFLNVTYVPAQEKNFTTAPAICNDGKAHFPREGVFVSNGTNWFVTQRNFYEPQIITTDNTFVSGNCDVVIGIVNNTVYDPLQPELDSGGGGSDIDPYKEFGSSYQLLNFLPLDFFPDLNALVDTATALYEEELTGREHCSPHHTAIRQALVCWDELTKLIAWMSSNITSEQVRTIIVNHVNDTWGLKVRQSLWFHLSCLTFGQHTVQEFLVSFGVWIRTPAPYRPPNAPILSTLPEHTVIC

SEQ ID NO: 10982 - protein, 1301 aa, Artificial Sequence
  SARS-CoV-2/Greece/16/2020__EPI_ISL_418265 spike protein (1-1147)(K986P_V987P_ H1048Q_H1064N_ H1083N_H1101N) WhcAg construct
MFVFLVLLPLVSSQCVNLTTRTQLPPAYTNSFTRGVYYPDKVFRSSVLHSTQDLFLPFFSNVTWFHAIHVSGTNGTKRFDNPVLPFNDGVYFASTEKSNIIRGWIFGTTLDSKTQSLLIVNNATNVVIKVCEFQFCNDPFLGVYYHKNNKSWMESEFRVYSSANNCTFEYVSQPFLMDLEGKQGNFKNLREFVFKNVDGYFKIYSKHTPINLVRDLPQGFSALEPLVDLPIGINITRFQTLLALHRSYLTPGDSSSGWTAGAAAYYVGYLQPRTFLLKYNENGTITDAVDCALDPLSETKCTLKSFTVEKGIYQTSNFRVQPTESIVRFPNITNLCPFGEVFNATRFASVYAWNRKRISNCVADYSVLYNSASFSTFKCYGVSPTKLNDLCFTNVYADSFVIRGDEVRQIAPGQTGKIADYNYKLPDDFTGCVIAWNSNNLDSKVGGNYNYLYRLFRKSNLKPFERDISTEIYQAGSTPCNGVEGFNCYFPLQSYGFQPTNGVGYQPYRVVVLSFELLHAPATVCGPKKSTNLVKNKCVNFNFNGLTGTGVLTESNKKFLPFQQFGRDIADTTDAVRDPQTLEILDITPCSFGGVSVITPGTNTSNQVAVLYQDVNCTEVPVAIHADQLTPTWRVYSTGSNVFQTRAGCLIGAEHVNNSYECDIPIGAGICASYQTQTNSPRRARSVASQSIIAYTMSLGAENSVAYSNNSIAIPTNFTISVTTEILPVSMTKTSVDCTMYICGDSTECSNLLLQYGSFCTQLNRALTGIAVEQDKNTQEVFAQVKQIYKTPPIKDFGGFNFSQILPDPSKPSKRSFIEDLLFNKVTLADAGFIKQYGDCLGDIAARDLICAQKFNGLTVLPPLLTDEMIAQYTSALLAGTITSGWTFGAGAALQIPFAMQMAYRFNGIGVTQNVLYENQKLIANQFNSAIGKIQDSLSSTASALGKLQDVVNQNAQALNTLVKQLSSNFGAISSVLNDILSRLDPPEAEVQIDRLITGRLQSLQTYVTQQLIRAAEIRASANLAATKMSECVLGQSKRVDFCGKGYQLMSFPQSAPHGVVFLNVTYVPAQEKNFTTAPAICNDGKAHFPREGVFVSNGTNWFVTQRNFYEPQIITTDNTFVSGNCDVVIGIVNNTVYDPLQPELDSGGGGSDIDPYKEFGSSYQLLNFLPLDFFPDLNALVDTATALYEEELTGREHCSPHHTAIRQALVCWDELTKLIAWMSSNITSEQVRTIIVNHVNDTWGLKVRQSLWFHLSCLTFGQHTVQEFLVSFGVWIRTPAPYRPPNAPILSTLPEHTVIC

SEQ ID NO: 10983 - protein, 1301 aa, Artificial Sequence
  SARS-CoV-2/Iceland/319/2020__EPI_ISL_417648 spike protein (1-1147)(K986P_V987P_ H1048Q_H1064N_ H1083N_H1101N) WhcAg construct
MFVFLVLLPLVSSQCVNLTTRTQLPPAYTNSFTRGVYYPDKVFRSSVLHSTQDLFLPFFSNVTWFHAIHVSGTNGTKRFDNPVLPFNDGVYFASTEKSNIIRGWIFGTTLDSKTQSLLIVNNATNVVIKVCEFQFCNDPFLGVYYHKNNKSWMESEFRVYSSANNCTFEYVSQPFLIDLEGKQGNFKNLREFVFKNIDGYFKIYSKHTPINLVRDLPQGFSALEPLVDLPIGINITRFQTLLALHRSYLTPGDSSSGWTAGAAAYYVGYLQPRTFLLKYNENGTITDAVDCALDPLSETKCTLKSFTVEKGIYQTSNFRVQPTESIVRFPNITNLCPFGEVFNATRFASVYAWNRKRISNCVADYSVLYNSASFSTFKCYGVSPTKLNDLCFTNVYADSFVIRGDEVRQIAPGQTGKIADYNYKLPDDFTGCVIAWNSNNLDSKVGGNYNYLYRLFRKSNLKPFERDISTEIYQAGSTPCNGVEGFNCYFPLQSYGFQPTNGVGYQPYRVVVLSFELLHAPATVCGPKKSTNLVKNKCVNFNFNGLTGTGVLTESNKKFLPFQQFGRDIADTTDAVRDPQTLEILDITPCSFGGVSVITPGTNTSNQVAVLYQGVNCTEVPVAIHADQLTPTWRVYSTGSNVFQTRAGCLIGAEHVNNSYECDIPIGAGICASYQTQTNSPRRARSVASQSIIAYTMSLGAENSVAYSNNSIAIPTNFTISVTTEILPVSMTKTSVDCTMYICGDSTECSNLLLQYGSFCTQLNRALTGIAVEQDKNTQEVFAQVKQIYKTPPIKDFGGFNFSQILPDPSKPSKRSFIEDLLFNKVTLADAGFIKQYGDCLGDIAARDLICAQKFNGLTVLPPLLTDEMIAQYTSALLAGTITSGWTFGAGAALQIPFAMQMAYRFNGIGVTQNVLYENQKLIANQFNSAIGKIQDSLSSTASALGKLQDVVNQNAQALNTLVKQLSSNFGAISSVLNDILSRLDPPEAEVQIDRLITGRLQSLQTYVTQQLIRAAEIRASANLAATKMSECVLGQSKRVDFCGKGYQLMSFPQSAPHGVVFLNVTYVPAQEKNFTTAPAICNDGKAHFPREGVFVSNGTNWFVTQRNFYEPQIITTDNTFVSGNCDVVIGIVNNTVYDPLQPELDSGGGGSDIDPYKEFGSSYQLLNFLPLDFFPDLNALVDTATALYEEELTGREHCSPHHTAIRQALVCWDELTKLIAWMSSNITSEQVRTIIVNHVNDTWGLKVRQSLWFHLSCLTFGQHTVQEFLVSFGVWIRTPAPYRPPNAPILSTLPEHTVIC

SEQ ID NO: 10984 - protein, 1301 aa, Artificial Sequence
  SARS-CoV-2/Congo/94/2020__EPI_ISL_417947 spike protein (1-1147)(K986P_V987P_ H1048Q_H1064N_ H1083N_H1101N) WhcAg construct
MFVFLVLLPLVSSQCVNLTTRTQLPPAYTNSFTRGVYYPDKVFRSSVLHSTQDLFLPFFSNVTWFHAIHVSGTNGTKRFDNPVLPFNDGVYFASTEKSNIIRGWIFGTTLDSKTQSLLIVNNATNVVIKVCEFQFCNDPFLGVYYHKNNKSWMESEFRVYSSANNCTFEYVSQPFLMDLEGKQGNFKNLREFVFKNIDGYFKIYSKHTPINLVRDLPQGFSALEPLVDLPIGINITRFQTLLALHRSYLTPGDSSSGWTAGAAAYYVGYLQPRTFLLKYNENGTITDAVDCALDPLSETKCTLKSFTVEKGIYQTSNFRVQPTESIVRFPNITNLCPFGEVFNATRFASVYAWNRKRISNCVADYSVLYNSASFSTFKCYGVSPTKLNDLCFTNVYADSFVIRGDEVRQIAPGQTGKIADYNYKLPDDFTGCVIAWNSNNLDSKVGGNYNYLYRLFRKSNLKPFERDISTEIYQAGSTPCNGVEGFNCYFPLQSYGFQPTNGVGYQPYRVVVLSFELLHAPATVCGPKKSTNLVKNKCVNFNFNGLTGTGVLTESNKKFLPFQQFGRDIADTTDAVRDPQTLEILDITPCSFGGVSVITPGTNTSNQVAVLYQGVNCTEVPVAIHADQLTPTWRVYSTGSNVFQTRAGCLIGAEHVNNSYECDIPIGAGICASYQTQTNSPRRARSVASQSIIAYTMSLGAENSVAYSNNSIAIPTNFTISVTTEILPVSMTKTSVDCTMYICGDSTECSNLLLQYGSFCTQLNRALTGIAVEQDKNTQEVFAQVKQIYKTPPIKDFGGFNFSQILPDPSKPSKRSFIEDILFNKVTLADAGFIKQYGDCLGDIAARDLICAQKFNGLTVLPPLLTDEMIAQYTSALLAGTITSGWTFGAGAALQIPFAMQMAYRFNGIGVTQNVLYENQKLIANQFNSAIGKIQDSLSSTASALGKLQDVVNQNAQALNTLVKQLSSNFGAISSVLNDILSRLDPPEAEVQIDRLITGRLQSLQTYVTQQLIRAAEIRASANLAATKMSECVLGQSKRVDFCGKGYQLMSFPQSAPHGVVFLNVTYVPAQEKNFTTAPAICNDGKAHFPREGVFVSNGTNWFVTQRNFYEPQIITTDNTFVSGNCDVVIGIVNNTVYDPLQPELDSGGGGSDIDPYKEFGSSYQLLNFLPLDFFPDLNALVDTATALYEEELTGREHCSPHHTAIRQALVCWDELTKLIAWMSSNITSEQVRTIIVNHVNDTWGLKVRQSLWFHLSCLTFGQHTVQEFLVSFGVWIRTPAPYRPPNAPILSTLPEHTVIC

SEQ ID NO: 10985 - protein, 1301 aa, Artificial Sequence
  SARS-CoV-2/Congo/158/2020__EPI_ISL_417950 spike protein (1-1147)(K986P_V987P_ H1048Q_H1064N_ H1083N_H1101N) WhcAg construct
MFVFLVLLPLVSSQCVNLTTRTQLPPAYTNSFTRGVYYPDKVFRSSVLHSTQDLFLPFFSNVTWFHAIHVSGTNGTKRFDNPVLPFNDGVYFASTEKSNIIRGWIFGTTLDSKTQSLLIVNNATNVVIKVCEFQFCNDPFLGVYYHKNNKSWMESEFRVYSSANNCTFEYVSQPFLMDLEGKQGNFKNLREFVFKNIDGYFKIYSKHTPINLVRDLPQGFSALEPLVDLPIGINITRFQTLLALHRSYLTPGDSSSGWTAGAAAYYVGYLQPRTFLLKYNENGTITDAVDCALDPLSETKCTLKSFTVEKGIYQTSNFRVQPTESIVRFPNITNLCPFGEVFNATRFASVYAWNRKRISNCVADYSVLYNSASFSTFKCYGVSPTKLNDLCFTNVYADSFVIRGDEVRQIAPGQTGKIADYNYKLPDDFTGCVIAWNSNNLDSKVGGNYNYLYRLFRKSNLKPFERDISTEIYQAGSTPCNGVEGFNCYFPLQSYGFQPTNGVGYQPYRVVVLSFELLHAPATVCGPKKSTNLVKNKCVNFNFNGLTGTGVLTESNKKFLPFQQFGRDIADTTDAVRDPQTLEILDITPCSFGGVSVITPGTNTSNQVAVLYQDVNCTEVPVAIHADQLTPTWRVYSTGSNVFQTRAGCLIGAEHVNNSYECDIPIGAGICASYQTQTNSPRRARSVASQSIIAYTMSLGAENSVAYSNNSIAIPTNFTISVTTEILPVSMTKTSVDCTMYICGDSTECSNLLLQYGSFCTQLNRALTGIAVEQDKNTQEVFAQVKQIYKTPPIKDFGGFNFSQILPDPSKPSKRSFIEDLLFNKVTLADAGFIKQYGDCLGDIAARDLICAQKFNGLTVLPPLLTDEMIAQYTSALLAGTITSGWTFGAGAALQIPFAMQMAYRFNGIGVTQNVLYENQKLIANQFNSAIGKIQDSLSSTASALGKLQDVVNQNAQALNTLVKQLSSNFGAISSVLNDILSRLDPPEAEVQIDRLITGRLQSLQTYVTQQLIRAAEIRASANLAATKMSECVLGQSKRVDFCGKGYQLMSFPQSAPHGVVFLNVTYVPAQEKNFTTAPAICNDGKAHFPREGVFVSNGTNWFVTQRNFYEPQIITTDNTFLSGNCDVVIGIVNNTVYDPLQPELDSGGGGSDIDPYKEFGSSYQLLNFLPLDFFPDLNALVDTATALYEEELTGREHCSPHHTAIRQALVCWDELTKLIAWMSSNITSEQVRTIIVNHVNDTWGLKVRQSLWFHLSCLTFGQHTVQEFLVSFGVWIRTPAPYRPPNAPILSTLPEHTVIC

SEQ ID NO: 10986 - protein, 1301 aa, Artificial Sequence
  SARS-CoV-2/USA/UT-00034/2020__EPI_ISL_417977 spike protein (1-1147)(K986P_V987P_ H1048Q_H1064N_ H1083N_H1101N) WhcAg construct
MFVFLVLLPLVSSQCVNLTTRTQLPPAYTNSFTRGVYYPDKVFRSSVLHSTQDLFLPFFSNVTWFHAIHVSGTNGTKRFDNPVLPFNDGVYFASTEKSNIIRGWIFGTTLDSKTQSLLIVNNATNVVIKVCEFQFCNDPFLGVYYYKNNKSWMESEFRVYSSANNCTFEYVSQPFLMDLEGKQGNFKNLREFVFKNIDGYFKIYSKHTPINLVRDLPQGFSALEPLVDLPIGINITRFQTLLALHRSYLTPGDSSSGWTAGAAAYYVGYLQPRTFLLKYNENGTITDAVDCALDPLSETKCTLKSFTVEKGIYQTSNFRVQPTESIVRFPNITNLCPFGEVFNATRFASVYAWNRKRISNCVADYSVLYNSASFSTFKCYGVSPTKLNDLCFTNVYADSFVIRGDEVRQIAPGQTGKIADYNYKLPDDFTGCVIAWNSNNLDSKVGGNYNYLYRLFRKSNLKPFERDISTEIYQAGSTPCNGVEGFNCYFPLQSYGFQPTNGVGYQPYRVVVLSFELLHAPATVCGPKKSTNLVKNKCVNFNFNGLTGTGVLTESNKKFLPFQQFGRDIADTTDAVRDPQTLEILDITPCSFGGVSVITPGTNTSNQVAVLYQGVNCTEVPVAIHADQLTPTWRVYSTGSNVFQTRAGCLIGAEHVNNSYECDIPIGAGICASYQTQTNSPRRARSVASQSIIAYTMSLGAENSVAYSNNSIAIPTNFTISVTTEILPVSMTKTSVDCTMYICGDSTECSNLLLQYGSFCTQLNRALTGIAVEQDKNTQEVFAQVKQIYKTPPIKDFGGFNFSQILPDPSKPSKRSFIEDLLFNKVTLADAGFIKQYGDCLGDIAARDLICAQKFNGLTVLPPLLTDEMIAQYTSALLAGTITSGWTFGAGAALQIPFAMQMAYRFNGIGVTQNVLYENQKLIANQFNSAIGKIQDSLSSTASALGKLQDVVNQNAQALNTLVKQLSSNFGAISSVLNDILSRLDPPEAEVQIDRLITGRLQSLQTYVTQQLIRAAEIRASANLAATKMSECVLGQSKRVDFCGKGYQLMSFPQSAPHGVVFLNVTYVPAQEKNFTTAPAICNDGKAHFPREGVFVSNGTNWFVTQRNFYEPQIITTDNTFVSGNCDVVIGIVNNTVYDPLQPELDSGGGGSDIDPYKEFGSSYQLLNFLPLDFFPDLNALVDTATALYEEELTGREHCSPHHTAIRQALVCWDELTKLIAWMSSNITSEQVRTIIVNHVNDTWGLKVRQSLWFHLSCLTFGQHTVQEFLVSFGVWIRTPAPYRPPNAPILSTLPEHTVIC

SEQ ID NO: 10987 - protein, 1301 aa, Artificial Sequence
  SARS-CoV-2/USA/UT-00033/2020__EPI_ISL_417976 spike protein (1-1147)(K986P_V987P_ H1048Q_H1064N_ H1083N_H1101N) WhcAg construct
MFVFLVLLPLVSSQCVNLTTRTQLPPAYTNSFTRGVYYPDKVFRSSVLHSTQDLFLPFFSNVTWFHAIHVSGTNGTKRFDNPVLPFNDGVYFASTEKSNIIRGWIFGTTLDSKTQSLLIVNNATNVVIKVCEFQFCNDPFLGVYYHKNNKSWMESEFRVYSSANNCTFEYVSQPFLMDLEGKQGNFKNLREFVFKNIDGYFKIYSKHTPINLVRDLPQGFSALEPLVDLPIGINITRFQTLLALHRSYLTPGDSSSGLTAGAAAYYVGYLQPRTFLLKYNENGTITDAVDCALDPLSETKCTLKSFTVEKGIYQTSNFRVQPTESIVRFPNITNLCPFGEVFNATRFASVYAWNRKRISNCVADYSVLYNSASFSTFKCYGVSPTKLNDLCFTNVYADSFVIRGDEVRQIAPGQTGKIADYNYKLPDDFTGCVIAWNSNNLDSKVGGNYNYLYRLFRKSNLKPFERDISTEIYQAGSTPCNGVEGFNCYFPLQSYGFQPTNGVGYQPYRVVVLSFELLHAPATVCGPKKSTNLVKNKCVNFNFNGLTGTGVLTESNKKFLPFQQFGRDIADTTDAVRDPQTLEILDITPCSFGGVSVITPGTNTSNQVAVLYQGVNCTEVPVAIHADQLTPTWRVYSTGSNVFQTRAGCLIGAEHVNNSYECDIPIGAGICASYQTQTNSPRRARSVASQSIIAYTMSLGAENSVAYSNNSIAIPTNFTISVTTEILPVSMTKTSVDCTMYICGDSTECSNLLLQYGSFCTQLNRALTGIAVEQDKNTQEVFAQVKQIYKTPPIKDFGGFNFSQILPDPSKPSKRSFIEDLLFNKVTLADAGFIKQYGDCLGDIAARDLICAQKFNGLTVLPPLLTDEMIAQYTSALLAGTITSGWTFGAGAALQIPFAMQMAYRFNGIGVTQNVLYENQKLIANQFNSAIGKIQDSLSSTASALGKLQDVVNQNAQALNTLVKQLSSNFGAISSVLNDILSRLDPPEAEVQIDRLITGRLQSLQTYVTQQLIRAAEIRASANLAATKMSECVLGQSKRVDFCGKGYQLMSFPQSAPHGVVFLNVTYVPAQEKNFTTAPAICNDGKAHFPREGVFVSNGTNWFVTQRNFYEPQIITTDNTFVSGNCDVVIGIVNNTVYDPLQPELDSGGGGSDIDPYKEFGSSYQLLNFLPLDFFPDLNALVDTATALYEEELTGREHCSPHHTAIRQALVCWDELTKLIAWMSSNITSEQVRTIIVNHVNDTWGLKVRQSLWFHLSCLTFGQHTVQEFLVSFGVWIRTPAPYRPPNAPILSTLPEHTVIC

SEQ ID NO: 10988 - protein, 1301 aa, Artificial Sequence
  SARS-CoV-2/USA/WI-13/2020__EPI_ISL_417516 spike protein (1-1147)(K986P_V987P_ H1048Q_H1064N_ H1083N_H1101N) WhcAg construct
MFVFLVLLPLVSSQCVNLTTRTQLPPAYTNSFTRGVYYPDKVFRSSVLHSTQDLFLPFFSNVTWFHAIHVSGTNGTKRFDNPVLPFNDGVYFASTEKSNIIRGWIFGTTLDSKTQSLLIVNNATNVVIKVCEFQFCNDPFLGVYYHKNNKSWMESEFRVYSSANNCTFEYVSQPFLMDLEGKQGNFKNLREFVFKNIDGYFKIYSKHTPINLVRDLPQGFSALEPLVDLPIGINITRFQTLLALHRSYLTPGDSSSGWTAGAAAYYVGYLQPRTFLLKYNENGTITDAVDCALDPLSETKCTLKSFTVEKGIYQTSNFRVLPTESIVRFPNITNLCPFGEVFNATRFASVYAWNRKRISNCVADYSVLYNSASFSTFKCYGVSPTKLNDLCFTNVYADSFVIRGDEVRQIAPGQTGKIADYNYKLPDDFTGCVIAWNSNNLDSKVGGNYNYLYRLFRKSNLKPFERDISTEIYQAGSTPCNGVEGFNCYFPLQSYGFQPTNGVGYQPYRVVVLSFELLHAPATVCGPKKSTNLVKNKCVNFNFNGLTGTGVLTESNKKFLPFQQFGRDIADTTDAVRDPQTLEILDITPCSFGGVSVITPGTNTSNQVAVLYQGVNCTEVPVAIHADQLTPTWRVYSTGSNVFQTRAGCLIGAEHVNNSYECDIPIGAGICASYQTQTNSPRRARSVASQSIIAYTMSLGAENSVAYSNNSIAIPTNFTISVTTEILPVSMTKTSVDCTMYICGDSTECSNLLLQYGSFCTQLNRALTGIAVEQDKNTQEVFAQVKQIYKTPPIKDFGGFNFSQILPDPSKPSKRSFIEDLLFNKVTLADAGFIKQYGDCLGDIAARDLICAQKFNGLTVLPPLLTDEMIAQYTSALLAGTITSGWTFGAGAALQIPFAMQMAYRFNGIGVTQNVLYENQKLIANQFNSAIGKIQDSLSSTASALGKLQDVVNQNAQALNTLVKQLSSNFGAISSVLNDILSRLDPPEAEVQIDRLITGRLQSLQTYVTQQLIRAAEIRASANLAATKMSECVLGQSKRVDFCGKGYQLMSFPQSAPHGVVFLNVTYVPAQEKNFTTAPAICNDGKAHFPREGVFVSNGTNWFVTQRNFYEPQIITTDNTFVSGNCDVVIGIVNNTVYDPLQPELDSGGGGSDIDPYKEFGSSYQLLNFLPLDFFPDLNALVDTATALYEEELTGREHCSPHHTAIRQALVCWDELTKLIAWMSSNITSEQVRTIIVNHVNDTWGLKVRQSLWFHLSCLTFGQHTVQEFLVSFGVWIRTPAPYRPPNAPILSTLPEHTVIC

SEQ ID NO: 10989 - protein, 1300 aa, Artificial Sequence
  SARS-CoV-2/India/1-27/2020__EPI_ISL_413522 spike protein (1-1146)(K985P_V986P_ H1047Q_H1063N_ H1082N_H1100N) WhcAg construct
MFVFLVLLPLVSSQCVNLTTRTQLPPAYTNSFTRGVYYPDKVFRSSVLHSTQDLFLPFFSNVTWFHAIHVSGTNGTKRFDNPVLPFNDGVYFASTEKSNIIRGWIFGTTLDSKTQSLLIVNNATNVVIKVCEFQFCNDPFLGVYHKNNKSWMESEFRVYSSANNCTFEYVSQPFLMDLEGKQGNFKNLREFVFKNIDGYFKIYSKHTPINLVRDLPQGFSALEPLVDLPIGINITRFQTLLALHRSYLTPGDSSSGWTAGAAAYYVGYLQPRTFLLKYNENGTITDAVDCALDPLSETKCTLKSFTVEKGIYQTSNFRVQPTESIVRFPNITNLCPFGEVFNATRFASVYAWNRKRISNCVADYSVLYNSASFSTFKCYGVSPTKLNDLCFTNVYADSFVIRGDEVIQIAPGQTGKIADYNYKLPDDFTGCVIAWNSNNLDSKVGGNYNYLYRLFRKSNLKPFERDISTEIYQAGSTPCNGVEGFNCYFPLQSYGFQPTNGVGYQPYRVVVLSFELLHAPATVCGPKKSTNLVKNKCVNFNFNGLTGTGVLTESNKKFLPFQQFGRDIADTTDAVRDPQTLEILDITPCSFGGVSVITPGTNTSNQVAVLYQDVNCTEVPVAIHADQLTPTWRVYSTGSNVFQTRAGCLIGAEHVNNSYECDIPIGAGICASYQTQTNSPRRARSVASQSIIAYTMSLGAENSVAYSNNSIAIPTNFTISVTTEILPVSMTKTSVDCTMYICGDSTECSNLLLQYGSFCTQLNRALTGIAVEQDKNTQEVFAQVKQIYKTPPIKDFGGFNFSQILPDPSKPSKRSFIEDLLFNKVTLADAGFIKQYGDCLGDIAARDLICAQKFNGLTVLPPLLTDEMIAQYTSALLAGTITSGWTFGAGAALQIPFAMQMAYRFNGIGVTQNVLYENQKLIANQFNSAIGKIQDSLSSTASALGKLQDVVNQNAQALNTLVKQLSSNFGAISSVLNDILSRLDPPEAEVQIDRLITGRLQSLQTYVTQQLIRAAEIRASANLAATKMSECVLGQSKRVDFCGKGYQLMSFPQSAPHGVVFLNVTYVPAQEKNFTTAPAICNDGKAHFPREGVFVSNGTNWFVTQRNFYEPQIITTDNTFVSGNCDVVIGIVNNTVYDPLQPELDSGGGGSDIDPYKEFGSSYQLLNFLPLDFFPDLNALVDTATALYEEELTGREHCSPHHTAIRQALVCWDELTKLIAWMSSNITSEQVRTIIVNHVNDTWGLKVRQSLWFHLSCLTFGQHTVQEFLVSFGVWIRTPAPYRPPNAPILSTLPEHTVIC

SEQ ID NO: 10990 - protein, 1295 aa, Artificial Sequence
  SARS-CoV-2/pangolin/Guangxi/P4L/2017__EPI_ISL_410538 spike protein (1-1141)(K980P_V981P_ H1042Q_H1058N_ H1077N_H1095N) WhcAg construct
MFVFLFVLPLVSSQCVNLTTRTGIPPGYTNSSTRGVYYPDKVFRSSILHLTQDLFLPFFSNVTWFNTINYQGGFKKFDNPVLPFNDGVYFASTEKSNIIRGWIFGTTLDARTQSLLIVNNATNVVIKVCEFQFCTDPFLGVYYHNNNKTWVENEFRVYSSANNCTFEYISQPFLMDLEGKQGNFKNLREFVFKNVDGYFKIYSKHTPIDLVRDLPRGFAALEPLVDLPIGINITRFQTLLALHRSYLTPGNLESGWTTGAAAYYVGYLQQRTFLLSYNQNGTITDAVDCSLDPLSETKCTLKSLTVEKGIYQTSNFRVQPTISIVRFPNITNLCPFGEVFNASKFASVYAWNRKRISNCVADYSVLYNSTSFSTFKCYGVSPTKLNDLCFTNVYADSFVVKGDEVRQIAPGQTGVIADYNYKLPDDFTGCVIAWNSVKQDALTGGNYGYLYRLFRKSKLKPFERDISTEIYQAGSTPCNGQVGLNCYYPLERYGFHPTTGVNYQPFRVVVLSFELLNGPATVCGPKLSTTLVKDKCVNFNFNGLTGTGVLTTSKKQFLPFQQFGRDISDTTDAVRDPQTLEILDITPCSFGGVSVITPGTNTSNQVAVLYQDVNCTEVPMAIHAEQLTPAWRVYSAGANVFQTRAGCLVGAEHVNNSYECDIPVGAGICASYHSMSSLRSVNQRSIIAYTMSLGAENSVAYSNNSIAIPTNFTISVTTEILPVSMTKTSVDCTMYICGDSIECSNLLLQYGSFCTQLNRALTGIAVEQDKNTQEVFAQVKQIYKTPPIKDFGGFNFSQILPDPSKPSKRSFIEDLLFNKVTLADAGFIKQYGDCLGDIAARDLICAQKFNGLTVLPPLLTDEMIAQYTSALLAGTITSGWTFGAGAALQIPFAMQMAYRFNGIGVTQNVLYENQKLIANQFNSAIGKIQDSLSSTASALGKLQDVVNQNAQALNTLVKQLSSNFGAISSVLNDILSRLDPPEAEVQIDRLITGRLQSLQTYVTQQLIRAAEIRASANLAATKMSECVLGQSKRVDFCGKGYQLMSFPQSAPHGVVFLNVTYVPAQEKNFTTAPAICNEGKAHFPREGVFVSNGTNWFITQRNFYEPQIITTDNTFVSGSCDVVIGIVNNTVYDPLQPELDSGGGGSDIDPYKEFGSSYQLLNFLPLDFFPDLNALVDTATALYEEELTGREHCSPHHTAIRQALVCWDELTKLIAWMSSNITSEQVRTIIVNHVNDTWGLKVRQSLWFHLSCLTFGQHTVQEFLVSFGVWIRTPAPYRPPNAPILSTLPEHTVIC

SEQ ID NO: 10991 - protein, 1295 aa, Artificial Sequence
  SARS-CoV-2/pangolin/Guangxi/P5L/2017__EPI_ISL_410540 spike protein (1-1141)(K980P_V981P_ H1042Q_H1058N_ H1077N_H1095N) WhcAg construct
MFVFLFVLPLVSSQCVNLTTRTGIPPGYTNSSTRGVYYPDKVFRSSILHLTQDLFLPFFSNVTWFNTINYQGGFKKFDNPVLPFNDGVYFASTEKSNIIRGWIFGTTLDARTQSLLIVNNATNVVIKVCEFQFCTDPFLGVYYHNNNKTWVENEFRVYSSANNCTFEYISQPFLMDLEGKQGNFKNLREFVFKNVDGYFKIYSKHTPIDLVRDLPRGFAALEPLVDLPIGINITRFQTLLALHRSYLTPGKLESGWTTGAAAYYVGYLQQRTFLLSYNQNGTITDAVDCSLDPLSETKCTLKSLTVEKGIYQTSNFRVQPTISIVRFPNITNLCPFGEVFNASKFASVYAWNRKRISNCVADYSVLYNSTSFSTFKCYGVSPTKLNDLCFTNVYADSFVVKGDEVRQIAPGQTGVIADYNYKLPDDFTGCVIAWNSVKQDALTGGNYGYLYRLFRKSKLKPFERDISTEIYQAGSTPCNGQVGLNCYYPLERYGFHPTTGVNYQPFRVVVLSFELLNGPATVCGPKLSTTLVKDKCVNFNFNGLTGTGVLTTSKKQFLPFQQFGRDISDTTDAVRDPQTLEILDITPCSFGGVSVITPGTNTSNQVAVLYQDVNCTEVPMAIHAEQLTPAWRVYSAGANVFQTRAGCLVGAEHVNNSYECDIPVGAGICASYHSMSSFRSVNQRSIIAYTMSLGAENSVAYSNNSIAIPTNFTISVTTEILPVSMTKTSVDCTMYICGDSIECSNLLLQYGSFCTQLNRALTGIAVEQDKNTQEVFAQVKQIYKTPPIKDFGGFNFSQILPDPSKPSKRSFIEDLLFNKVTLADAGFIKQYGDCLGDIAARDLICAQKFNGLTVLPPLLTDEMIAQYTSALLAGTITSGWTFGAGAALQIPFAMQMAYRFNGIGVTQNVLYENQKLIANQFNSAIGKIQDSLSSTASALGKLQDVVNQNAQALNTLVKQLSSNFGAISSVLNDILSRLDPPEAEVQIDRLITGRLQSLQTYVTQQLIRAAEIRASANLAATKMSECVLGQSKRVDFCGKGYQLMSFPQSAPHGVVFLNVTYVPAQEKNFTTAPAICNEGKAHFPREGVFVSNGTNWFITQRNFYEPQIITTDNTFVSGSCDVVIGIVNNTVYDPLQPELDSGGGGSDIDPYKEFGSSYQLLNFLPLDFFPDLNALVDTATALYEEELTGREHCSPHHTAIRQALVCWDELTKLIAWMSSNITSEQVRTIIVNHVNDTWGLKVRQSLWFHLSCLTFGQHTVQEFLVSFGVWIRTPAPYRPPNAPILSTLPEHTVIC

SEQ ID NO: 10992 - protein, 1295 aa, Artificial Sequence
  SARS-CoV-2/pangolin/Guangxi/P5E/2017__EPI_ISL_410541 spike protein (1-1141)(K980P_V981P_ H1042Q_H1058N_ H1077N_H1095N) WhcAg construct
MFVFLFVLPLVSSQCVNLTTRTGIPPGYTNSSTRGVYYPDKVFRSSILHLTQDLFLPFFSNVTWFNTITYQGGSKKFDNPVLPFNDGVYFASTEKSNIIRGWIFGTTLDARTQSLLIVNNATNVVIKVCEFQFCTDPFLGVYYHNNNKTWVENEFRVYSSANNCTFEYISQPFLMDLEGKQGNFKNLREFVFKNVDGYFKIYSKHTPIDLVRDLPRGFAALEPLVDLPIGINITRFQTLLALHRSYLTPGKLESGWTTGAAAYYVGYLQQRTFLLSYNQNGTITDAVDCSLDPLSETKCTLKSLTVEKGIYQTSNFRVQPTISIVRFPNITNLCPFGEVFNASKFASVYAWNRKRISNCVADYSVLYNSTSFSTFKCYGVSPTKLNDLCFTNVYADSFVVKGDEVRQIAPGQTGVIADYNYKLPDDFTGCVIAWNSVKQDALTGDNYGYLYRLFRKSKLKPFERDISTEIYQAGSTPCNGQVGLNCYYPLERYGFHPTTGVNYQPFRVVVLSFELLNGPATVCGPKLSTTLVKDKCVNFNFNGLTGTGVLTTSKKQFLPFQQFGRDISDTTDAVRDPQTLEILDITPCSFGGVSVITPGTNTSNQVAVLYQDVNCTEVPMAIHAEQLTPAWRVYSAGANVFQTRAGCLVGAEHVNNSYECDIPVGAGICASYHSMSSFRSVNQRSIIAYTMSLGAENSVAYSNNSIAIPTNFTISVTTEILPVSMTKTSVDCTMYICGDSIECSNLLLQYGSFCTQLNRALTGIAVEQDKNTQEVFAQVKQIYKTPPIKDFGGFNFSQILPDPSKPSKRSFIEDLLFNKVTLADAGFIKQYGDCLGDIAARDLICAQKFNGLTVLPPLLTDEMIAQYTSALLAGTITSGWTFGAGAALQIPFAMQMAYRFNGIGVTQNVLYENQKLIANQFNSAIGKIQDSLSSTASALGKLQDVVNQNAQALNTLVKQLSSNFGAISSVLNDILSRLDPPEAEVQIDRLITGRLQSLQTYVTQQLIRAAEIRASANLAATKMSECVLGQSKRVDFCGKGYQLMSFPQSAPHGVVFLNVTYVPAQEKNFTTAPAICNEGKAHFPREGVFVSNGTNWFITQRNFYEPQIITTDNTFVSGSCDVVIGIVNNTVYDPLQPELDSGGGGSDIDPYKEFGSSYQLLNFLPLDFFPDLNALVDTATALYEEELTGREHCSPHHTAIRQALVCWDELTKLIAWMSSNITSEQVRTIIVNHVNDTWGLKVRQSLWFHLSCLTFGQHTVQEFLVSFGVWIRTPAPYRPPNAPILSTLPEHTVIC

SEQ ID NO: 10993 - protein, 1293 aa, Artificial Sequence
  SARS-CoV-2/pangolin/Guangxi/P1E/2017__EPI_ISL_410539 spike protein (1-1139)(K978P_V979P_ H1040Q_H1056N_ H1075N_H1093N) WhcAg construct
MFVFLFVLPLVSSQCVNLTTRTGIQPGYTNSSTRGVYYPDKVFRSSILHLTQDLFLPFFSNVTWFNTINYQGGFKKFDNPVLPFNDGVYFASTEKSNIIRGWIFGTTLDARTQSLLIVNNATNVVIKVCEFQFCTDPFLGVYYHNNNKTWVENEFRVYSSANNCTFEYISQPFLMDLEGKQGNFKNLREFVFKNVDGYFKIYSKHTPIDLVRDLPRGFAALEPLVDLPIGINITRFQTLLALHRSYLTPGKLESGWTTGAAAYYVGYLQQRTFLLSYNQNGTITDAVDCSLDPLSETKCTLKSLTVEKGIYQTSNFRVQPTISIVRFPNITNLCPFGEVFNASKFASVYAWNRKRISNCVADYSVLYNSTSFSTFKCYGVSPTKLNDLCFTNVYADSFVVKGDEVRQIAPGQTGVIADYNYKLPDDFTGCVIAWNSVKQDALTGGNYLYRLFRKSKLKPFERDISTEIYQAGSTPCNGQVGLNCYYPLERYGFHPTTGVNYQPFRVVVLSFELLNGPATVCGPKLSTTLVKDKCVNFNFNGLTGTGVLTTSKKQFLPFQQFGRDISDTTDAVRDPQTLEILDITPCSFGGVSVITPGTNTSNQVAVLYQDVNCTEVPMAIHAEQLTPAWRVYSAGANVFQTRAGCLVGAEHVNNSYECDIPVGAGICASYHSMSSLRSVNQRSIIAYTMSLGAENSVAYSNNSIAIPTNFTISVTTEILPVSMTKTSVDCTMYICGDSIECSNLLLQYGSFCTQLNRALTGIAVEQDKNTQEVFAQVKQIYKTPPIKDFGGFNFSQILPDPSKPSKRSFIEDLLFNKVTLADAGFIKQYGDCLGDIAARDLICAQKFNGLTVLPPLLTDEMIAQYTSALLAGTITSGWTFGAGAALQIPFAMQMAYRFNGIGVTQNVLYENQKLIANQFNSAIGKIQDSLSSTASALGKLQDVVNQNAQALNTLVKQLSSNFGAISSVLNDILSRLDPPEAEVQIDRLITGRLQSLQTYVTQQLIRAAEIRASANLAATKMSECVLGQSKRVDFCGKGYQLMSFPQSAPHGVVFLNVTYVPAQEKNFTTAPAICNEGKAHFPREGVFVSNGTNWFITQRNFYEPQIITTDNTFVSGSCDVVIGIVNNTVYDPLQPELDSGGGGSDIDPYKEFGSSYQLLNFLPLDFFPDLNALVDTATALYEEELTGREHCSPHHTAIRQALVCWDELTKLIAWMSSNITSEQVRTIIVNHVNDTWGLKVRQSLWFHLSCLTFGQHTVQEFLVSFGVWIRTPAPYRPPNAPILSTLPEHTVIC

SEQ ID NO: 10994 - protein, 1301 aa, Artificial Sequence
  SARS-CoV-2/Wuhan/WIV05/2019__EPI_ISL_402128 spike protein (1-1147)(I712C_T1077C) WhcAg construct
MFVFLVLLPLVSSQCVNLTTRTQLPPAYTNSFTRGVYYPDKVFRSSVLHSTQDLFLPFFSNVTWFHAIHVSGTNGTKRFDNPVLPFNDGVYFASTEKSNIIRGWIFGTTLDSKTQSLLIVNNATNVVIKVCEFQFCNDPFLGVYYHKNNKSWMESEFRVYSSANNCTFEYVSQPFLMDLEGKQGNFKNLREFVFKNIDGYFKIYSKHTPINLVRDLPQGFSALEPLVDLPIGINITRFQTLLALHRSYLTPGDSSSGWTAGAAAYYVGYLQPRTFLLKYNENGTITDAVDCALDPLSETKCTLKSFTVEKGIYQTSNFRVQPTESIVRFPNITNLCPFGEVFNATRFASVYAWNRKRISNCVADYSVLYNSASFSTFKCYGVSPTKLNDLCFTNVYADSFVIRGDEVRQIAPGQTGKIADYNYKLPDDFTGCVIAWNSNNLDSKVGGNYNYLYRLFRKSNLKPFERDISTEIYQAGSTPCNGVEGFNCYFPLQSYGFQPTNGVGYQPYRVVVLSFELLHAPATVCGPKKSTNLVKNKCVNFNFNGLTGTGVLTESNKKFLPFQQFGRDIADTTDAVRDPQTLEILDITPCSFGGVSVITPGTNTSNQVAVLYQDVNCTEVPVAIHADQLTPTWRVYSTGSNVFQTRAGCLIGAEHVNNSYECDIPIGAGICASYQTQTNSPRRARSVASQSIIAYTMSLGAENSVAYSNNSCAIPTNFTISVTTEILPVSMTKTSVDCTMYICGDSTECSNLLLQYGSFCTQLNRALTGIAVEQDKNTQEVFAQVKQIYKTPPIKDFGGFNFSQILPDPSKPSKRSFIEDLLFNKVTLADAGFIKQYGDCLGDIAARDLICAQKFNGLTVLPPLLTDEMIAQYTSALLAGTITSGWTFGAGAALQIPFAMQMAYRFNGIGVTQNVLYENQKLIANQFNSAIGKIQDSLSSTASALGKLQDVVNQNAQALNTLVKQLSSNFGAISSVLNDILSRLDKVEAEVQIDRLITGRLQSLQTYVTQQLIRAAEIRASANLAATKMSECVLGQSKRVDFCGKGYHLMSFPQSAPHGVVFLHVTYVPAQEKNFTCAPAICHDGKAHFPREGVFVSNGTHWFVTQRNFYEPQIITTDNTFVSGNCDVVIGIVNNTVYDPLQPELDSGGGGSDIDPYKEFGSSYQLLNFLPLDFFPDLNALVDTATALYEEELTGREHCSPHHTAIRQALVCWDELTKLIAWMSSNITSEQVRTIIVNHVNDTWGLKVRQSLWFHLSCLTFGQHTVQEFLVSFGVWIRTPAPYRPPNAPILSTLPEHTVIC

SEQ ID NO: 10995 - protein, 1297 aa, Artificial Sequence
  SARS-CoV-2/bat/Yunnan/RaTG13/2013__EPI_ISL_402131 spike protein (1-1143)(I708C_T1073C) WhcAg construct
MFVFLVLLPLVSSQCVNLTTRTQLPPAYTNSSTRGVYYPDKVFRSSVLHLTQDLFLPFFSNVTWFHAIHVSGTNGIKRFDNPVLPFNDGVYFASTEKSNIIRGWIFGTTLDSKTQSLLIVNNATNVVIKVCEFQFCNDPFLGVYYHKNNKSWMESEFRVYSSANNCTFEYVSQPFLMDLEGKQGNFKNLREFVFKNIDGYFKIYSKHTPINLVRDLPPGFSALEPLVDLPIGINITRFQTLLALHRSYLTPGDSSSGWTAGAAAYYVGYLQPRTFLLKYNENGTITDAVDCALDPLSETKCTLKSFTVEKGIYQTSNFRVQPTDSIVRFPNITNLCPFGEVFNATTFASVYAWNRKRISNCVADYSVLYNSTSFSTFKCYGVSPTKLNDLCFTNVYADSFVITGDEVRQIAPGQTGKIADYNYKLPDDFTGCVIAWNSKHIDAKEGGNFNYLYRLFRKANLKPFERDISTEIYQAGSKPCNGQTGLNCYYPLYRYGFYPTDGVGHQPYRVVVLSFELLNAPATVCGPKKSTNLVKNKCVNFNFNGLTGTGVLTESNKKFLPFQQFGRDIADTTDAVRDPQTLEILDITPCSFGGVSVITPGTNASNQVAVLYQDVNCTEVPVAIHADQLTPTWRVYSTGSNVFQTRAGCLIGAEHVNNSYECDIPIGAGICASYQTQTNSRSVASQSIIAYTMSLGAENSVAYSNNSCAIPTNFTISVTTEILPVSMTKTSVDCTMYICGDSTECSNLLLQYGSFCTQLNRALTGIAVEQDKNTQEVFAQVKQIYKTPPIKDFGGFNFSQILPDPSKPSKRSFIEDLLFNKVTLADAGFIKQYGDCLGDIAARDLICAQKFNGLTVLPPLLTDEMIAQYTSALLAGTITSGWTFGAGAALQIPFAMQMAYRFNGIGVTQNVLYENQKLIANQFNSAIGKIQDSLSSTASALGKLQDVVNQNAQALNTLVKQLSSNFGAISSVLNDILSRLDKVEAEVQIDRLITGRLQSLQTYVTQQLIRAAEIRASANLAATKMSECVLGQSKRVDFCGKGYHLMSFPQSAPHGVVFLHVTYVPAQEKNFTCAPAICHDGKAHFPREGVFVSNGTHWFVTQRNFYEPQIITTDNTFVSGSCDVVIGIVNNTVYDPLQPELDSGGGGSDIDPYKEFGSSYQLLNFLPLDFFPDLNALVDTATALYEEELTGREHCSPHHTAIRQALVCWDELTKLIAWMSSNITSEQVRTIIVNHVNDTWGLKVRQSLWFHLSCLTFGQHTVQEFLVSFGVWIRTPAPYRPPNAPILSTLPEHTVIC

SEQ ID NO: 10996 - protein, 1301 aa, Artificial Sequence
  SARS-CoV-2/Wuhan/HBCDC-HB-01/2019__EPI_ISL_402132 spike protein (1-1147)(I712C_T1077C) WhcAg construct
MFVFLVLLPLVSSQCVNLTTRTQLPPAYTNSITRGVYYPDKVFRSSVLHSTQDLFLPFFSNVTWFHAIHVSGTNGTKRFDNPVLPFNDGVYFASTEKSNIIRGWIFGTTLDSKTQSLLIVNNATNVVIKVCEFQFCNDPFLGVYYHKNNKSWMESEFRVYSSANNCTFEYVSQPFLMDLEGKQGNFKNLREFVFKNIDGYFKIYSKHTPINLVRDLPQGFSALEPLVDLPIGINITRFQTLLALHRSYLTPGDSSSGWTAGAAAYYVGYLQPRTFLLKYNENGTITDAVDCALDPLSETKCTLKSFTVEKGIYQTSNFRVQPTESIVRFPNITNLCPFGEVFNATRFASVYAWNRKRISNCVADYSVLYNSASFSTFKCYGVSPTKLNDLCFTNVYADSFVIRGDEVRQIAPGQTGKIADYNYKLPDDFTGCVIAWNSNNLDSKVGGNYNYLYRLFRKSNLKPFERDISTEIYQAGSTPCNGVEGFNCYFPLQSYGFQPTNGVGYQPYRVVVLSFELLHAPATVCGPKKSTNLVKNKCVNFNFNGLTGTGVLTESNKKFLPFQQFGRDIADTTDAVRDPQTLEILDITPCSFGGVSVITPGTNTSNQVAVLYQDVNCTEVPVAIHADQLTPTWRVYSTGSNVFQTRAGCLIGAEHVNNSYECDIPIGAGICASYQTQTNSPRRARSVASQSIIAYTMSLGAENSVAYSNNSCAIPTNFTISVTTEILPVSMTKTSVDCTMYICGDSTECSNLLLQYGSFCTQLNRALTGIAVEQDKNTQEVFAQVKQIYKTPPIKDFGGFNFSQILPDPSKPSKRSFIEDLLFNKVTLADAGFIKQYGDCLGDIAARDLICAQKFNGLTVLPPLLTDEMIAQYTSALLAGTITSGWTFGAGAALQIPFAMQMAYRFNGIGVTQNVLYENQKLIANQFNSAIGKIQDSLSSTASALGKLQDVVNQNAQALNTLVKQLSSNFGAISSVLNDILSRLDKVEAEVQIDRLITGRLQSLQTYVTQQLIRAAEIRASANLAATKMSECVLGQSKRVDFCGKGYHLMSFPQSAPHGVVFLHVTYVPAQEKNFTCAPAICHDGKAHFPREGVFVSNGTHWFVTQRNFYEPQIITTDNTFVSGNCDVVIGIVNNTVYDPLQPELDSGGGGSDIDPYKEFGSSYQLLNFLPLDFFPDLNALVDTATALYEEELTGREHCSPHHTAIRQALVCWDELTKLIAWMSSNITSEQVRTIIVNHVNDTWGLKVRQSLWFHLSCLTFGQHTVQEFLVSFGVWIRTPAPYRPPNAPILSTLPEHTVIC

SEQ ID NO: 10997 - protein, 1301 aa, Artificial Sequence
  SARS-CoV-2/Guangdong/20SF028/2020__EPI_ISL_403936 spike protein (1-1147)(I712C_T1077C) WhcAg construct
MFVFLVLLPLVSSQCVNLTTRTQLPPAYTNSFTRGVYYPDKVFRSSVLYSTQDLFLPFFSNVTWFHAIHVSGTNGTKRFDNPVLPFNDGVYFASTEKSNIIRGWIFGTTLDSKTQSLLIVNNATNVVIKVCEFQFCNDPFLGVYYHKNNKSWMESEFRVYSSANNCTFEYVSQPFLMDLEGKQGNFKNLREFVFKNIDGYFKIYSKHTPINLVRDLPQGFSALEPLVDLPIGINITRFQTLLALHRSYLTPGDSSSGWTAGAAAYYVGYLQPRTFLLKYNENGTITDAVDCALDPLSETKCTLKSFTVEKGIYQTSNFRVQPTESIVRFPNITNLCPFGEVFNATRFASVYAWNRKRISNCVADYSVLYNSASFSTFKCYGVSPTKLNDLCFTNVYADSFVIRGDEVRQIAPGQTGKIADYNYKLPDDFTGCVIAWNSNNLDSKVGGNYNYLYRLFRKSNLKPFERDISTEIYQAGSTPCNGVEGFNCYFPLQSYGFQPTNGVGYQPYRVVVLSFELLHAPATVCGPKKSTNLVKNKCVNFNFNGLTGTGVLTESNKKFLPFQQFGRDIADTTDAVRDPQTLEILDITPCSFGGVSVITPGTNTSNQVAVLYQDVNCTEVPVAIHADQLTPTWRVYSTGSNVFQTRAGCLIGAEHVNNSYECDIPIGAGICASYQTQTNSPRRARSVASQSIIAYTMSLGAENSVAYSNNSCAIPTNFTISVTTEILPVSMTKTSVDCTMYICGDSTECSNLLLQYGSFCTQLNRALTGIAVEQDKNTQEVFAQVKQIYKTPPIKDFGGFNFSQILPDPSKPSKRSFIEDLLFNKVTLADAGFIKQYGDCLGDIAARDLICAQKFNGLTVLPPLLTDEMIAQYTSALLAGTITSGWTFGAGAALQIPFAMQMAYRFNGIGVTQNVLYENQKLIANQFNSAIGKIQDSLSSTASALGKLQDVVNQNAQALNTLVKQLSSNFGAISSVLNDILSRLDKVEAEVQIDRLITGRLQSLQTYVTQQLIRAAEIRASANLAATKMSECVLGQSKRVDFCGKGYHLMSFPQSAPHGVVFLHVTYVPAQEKNFTCAPAICHDGKAHFPREGVFVSNGTHWFVTQRNFYEPQIITTDNTFVSGNCDVVIGIVNNTVYDPLQPELDSGGGGSDIDPYKEFGSSYQLLNFLPLDFFPDLNALVDTATALYEEELTGREHCSPHHTAIRQALVCWDELTKLIAWMSSNITSEQVRTIIVNHVNDTWGLKVRQSLWFHLSCLTFGQHTVQEFLVSFGVWIRTPAPYRPPNAPILSTLPEHTVIC

SEQ ID NO: 10998 - protein, 1301 aa, Artificial Sequence
  SARS-CoV-2/Shenzhen/SZTH-001/2020__EPI_ISL_406592 spike protein (1-1147)(I712C_T1077C) WhcAg construct
MFVFLVLLPLVSSQCVNLTTRTQLPPAYTNSFTRGVYYPDKVFRSSVLHSTQDLFLPFFSNVTWFHAIHVSGTNGTKRFDNPVLPFNDGVYFASTEKSNIIRGWIFGTTLDSKTQSLLIVNNATNVVIKVCEFQFCNDPFLGVYYHKNNKSWMESEFRVYSSANNCTFEYVSQPFLMDLEGKQGNFKNLREFVFKNIDGYFKIYSKHTPINLVRDLPQGFSALEPLVDLPIGINITRFQTLLALHRSYLTPGDSSSGWTAGAAAYYVGYLQPRTFLLKYNENGTITDAVDCALDPLSETKCTLKSFTVEKGIYQTSNFRVQPTESIVRFPNITNLCPFGEVFNATRFASVYAWNRKRISNCVADYSVLYNSASFSTFKCYGVSPTKLNDLCFTNVYADSFVIRGDEVRQIAPGQTGKIADYNYKLPDDFTGCVIAWNSNNLDSKVGGNYNYLYRLFRKSNLKPFERDISTEIYQAGSTPCNGVEGFNCYFPLQSYGFQPTNGVGYQPYRVVVLSFELLHAPATVCGPKKSTNLVKNKCVNFNFNGLTGTGVLTESNKKFLPFQQFGRDIADTTDAVRDPQTLEILDITPCSFGGVSVITPGTNTSNQVAVLYQDVNCTEVPVAIHADQLTPTWRVYSTGSNVFQTRAGCLIGAEHVNNSYECDIPIGAGICASYQTQTNSPRRARSVASQSIIAYTMSLGAENSVAYSNNSCAIPTNFTISVTTEILPVSMTKTSVDCTMYICGDSTECSNLLLQYGSFCTQLNRALTGIAVEQDKNTQEVFAQVKQIYKTPPIKDFGGFNFSQILPDPSKPSKRSFIEDLLFNKVTLADAGFIKQYGDCLGDIAARDLICAQKFNGLTVLPPLLTDEMIAQYTSALLAGTITSGWTFGAGAALQIPFAMQMAYRFNGIGVTQNVLYENQKLIANQFNSAIGKIQDSLSSTASALGKLQDVVNQNAQALNTLVKQLSSNFGAISSVLNDILSRLDKVEAEVQIDRLITGRLQSLQTYVTQQLIRAAEIRASANLAATKMSECVLGQSKRVDFCGKGYHLMSFPQSAPHGVVFLHVTYVPAQEKNFTCAPAICHDGKAHFPREGVFVSNGTHWFVTQRNFYEPQIITTDNTFVSGNCDVLIGIVNNTVYDPLQPELDSGGGGSDIDPYKEFGSSYQLLNFLPLDFFPDLNALVDTATALYEEELTGREHCSPHHTAIRQALVCWDELTKLIAWMSSNITSEQVRTIIVNHVNDTWGLKVRQSLWFHLSCLTFGQHTVQEFLVSFGVWIRTPAPYRPPNAPILSTLPEHTVIC

SEQ ID NO: 10999 - protein, 1301 aa, Artificial Sequence
  SARS-CoV-2/Shenzhen/SZTH-004/2020__EPI_ISL_406595 spike protein (1-1147)(I712C_T1077C) WhcAg construct
MFVFLVLLPLVSSQCVNLTTRTQLPPAYTNSFTRGVYYPDKVFRSSVLHSTQDLFLPFFSNVTWFHAIHVSGTNGTKRFDNPVLPFNDGVYFASTEKSNIIRGWIFGTTLDSKTQSLLIVNNATNVVIKVCEFQFCNDPFLGVYYHKNNKSWMESEFRVYSSANNCTFEYVSQPFLMDLEGKQGNFKNLREFVFKNIDGYFKIYSKHTPINLVRDLPQGFSALEPLVDLPIGINITRFQTLLALHRSYLTPGDSSSGWTAGAAAYYVGYLQPRTFLLKYNENGTITDAVDCALDPLSETKCTLKSFTVEKGIYQTSNFRVQPTESIVRFPNITNLCPFGEVFNATRFASVYAWDRKRISNCVAYYSVLYNSASFSTFKCYGVSPTKLNDLCFTNVYADSFVIRGDEVRQIAPGQTGKIADYNYKLPDDFTGCVIAWNSNNLDSKVGGNYNYLYRLFRKSNLKPFERDISTEIYQAGSTPCNGVEGFNCYFPLQSYGFQPTNGVGYQPYRVVVLSFELLHAPATVCGPKKSTNLVKNKCVNFNFNGLTGTGVLTESNKKFLPFQQFGRDIADTTDAVRDPQTLEILDITPCSFGGVSVITPGTNTSNQVAVLYQDVNCTEVPVAIHADQLTPTWRVYSTGSNVFQTRAGCLIGAEHVNNSYECDIPIGAGICASYQTQTNSPRRARSVASQSIIAYTMSLGAENSVAYSNNSCAIPTNFTISVTTEILPVSMTKTSVDCTMYICGDSTECSNLLLQYGSFCTQLNRALTGIAVEQDKNTQEVFAQVKQIYKTPPIKDFGGFNFSQILPDPSKPSKRSFIEDLLFNKVTLADAGFIKQYGDCLGDIAARDLICAQKFNGLTVLPPLLTDEMIAQYTSALLAGTITSGWTFGAGAALQIPFAMQMAYRFNGIGVTQNVLYENQKLIANQFNSAIGKIQDSLSSTASALGKLQDVVNQNAQALNTLVKQLSSNFGAISSVLNDILSRLDKVEAEVQIDRLITGRLQSLQTYVTQQLIRAAEIRASANLAATKMSECVLGQSKRVDFCGKGYHLMSFPQSAPHGVVFLHVTYVPAQEKNFTCAPAICHDGKAHFPREGVFVSNGTHWFVTQRNFYEPQIITTDNTFVSGNCDVVIGIVNNTVYDPLQPELDSGGGGSDIDPYKEFGSSYQLLNFLPLDFFPDLNALVDTATALYEEELTGREHCSPHHTAIRQALVCWDELTKLIAWMSSNITSEQVRTIIVNHVNDTWGLKVRQSLWFHLSCLTFGQHTVQEFLVSFGVWIRTPAPYRPPNAPILSTLPEHTVIC

SEQ ID NO: 11000 - protein, 1301 aa, Artificial Sequence
  SARS-CoV-2/France/IDF0372/2020__EPI_ISL_406596 spike protein (1-1147)(I712C_T1077C) WhcAg construct
MFVFLVLLPLVSSQCVNLTTRTQLPPAYTNSFTRGVYYPDKVFRSSVLHSTQDLFLPFFSNVTWFHAIHVSGTNGTKRFDNPVLPFNDGVYFASTEKSNIIRGWIFGTTLDSKTQSLLIVNNATNVVIKVCEFQFCNDPFLGVYYHKNNKSWMESEFRVYSSANNCTFEYVSQPFLMDLEGKQGNFKNLREFVFKNIDGYFKIYSKHTPINLVRDLPQGFSALEPLVDLPIGINITRFQTLLALHRSYLTPGDSSSGWTAGAAAYYVGYLQPRTFLLKYNENGTITDAVDCALDPLSETKCTLKSFTVEKGIYQTSNFRVQPTESIVRFPNITNLCPFGEVFNATRFASVYAWNRKRISNCVADYSFLYNSASFSTFKCYGVSPTKLNDLCFTNVYADSFVIRGDEVRQIAPGQTGKIADYNYKLPDDFTGCVIAWNSNNLDSKVGGNYNYLYRLFRKSNLKPFERDISTEIYQAGSTPCNGVEGFNCYFPLQSYGFQPTNGVGYQPYRVVVLSFELLHAPATVCGPKKSTNLVKNKCVNFNFNGLTGTGVLTESNKKFLPFQQFGRDIADTTDAVRDPQTLEILDITPCSFGGVSVITPGTNTSNQVAVLYQDVNCTEVPVAIHADQLTPTWRVYSTGSNVFQTRAGCLIGAEHVNNSYECDIPIGAGICASYQTQTNSPRRARSVASQSIIAYTMSLGAENSVAYSNNSCAIPTNFTISVTTEILPVSMTKTSVDCTMYICGDSTECSNLLLQYGSFCTQLNRALTGIAVEQDKNTQEVFAQVKQIYKTPPIKDFGGFNFSQILPDPSKPSKRSFIEDLLFNKVTLADAGFIKQYGDCLGDIAARDLICAQKFNGLTVLPPLLTDEMIAQYTSALLAGTITSGWTFGAGAALQIPFAMQMAYRFNGIGVTQNVLYENQKLIANQFNSAIGKIQDSLSSTASALGKLQDVVNQNAQALNTLVKQLSSNFGAISSVLNDILSRLDKVEAEVQIDRLITGRLQSLQTYVTQQLIRAAEIRASANLAATKMSECVLGQSKRVDFCGKGYHLMSFPQSAPHGVVFLHVTYVPAQEKNFTCAPAICHDGKAHFPREGVFVSNGTHWFVTQRNFYEPQIITTDNTFVSGNCDVVIGIVNNTVYDPLQPELDSGGGGSDIDPYKEFGSSYQLLNFLPLDFFPDLNALVDTATALYEEELTGREHCSPHHTAIRQALVCWDELTKLIAWMSSNITSEQVRTIIVNHVNDTWGLKVRQSLWFHLSCLTFGQHTVQEFLVSFGVWIRTPAPYRPPNAPILSTLPEHTVIC

SEQ ID NO: 11001 - protein, 1301 aa, Artificial Sequence
  SARS-CoV-2/Australia/VIC01/2020__EPI_ISL_406844 spike protein (1-1147)(I712C_T1077C) WhcAg construct
MFVFLVLLPLVSSQCVNLTTRTQLPPAYTNSFTRGVYYPDKVFRSSVLHSTQDLFLPFFSNVTWFHAIHVSGTNGTKRFDNPVLPFNDGVYFASTEKSNIIRGWIFGTTLDSKTQSLLIVNNATNVVIKVCEFQFCNDPFLGVYYHKNNKSWMESEFRVYSSANNCTFEYVSQPFLMDLEGKQGNFKNLREFVFKNIDGYFKIYSKHTPINLVRDLPQGFSALEPLVDLPIGINITRFQTLLALHRRYLTPGDSSSGWTAGAAAYYVGYLQPRTFLLKYNENGTITDAVDCALDPLSETKCTLKSFTVEKGIYQTSNFRVQPTESIVRFPNITNLCPFGEVFNATRFASVYAWNRKRISNCVADYSVLYNSASFSTFKCYGVSPTKLNDLCFTNVYADSFVIRGDEVRQIAPGQTGKIADYNYKLPDDFTGCVIAWNSNNLDSKVGGNYNYLYRLFRKSNLKPFERDISTEIYQAGSTPCNGVEGFNCYFPLQSYGFQPTNGVGYQPYRVVVLSFELLHAPATVCGPKKSTNLVKNKCVNFNFNGLTGTGVLTESNKKFLPFQQFGRDIADTTDAVRDPQTLEILDITPCSFGGVSVITPGTNTSNQVAVLYQDVNCTEVPVAIHADQLTPTWRVYSTGSNVFQTRAGCLIGAEHVNNSYECDIPIGAGICASYQTQTNSPRRARSVASQSIIAYTMSLGAENSVAYSNNSCAIPTNFTISVTTEILPVSMTKTSVDCTMYICGDSTECSNLLLQYGSFCTQLNRALTGIAVEQDKNTQEVFAQVKQIYKTPPIKDFGGFNFSQILPDPSKPSKRSFIEDLLFNKVTLADAGFIKQYGDCLGDIAARDLICAQKFNGLTVLPPLLTDEMIAQYTSALLAGTITSGWTFGAGAALQIPFAMQMAYRFNGIGVTQNVLYENQKLIANQFNSAIGKIQDSLSSTASALGKLQDVVNQNAQALNTLVKQLSSNFGAISSVLNDILSRLDKVEAEVQIDRLITGRLQSLQTYVTQQLIRAAEIRASANLAATKMSECVLGQSKRVDFCGKGYHLMSFPQSAPHGVVFLHVTYVPAQEKNFTCAPAICHDGKAHFPREGVFVSNGTHWFVTQRNFYEPQIITTDNTFVSGNCDVVIGIVNNTVYDPLQPELDSGGGGSDIDPYKEFGSSYQLLNFLPLDFFPDLNALVDTATALYEEELTGREHCSPHHTAIRQALVCWDELTKLIAWMSSNITSEQVRTIIVNHVNDTWGLKVRQSLWFHLSCLTFGQHTVQEFLVSFGVWIRTPAPYRPPNAPILSTLPEHTVIC

SEQ ID NO: 11002 - protein, 1301 aa, Artificial Sequence
  SARS-CoV-2/Germany/BavPat1/2020__EPI_ISL_406862 spike protein (1-1147)(I712C_T1077C) WhcAg construct
MFVFLVLLPLVSSQCVNLTTRTQLPPAYTNSFTRGVYYPDKVFRSSVLHSTQDLFLPFFSNVTWFHAIHVSGTNGTKRFDNPVLPFNDGVYFASTEKSNIIRGWIFGTTLDSKTQSLLIVNNATNVVIKVCEFQFCNDPFLGVYYHKNNKSWMESEFRVYSSANNCTFEYVSQPFLMDLEGKQGNFKNLREFVFKNIDGYFKIYSKHTPINLVRDLPQGFSALEPLVDLPIGINITRFQTLLALHRSYLTPGDSSSGWTAGAAAYYVGYLQPRTFLLKYNENGTITDAVDCALDPLSETKCTLKSFTVEKGIYQTSNFRVQPTESIVRFPNITNLCPFGEVFNATRFASVYAWNRKRISNCVADYSVLYNSASFSTFKCYGVSPTKLNDLCFTNVYADSFVIRGDEVRQIAPGQTGKIADYNYKLPDDFTGCVIAWNSNNLDSKVGGNYNYLYRLFRKSNLKPFERDISTEIYQAGSTPCNGVEGFNCYFPLQSYGFQPTNGVGYQPYRVVVLSFELLHAPATVCGPKKSTNLVKNKCVNFNFNGLTGTGVLTESNKKFLPFQQFGRDIADTTDAVRDPQTLEILDITPCSFGGVSVITPGTNTSNQVAVLYQGVNCTEVPVAIHADQLTPTWRVYSTGSNVFQTRAGCLIGAEHVNNSYECDIPIGAGICASYQTQTNSPRRARSVASQSIIAYTMSLGAENSVAYSNNSCAIPTNFTISVTTEILPVSMTKTSVDCTMYICGDSTECSNLLLQYGSFCTQLNRALTGIAVEQDKNTQEVFAQVKQIYKTPPIKDFGGFNFSQILPDPSKPSKRSFIEDLLFNKVTLADAGFIKQYGDCLGDIAARDLICAQKFNGLTVLPPLLTDEMIAQYTSALLAGTITSGWTFGAGAALQIPFAMQMAYRFNGIGVTQNVLYENQKLIANQFNSAIGKIQDSLSSTASALGKLQDVVNQNAQALNTLVKQLSSNFGAISSVLNDILSRLDKVEAEVQIDRLITGRLQSLQTYVTQQLIRAAEIRASANLAATKMSECVLGQSKRVDFCGKGYHLMSFPQSAPHGVVFLHVTYVPAQEKNFTCAPAICHDGKAHFPREGVFVSNGTHWFVTQRNFYEPQIITTDNTFVSGNCDVVIGIVNNTVYDPLQPELDSGGGGSDIDPYKEFGSSYQLLNFLPLDFFPDLNALVDTATALYEEELTGREHCSPHHTAIRQALVCWDELTKLIAWMSSNITSEQVRTIIVNHVNDTWGLKVRQSLWFHLSCLTFGQHTVQEFLVSFGVWIRTPAPYRPPNAPILSTLPEHTVIC

SEQ ID NO: 11003 - protein, 1301 aa, Artificial Sequence
  SARS-CoV-2/Wuhan/HBCDC-HB-02/2020__EPI_ISL_412978 spike protein (1-1147)(I712C_T1077C) WhcAg construct
MFVFLVLLPLVSSQCVNLTTRTQLPPAYTNSFTRGVYYPDKVFRSSVLHSTQDLFLPFFSNVTWFHAIHVSGTNGTKRFDNPVLPFNDGVYFASTEKSNIIRGWIFGTTLDSKTQSLLIVNNATNVVIKVCEFQFCNDPFLGVYYHKNNKSWMESEFRVYSSANNCTFEYVSQPFLMDLEGKQGNFKNLREFVFKNIDGYFKIYSKHTPINLVRDLPQGFSALEPLVDLPIGINITRFQTLLALHRSYLTPGDSSSGWTAGAAAYYVGYLQPRTFLLKYNENGTITDAVDCALDPLSETKCTLKSFTVEKGIYQTSNFRVQPTESIVRFPNITNLCPFGEVFNATRFASVYAWNRKRISNCVADYSVLYNSASFSTFKCYGVSPTKLNDLCFTNVYADSFVIRGDEVRQIAPGQTGKIADYNYKLPDDFTGCVIAWNSNNLDSKVGGNYNYLYRLFRKSNLKPFERDISTEIYQAGSTPCNGVEGFNCYFPLQSYGFQPTNGVGYQPYRVVVLSFELLHAPATVCGPKKSTNLVKNKCVNFNFNGLTGTGVLTESNKKFLPFQQFGRDIADTTDAVRDPQTLEILDITPCSFGGVSVITPGTNTSNQVAVLYQDVNCTEVPVAIHADQLTPTWRVYSTGSNVFQTRAGCLIGAEHVNNSYECDIPIGAGICASYQTQTNSPRRARSVASQSIIAYTMSLGAENSVAYSNNSCAIPTNFTISVTTEILPVSMTKTSVDCTMYICGDSTECSNFLLQYGSFCTQLNRALTGIAVEQDKNTQEVFAQVKQIYKTPPIKDFGGFNFSQILPDPSKPSKRSFIEDLLFNKVTLADAGFIKQYGDCLGDIAARDLICAQKFNGLTVLPPLLTDEMIAQYTSALLAGTITSGWTFGAGAALQIPFAMQMAYRFNGIGVTQNVLYENQKLIANQFNSAIGKIQDSLSSTASALGKLQDVVNQNAQALNTLVKQLSSNFGAISSVLNDILSRLDKVEAEVQIDRLITGRLQSLQTYVTQQLIRAAEIRASANLAATKMSECVLGQSKRVDFCGKGYHLMSFPQSAPHGVVFLHVTYVPAQEKNFTCAPAICHDGKAHFPREGVFVSNGTHWFVTQRNFYEPQIITTDNTFVSGNCDVVIGIVNNTVYDPLQPELDSGGGGSDIDPYKEFGSSYQLLNFLPLDFFPDLNALVDTATALYEEELTGREHCSPHHTAIRQALVCWDELTKLIAWMSSNITSEQVRTIIVNHVNDTWGLKVRQSLWFHLSCLTFGQHTVQEFLVSFGVWIRTPAPYRPPNAPILSTLPEHTVIC

SEQ ID NO: 11004 - protein, 1301 aa, Artificial Sequence
  SARS-CoV-2/Australia/QLD02/2020__EPI_ISL_407896 spike protein (1-1147)(I712C_T1077C) WhcAg construct
MFVFLVLLPLVSSQCVNLTTRTQLPPAYTNSFTRGVYYPDKVFRSSVLHSTQDLFLPFFSNVTWFHAIHVSGTNGTKRFDNPVLPFNDGVYFASTEKSNIIRGWIFGTTLDSKTQSLLIVNNATNVVIKVCEFQFCNDPFLGVYYHKNNKSWMESEFRVYSSANNCTFEYVSQPFLMDLEGKQGNFKNLREFVFKNIDGYFKIYSKHTPINLVRDLPQGFSALEPLVDLPIGINITRFQTLLALHRSYLTPGDSSSGWTAGAAAYYVGYLQPRTFLLKYNENGTITDAVDCALDPLSETKCTLKSFTVEKGIYQTSNFRVQPTESIVRFPNITNLCPFGEVFNATRFASVYAWNRKRISNCVADYSVLYNSASFSTFKCYGVSPTKLNDLCFTNVYADSFVIRGDEVRQIAPGQTGKIADYNYKLPDDFTGCVIAWNSNNLDSKVGGNYNYLYRLFRKSNLKPFERDISTEIYQAGSTPCNGVEGFNCYFPLQSYGFQPTNGVGYQPYRVVVLSFELLHAPATVCGPKKSTNLVKNKCVNFNFNGLTGTGVLTESNKKFLPFQQFGRDIADTTDAVRDPQTLEILDITPCSFGGVSVITPGTNTSNQVAVLYQDVNCTEVPVAIHADQLTPTWRVYSTGSNVFQTRAGCLIGAEHVNNSYECDIPIGAGICASYQTQTNSPRRARSVASQSIIAYTMSLGAENSVAYSNNSCAIPTNFTISVTTEILPVSMTKTSVDCTMYICGDSTECSNLLLQYGSFCTQLNRALTGIAVEQDKNTQEVFAQVKQIYKTPPIKDFGGFNFSQILPDPSKPSKRSFIEDLLFNKVTLADAGFIKQYGDCLGDIAARDLICAQKFNGLTVLPPLLTDEMIAQYTSALLAGTITSGWTFGAGAALQIPFAMQMAYRFNGIGVTQNVLYENQKLIANQFNSAIGKIQDSLSSTASALGKLQDVVNQNAQALNTLVKQLSSNFGAISSVLNDILSRLDKVEAEVQIDRLITGRLQSLQTYVTQQLIRAAEIRASANLAATKMSECVLGQSKRVDFCGKGYHLMSFPQSAPHGVVFLHVTYVPAQEKNFTCAPAICHDGKAHFPREGVFVSNGTHWFVTQRNFYEPQIITTDNTFVSGNCDVVIGIVNNTVYDPLQLELDSGGGGSDIDPYKEFGSSYQLLNFLPLDFFPDLNALVDTATALYEEELTGREHCSPHHTAIRQALVCWDELTKLIAWMSSNITSEQVRTIIVNHVNDTWGLKVRQSLWFHLSCLTFGQHTVQEFLVSFGVWIRTPAPYRPPNAPILSTLPEHTVIC

SEQ ID NO: 11005 - protein, 1301 aa, Artificial Sequence
  SARS-CoV-2/India/1-31/2020__EPI_ISL_413523 spike protein (1-1147)(I712C_T1077C) WhcAg construct
MFVFLVLLPLVSSQCVNLTTRTQLPPAYTNSFTRGVYYPDKVFRSSVLHSTQDLFLPFFSNVTWFHAIHVSGTNGTKRFDNPVLPFNDGVYFASTEKSNIIRGWIFGTTLDSKTQSLLIVNNATNVVIKVCEFQFCNDPFLGVYYHKNNKSWMESEFRVYSSANNCTFEYVSQPFLMDLEGKQGNFKNLREFVFKNIDGYFKIYSKHTPINLVRDLPQGFSALEPLVDLPIGINITRFQTLLALHRSYLTPGDSSSGWTAGAAAYYVGYLQPRTFLLKYNENGTITDAVDCALDPLSETKCTLKSFTVEKGIYQTSNFRVQPTESIVRFPNITNLCPFGEVFNATRFASVYAWNRKRISNCVADYSVLYNSASFSTFKCYGVSPTKLNDLCFTNVYADSFVIRGDEVRQIAPGQTGKIADYNYKLPDDFTGCVIAWNSNNLDSKVGGNYNYLYRLFRKSNLKPFERDISTEIYQAGSTPCNGVEGFNCYFPLQSYGFQPTNGVGYQPYRVVVLSFELLHAPATVCGPKKSTNLVKNKCVNFNFNGLTGTGVLTESNKKFLPFQQFGRDIADTTDAVRDPQTLEILDITPCSFGGVSVITPGTNTSNQVAVLYQDVNCTEVPVAIHADQLTPTWRVYSTGSNVFQTRAGCLIGAEHVNNSYECDIPIGAGICASYQTQTNSPRRARSVASQSIIAYTMSLGAENSVAYSNNSCAIPTNFTISVTTEILPVSMTKTSVDCTMYICGDSTECSNLLLQYGSFCTQLNRALTGIAVEQDKNTQEVFAQVKQIYKTPPIKDFGGFNFSQILPDPSKPSKRSFIEDLLFNKVTLADAGFIKQYGDCLGDIAARDLICAQKFNGLTVLPPLLTDEMIAQYTSALLAGTITSGWTFGAGAALQIPFAMQMAYRFNGIGVTQNVLYENQKLIANQFNSVIGKIQDSLSSTASALGKLQDVVNQNAQALNTLVKQLSSNFGAISSVLNDILSRLDKVEAEVQIDRLITGRLQSLQTYVTQQLIRAAEIRASANLAATKMSECVLGQSKRVDFCGKGYHLMSFPQSAPHGVVFLHVTYVPAQEKNFTCAPAICHDGKAHFPREGVFVSNGTHWFVTQRNFYEPQIITTDNTFVSGNCDVVIGIVNNTVYDPLQPELDSGGGGSDIDPYKEFGSSYQLLNFLPLDFFPDLNALVDTATALYEEELTGREHCSPHHTAIRQALVCWDELTKLIAWMSSNITSEQVRTIIVNHVNDTWGLKVRQSLWFHLSCLTFGQHTVQEFLVSFGVWIRTPAPYRPPNAPILSTLPEHTVIC

SEQ ID NO: 11006 - protein, 1301 aa, Artificial Sequence
  SARS-CoV-2/Guangdong/GD2020087-P0008/2020__EPI_ISL_413863 spike protein (1-1147)(I712C_T1077C) WhcAg construct
MFVFLVLLPLVSSQCVNLTTRTQLPPAYTNSFTRGVYYPDKVFRSSVLHSTQDLFLPFFSNVTWFHAIHVSGTNGTKRFDNPVLPFNDGVYFASTEKSNIIRGWIFGTTLDSKTQSLLIVNNATNVVIKVCEFQFCNDPFLGVYYHKNNKSWMESEFRVYSSANNCTFEYVSQPFLMDLEGKQGNFKNLREFVFKNIDGYFKIYSKHTPINLVRDLPQGFSALEPLVDLPIGINITRFQTLLALHRSYLTPGDSSSGWTAGAAAYYVGYLQPRTFLLKYNENGTITDAVDCALDPLSETKCTLKSFTVEKGIYQTSNFRVQPTESIVRFPNITNLCPFGEVFNATRFASVYAWNRKRISNCVADYSVLYNSASFSTFKCYGVSPTKLNDLCFTNVYADSFVIRGDEVREIAPGQTGKIADYNYKLPDDFTGCVIAWNSNNLDSKVGGNYNYLYRLFRKSNLKPFERDISTEIYQAGSTPCNGVEGFNCYFPLQSYGFQPTNGVGYQPYRVVVLSFELLHAPATVCGPKKSTNLVKNKCVNFNFNGLTGTGVLTESNKKFLPFQQFGRDIADTTDAVRDPQTLEILDITPCSFGGVSVITPGTNTSNQVAVLYQDVNCTEVPVAIHADQLTPTWRVYSTGSNVFQTRAGCLIGAEHVNNSYECDIPIGAGICASYQTQTNSPRRARSVASQSIIAYTMSLGAENSVAYSNNSCAIPTNFTISVTTEILPVSMTKTSVDCTMYICGDSTECSNLLLQYGSFCTQLNRALTGIAVEQDKNTQEVFAQVKQIYKTPPIKDFGGFNFSQILPDPSKPSKRSFIEDLLFNKVTLADAGFIKQYGDCLGDIAARDLICAQKFNGLTVLPPLLTDEMIAQYTSALLAGTITSGWTFGAGAALQIPFAMQMAYRFNGIGVTQNVLYENQKLIANQFNSAIGKIQDSLSSTASALGKLQDVVNQNAQALNTLVKQLSSNFGAISSVLNDILSRLDKVEAEVQIDRLITGRLQSLQTYVTQQLIRAAEIRASANLAATKMSECVLGQSKRVDFCGKGYHLMSFPQSAPHGVVFLHVTYVPAQEKNFTCAPAICHDGKAHFPREGVFVSNGTHWFVTQRNFYEPQIITTDNTFVSGNCDVVIGIVNNTVYDPLQPELDSGGGGSDIDPYKEFGSSYQLLNFLPLDFFPDLNALVDTATALYEEELTGREHCSPHHTAIRQALVCWDELTKLIAWMSSNITSEQVRTIIVNHVNDTWGLKVRQSLWFHLSCLTFGQHTVQEFLVSFGVWIRTPAPYRPPNAPILSTLPEHTVIC

SEQ ID NO: 11007 - protein, 1301 aa, Artificial Sequence
  SARS-CoV-2/Sweden/01/2020__EPI_ISL_411951 spike protein (1-1147)(I712C_T1077C) WhcAg construct
MFVFLVLLPLVSSQCVNLTTRTQLPPAYTNSFTRGVYYPDKVFRSSVLHSTQDLFLPFFSNVTWFHAIHVSGTNGTKRFDNPVLPFNDGVYFASTEKSNIIRGWIFGTTLDSKTQSLLIVNNATNVVIKVCEFQFCNDPFLGVYYHKNNKSWMESEFRVYSSANNCTFEYVSQPFLMDLEGKQGNFKNLREFVFKNIDGYFKIYSKHTPINLVRDLPQGFSALEPLVDLPIGINITRFQTLLALHRSYLTPGDSSSGWTAGAAAYYVGYLQPRTFLLKYNENGTITDAVDCALDPLSETKCTLKSFTVEKGIYQTSNFRVQPTESIVRFPNITNLCPFGEVFNATRFASVYAWNRKRISNCVADYSVLYNSASFSTFKCYGVSPTKLNDLCFTNVYADSFVIRGDEVRQIAPGQTGKIADYNYKLPDDFTGCVIAWNSNNLDSKVGGNYNYLYRLFRKSNLKPFERDISTEIYQAGSTPCNGVEGFNCYFPLQSYGFQPTNGVGYQPYRVVVLSFELLHAPATVCGPKKSTNLVKNKCVNFNFNGLTGTGVLTESNKKFLPFQQFGRDIADTTDAVRDPQTLEILDITPCSFGGVSVITPGTNTSNQVAVLYQDVNCTEVPVAIHADQLTPTWRVYSTGSNVFQTRAGCLIGAEHVNNSYECDIPIGAGICASYQTQTNSPRRARSVASQSIIAYTMSLGAENSVAYSNNSCAIPTNFTISVTTEILPVSMTKTSVDCTMYICGDSTECSNLLLQYGSFCTQLNRALTGIAVEQDKNTQEVFAQVKQIYKTPPIKDCGGFNFSQILPDPSKPSKRSFIEDLLFNKVTLADAGFIKQYGDCLGDIAARDLICAQKFNGLTVLPPLLTDEMIAQYTSALLAGTITSGWTFGAGAALQIPFAMQMAYRFNGIGVTQNVLYENQKLIANQFNSAIGKIQDSLSSTASALGKLQDVVNQNAQALNTLVKQLSSNFGAISSVLNDILSRLDKVEAEVQIDRLITGRLQSLQTYVTQQLIRAAEIRASANLAATKMSECVLGQSKRVDFCGKGYHLMSFPQSAPHGVVFLHVTYVPAQEKNFTCAPAICHDGKAHFPREGVFVSNGTHWFVTQRNFYEPQIITTDNTFVSGNCDVVIGIVNNTVYDPLQPELDSGGGGSDIDPYKEFGSSYQLLNFLPLDFFPDLNALVDTATALYEEELTGREHCSPHHTAIRQALVCWDELTKLIAWMSSNITSEQVRTIIVNHVNDTWGLKVRQSLWFHLSCLTFGQHTVQEFLVSFGVWIRTPAPYRPPNAPILSTLPEHTVIC

SEQ ID NO: 11008 - protein, 1301 aa, Artificial Sequence
  SARS-CoV-2/Tianmen/HBCDC-HB-07/2020__EPI_ISL_412983 spike protein (1-1147)(I712C_T1077C) WhcAg construct
MFVFLVLLPLVSSQCVNLTTRTQLPPAYTNSFTRGVYYPDKVFRSSVLHSTQDLFLPFFSNVTWFHAIHVSGTNGTKRFDNPVLPFNDGVYFASTEKSNIIRGWIFGTTLDSKTQSLLIVNNATNVVIKVCEFQFCNDPFLGVYYHKNNKSWMESEFRVYSSANNCTFEYVSQPFLMDLEGKQGNFKNLREFVFKNIDGYFKIYSKHTPINLVRDLPQGFSALEPLVDLPIGINITRFQTLLALHRSYLTPGDSSSGWTAGAAAYYVGYLQPRTFLLKYNENGTITDAVDCALDPLSETKCTLKSFTVEKGIYQTSNFRVQPTESIVRFPNITNLCPFGEVFNATRFASVYAWNRKRISNCVADYSVLYNSASFSTFKCYGVSPTKLNDLCFTNVYADSFVIRGDEVRQIAPGQTGKIADYNYKLPDDFTGCVIAWNSNNLDSKVGGNYNYLYRLFRKSNLKPFERDISTEIYQAGSTPCNGVEGFNCYFPLQSYGFQPTNGVGYQPYRVVVLSFELLHAPATVCGPKKSTNLVKNKCVNFNFNGLTGTGVLTESNKKFLPFQQFGRDIADTTDAVRDPQTLEILDITPCSFGGVSVITPGTNTSNQVAVLYQDLNCTEVPVAIHADQLTPTWRVYSTGSNVFQTRAGCLIGAEHVNNSYECDIPIGAGICASYQTQTNSPRRARSVASQSIIAYTMSLGAENSVAYSNNSCAIPTNFTISVTTEILPVSMTKTSVDCTMYICGDSTECSNLLLQYGSFCTQLNRALTGIAVEQDKNTQEVFAQVKQIYKTPPIKDFGGFNFSQILPDPSKPSKRSFIEDLLFNKVTLADAGFIKQYGDCLGDIAARDLICAQKFNGLTVLPPLLTDEMIAQYTSALLAGTITSGWTFGAGAALQIPFAMQMAYRFNGIGVTQNVLYENQKLIANQFNSAIGKIQDSLSSTASALGKLQDVVNQNAQALNTLVKQLSSNFGAISSVLNDILSRLDKVEAEVQIDRLITGRLQSLQTYVTQQLIRAAEIRASANLAATKMSECVLGQSKRVDFCGKGYHLMSFPQSAPHGVVFLHVTYVPAQEKNFTCAPAICHDGKAHFPREGVFVSNGTHWFVTQRNFYEPQIITTDNTFVSGNCDVVIGIVNNTVYDPLQPELDSGGGGSDIDPYKEFGSSYQLLNFLPLDFFPDLNALVDTATALYEEELTGREHCSPHHTAIRQALVCWDELTKLIAWMSSNITSEQVRTIIVNHVNDTWGLKVRQSLWFHLSCLTFGQHTVQEFLVSFGVWIRTPAPYRPPNAPILSTLPEHTVIC

SEQ ID NO: 11009 - protein, 1301 aa, Artificial Sequence
  SARS-CoV-2/Hong Kong/case42_VM20002493/2020__EPI_ISL_414527 spike protein (1-1147)(I712C_T1077C) WhcAg construct
MFVFLVLLPLVSSQCVNLTTRTQLPPAYTNSFTRGVYYPDKVFRSSVLHSTQDLFLPFFSNVTWFHAIHVSGTNGTKRFDNPVLPFNDGVYFASTEKSNIIRGWIFGTTLDSKTQSLLIVNNATNVVIKVCEFQFCNDPFLGVYYHKNNKSWMESEFRVYSSANNCTFEYVSQPFLMDLEGKQGNFKNLREFVFKNIDGYFKIYSKHTPINLVRDLPQGFSALEPLVDLPIGINITRFQTLLALHRSYLTPGDSSSGWTAGAAAYYVGYLQPRTFLLKYNENGTITDAVDCALDPLSETKCTLKSFTVEKGIYQTSNFRVQPTESIVRFPNITNLCPFGEVFNATRFASVYAWNRKRISNCVADYSVLYNSASFSTFKCYGVSPTKLNDLCFTNVYADSFVIRGDEVRQIAPGQTGKIADYNYKLPDDFTGCVIAWNSNNLDSKVGGNYNYLYRLFRKSNLKPFERDISTEIYQAGSTPCNGVEGFNCYFPLQSYGFQPTNGVGYQPYRVVVLSFELLHAPATVCGPKKSTNLVKNKCVNFNFNGLTGTGVLTESNKKFLPFQQFGRDIADTTDAVRDPQTLEILDITPCSFGGVSVITPGTNTSNQVAVLYQDVNCTEVPVAIHADQLTPTWRVYSTGSNVFQTRAGCLIGAEHVNNSYECDIPIGAGICASYQTQTNSPRRARSVASQSIIAYTMSLGAENSVAYSNNSCAIPTNFAISVTTEILPVSMTKTSVDCTMYICGDSTECSNLLLQYGSFCTQLNRALTGIAVEQDKNTQEVFAQVKQIYKTPPIKDFGGFNFSQILPDPSKPSKRSFIEDLLFNKVTLADAGFIKQYGDCLGDIAARDLICAQKFNGLTVLPPLLTDEMIAQYTSALLAGTITSGWTFGAGAALQIPFAMQMAYRFNGIGVTQNVLYENQKLIANQFNSAIGKIQDSLSSTASALGKLQDVVNQNAQALNTLVKQLSSNFGAISSVLNDILSRLDKVEAEVQIDRLITGRLQSLQTYVTQQLIRAAEIRASANLAATKMSECVLGQSKRVDFCGKGYHLMSFPQSAPHGVVFLHVTYVPAQEKNFTCAPAICHDGKAHFPREGVFVSNGTHWFVTQRNFYEPQIITTDNTFVSGNCDVVIGIVNNTVYDPLQPELDSGGGGSDIDPYKEFGSSYQLLNFLPLDFFPDLNALVDTATALYEEELTGREHCSPHHTAIRQALVCWDELTKLIAWMSSNITSEQVRTIIVNHVNDTWGLKVRQSLWFHLSCLTFGQHTVQEFLVSFGVWIRTPAPYRPPNAPILSTLPEHTVIC

SEQ ID NO: 11010 - protein, 1301 aa, Artificial Sequence
  SARS-CoV-2/USA/CruiseA-23/2020__EPI_ISL_414482 spike protein (1-1147)(I712C_T1077C) WhcAg construct
MFVFLVLLPLVSSQCVNLTTRTQLPPAYTNSFTRGVYYPDKVFRSSVLHSTQDLFLPFFSNVTWFHAIHVSGTNGTKRFDNPVLPFNDGVYFASTEKSNIIRGWIFGTTLDSKTQSLLIVNNATNVVIKVCEFQFCNDPFLGVYYHKNNKSWMESEFRVYSSANNCTFEYVSQPFLMDLEVKQGNFKNLREFVFKNIDGYFKIYSKHTPINLVRDLPQGFSALEPLVDLPIGINITRFQTLLALHRSYLTPGDSSSGWTAGAAAYYVGYLQPRTFLLKYNENGTITDAVDCALDPLSETKCTLKSFTVEKGIYQTSNFRVQPTESIVRFPNITNLCPFGEVFNATRFASVYAWNRKRISNCVADYSVLYNSASFSTFKCYGVSPTKLNDLCFTNVYADSFVIRGDEVRQIAPGQTGKIADYNYKLPDDFTGCVIAWNSNNLDSKVGGNYNYLYRLFRKSNLKPFERDISTEIYQAGSTPCNGVEGFNCYFPLQSYGFQPTNGVGYQPYRVVVLSFELLHAPATVCGPKKSTNLVKNKCVNFNFNGLTGTGVLTESNKKFLPFQQFGRDIADTTDAVRDPQTLEILDITPCSFGGVSVITPGTNTSNQVAVLYQDVNCTEVPVAIHADQLTPTWRVYSTGSNVFQTRAGCLIGAEHVNNSYECDIPIGAGICASYQTQTNSPRRARSVASQSIIAYTMSLGAENSVAYSNNSCAIPTNFTISVTTEILPVSMTKTSVDCTMYICGDSTECSNLLLQYGSFCTQLNRALTGIAVEQDKNTQEVFAQVKQIYKTPPIKDFGGFNFSQILPDPSKPSKRSFIEDLLFNKVTLADAGFIKQYGDCLGDIAARDLICAQKFNGLTVLPPLLTDEMIAQYTSALLAGTITSGWTFGAGAALQIPFAMQMAYRFNGIGVTQNVLYENQKLIANQFNSAIGKIQDSLSSTASALGKLQDVVNQNAQALNTLVKQLSSNFGAISSVLNDILSRLDKVEAEVQIDRLITGRLQSLQTYVTQQLIRAAEIRASANLAATKMSECVLGQSKRVDFCGKGYHLMSFPQSAPHGVVFLHVTYVPAQEKNFTCAPAICHDGKAHFPREGVFVSNGTHWFVTQRNFYEPQIITTDNTFVSGNCDVVIGIVNNTVYDPLQPELDSGGGGSDIDPYKEFGSSYQLLNFLPLDFFPDLNALVDTATALYEEELTGREHCSPHHTAIRQALVCWDELTKLIAWMSSNITSEQVRTIIVNHVNDTWGLKVRQSLWFHLSCLTFGQHTVQEFLVSFGVWIRTPAPYRPPNAPILSTLPEHTVIC

SEQ ID NO: 11011 - protein, 1301 aa, Artificial Sequence
  SARS-CoV-2/Hong Kong/case85_VM20002868/2020__EPI_ISL_414519 spike protein (1-1147)(I712C_T1077C) WhcAg construct
MFVFLVLVPLVSSQCVNLTTRTQLPPAYTNSFTRGVYYPDKVFRSSVLHSTQDLFLPFFSNVTWFHAIHVSGTNGTKRFDNPVLPFNDGVYFASTEKSNIIRGWIFGTTLDSKTQSLLIVNNATNVVIKVCEFQFCNDPFLGVYYHKNNKSWMESEFRVYSSANNCTFEYVSQPFLMDLEGKQGNFKNLREFVFKNIDGYFKIYSKHTPINLVRDLPQGFSALEPLVDLPIGINITRFQTLLALHRSYLTPGDSSSGWTAGAAAYYVGYLQPRTFLLKYNENGTITDAVDCALDPLSETKCTLKSFTVEKGIYQTSNFRVQPTESIVRFPNITNLCPFGEVFNATRFASVYAWNRKRISNCVADYSVLYNSASFSTFKCYGVSPTKLNDLCFTNVYADSFVIRGDEVRQIAPGQTGKIADYNYKLPDDFTGCVIAWNSNNLDSKVGGNYNYLYRLFRKSNLKPFERDISTEIYQAGSTPCNGVEGFNCYFPLQSYGFQPTNGVGYQPYRVVVLSFELLHAPATVCGPKKSTNLVKNKCVNFNFNGLTGTGVLTESNKKFLPFQQFGRDIADTTDAVRDPQTLEILDITPCSFGGVSVITPGTNTSNQVAVLYQDVNCTEVPVAIHADQLTPTWRVYSTGSNVFQTRAGCLIGAEHVNNSYECDIPIGAGICASYQTQTNSPRRARSVASQSIIAYTMSLGAENSVAYSNNSCAIPTNFTISVTTEILPVSMTKTSVDCTMYICGDSTECSNLLLQYGSFCTQLNRALTGIAVEQDKNTQEVFAQVKQIYKTPPIKDFGGFNFSQILPDPSKPSKRSFIEDLLFNKVTLADAGFIKQYGDCLGDIAARDLICAQKFNGLTVLPPLLTDEMIAQYTSALLAGTITSGWTFGAGAALQIPFAMQMAYRFNGIGVTQNVLYENQKLIANQFNSAIGKIQDSLSSTASALGKLQDVVNQNAQALNTLVKQLSSNFGAISSVLNDILSRLDKVEAEVQIDRLITGRLQSLQTYVTQQLIRAAEIRASANLAATKMSECVLGQSKRVDFCGKGYHLMSFPQSAPHGVVFLHVTYVPAQEKNFTCAPAICHDGKAHFPREGVFVSNGTHWFVTQRNFYEPQIITTDNTFVSGNCDVVIGIVNNTVYDPLQPELDSGGGGSDIDPYKEFGSSYQLLNFLPLDFFPDLNALVDTATALYEEELTGREHCSPHHTAIRQALVCWDELTKLIAWMSSNITSEQVRTIIVNHVNDTWGLKVRQSLWFHLSCLTFGQHTVQEFLVSFGVWIRTPAPYRPPNAPILSTLPEHTVIC

SEQ ID NO: 11012 - protein, 1301 aa, Artificial Sequence; identical to SEQ ID NO: 11002
  SARS-CoV-2/England/200990660/2020__EPI_ISL_414523 spike protein (1-1147)(I712C_T1077C) WhcAg construct

SEQ ID NO: 11013 - protein, 1301 aa, Artificial Sequence
  SARS-CoV-2/Australia/NSW09/2020__EPI_ISL_413595 spike protein (1-1147)(I712C_T1077C) WhcAg construct
MFVFLVLLPLVSSQCVNLTTRTQLPPAYTNSFTRGVYYPDKVFRSSVLHSTQDLFLPFFSNVTWFHAIHVSGTNGTKRFDNPVLPFNDGVYFASTEKSNIIRGWIFGTTLDSKTQSLLIVNNATNVVIKVCEFQFCNDPFLGVYYHKNNKSWMESEFRVYSSANNCTFEYVSQPFLMDLEGKQGNFKNLREFVFKNIDGYFKIYSKHTPINLVRDLPQGFSALEPLVDLPIGINITRFQTLLALHRSYLTPGDSSSGWTAGAAAYYVGYLQPRTFLLKYNENGTITDAVDCALDPLSETKCTLKSFTVEKGIYQTSNFRVQPTESIVRFPNITNLCPFGEVFNATRFASVYAWNRKRISNCVADYSVLYNSASFSTFKCYGVSPTKLNDLCFTNVYADSFVIRGDEVRQIAPGQTGKIADYNYKLPDDFTGCVIAWNSNNLDSKVGGNYNYLYRLFRKSNLKPFERDISTEIYQAGSTPCNGVEGFNCYFPLQSYGFQPTNGVGYQPYRVVVLSFELLHAPATVCGPKKSTNLVKNKCVNFNFNGLTGTGVLTESNKKFLPFQQFGRDIADTTDAVRDPQTLEILDITPCSFGGVSVITPGTNTSNQVAVLYQDVNCTEVPVAIHADQLTPTWRVYSTGSNVFQTRAGCLIGAEHVNNSYECDIPIGAGICASYQTQTNSPRRARSVASQSIIAYTMSLGAENSVAYSNNSCAIPTNFTISVTTEILPVSMTKTSVDCTMYICGDSTECSNLLLQYGSFCTQLNRALTGIAVEQDKNTQEVFAQVKQIYKTPPIKDFGGFNFSQILPDPSKPSKRSFIEDLLFNKVTLADAGFIKQYGDCLGDIAARDLICAQKFNGLTVLPPLLTDEMIAQYTSALLAGTITSGWTFGAGAALQIPFAMQMAYRFNGIGVTQNVLYENQKLIANQFNSAIGKIQDSLSFTASALGKLQDVVNQNAQALNTLVKQLSSNFGAISSVLNDILSRLDKVEAEVQIDRLITGRLQSLQTYVTQQLIRAAEIRASANLAATKMSECVLGQSKRVDFCGKGYHLMSFPQSAPHGVVFLHVTYVPAQEKNFTCAPAICHDGKAHFPREGVFVSNGTHWFVTQRNFYEPQIITTDNTFVSGNCDVVIGIVNNTVYDPLQPELDSGGGGSDIDPYKEFGSSYQLLNFLPLDFFPDLNALVDTATALYEEELTGREHCSPHHTAIRQALVCWDELTKLIAWMSSNITSEQVRTIIVNHVNDTWGLKVRQSLWFHLSCLTFGQHTVQEFLVSFGVWIRTPAPYRPPNAPILSTLPEHTVIC

SEQ ID NO: 11014 - protein, 1301 aa, Artificial Sequence; identical to SEQ ID NO: 10994
  SARS-CoV-2/Australia/NSW10/2020__EPI_ISL_413596 spike protein (1-1147)(I712C_T1077C) WhcAg construct

SEQ ID NO: 11015 - protein, 1301 aa, Artificial Sequence
  SARS-CoV-2/Switzerland/1000477797/2020__EPI_ISL_413023 spike protein (1-1147)(I712C_T1077C) WhcAg construct
MFVFLVLLPLVSSQCVNLTTRTQLPPAYTNSFTRGVYYPDKVFRSSVLHSTQDLFLPFFSNVTWFHAIHVSGTNGTKRFDNPVLPFNDGVYFASTEKSNIIRGWIFGTTLDSKTQSLLIVNNATNVVIKVCEFQFCNDPFLGVYYHKNNKSWMESEFRVYSSANNCTFEYVSQPFLMDLEGKQGNFKNLREFVFKNIDGYFNIYSKHTPINLVRDLPQGFSALEPLVDLPIGINITRFQTLLALHRSYLTPGDSSSGWTAGAAAYYVGYLQPRTFLLKYNENGTITDAVDCALDPLSETKCTLKSFTVEKGIYQTSNFRVQPTESIVRFPNITNLCPFGEVFNATRFASVYAWNRKRISNCVADYSVLYNSASFSTFKCYGVSPTKLNDLCFTNVYADSFVIRGDEVRQIAPGQTGKIADYNYKLPDDFTGCVIAWNSNNLDSKVGGNYNYLYRLFRKSNLKPFERDISTEIYQAGSTPCNGVEGFNCYFPLQSYGFQPTNGVGYQPYRVVVLSFELLHAPATVCGPKKSTNLVKNKCVNFNFNGLTGTGVLTESNKKFLPFQQFGRDIADTTDAVRDPQTLEILDITPCSFGGVSVITPGTNTSNQVAVLYQGVNCTEVPVAIHADQLTPTWRVYSTGSNVFQTRAGCLIGAEHVNNSYECDIPIGAGICASYQTQTNSPRRARSVASQSIIAYTMSLGAENSVAYSNNSCAIPTNFTISVTTEILPVSMTKTSVDCTMYICGDSTECSNLLLQYGSFCTQLNRALTGIAVEQDKNTQEVFAQVKQIYKTPPIKDFGGFNFSQILPDPSKPSKRSFIEDLLFNKVTLADAGFIKQYGDCLGDIAARDLICAQKFNGLTVLPPLLTDEMIAQYTSALLAGTITSGWTFGAGAALQIPFAMQMAYRFNGIGVTQNVLYENQKLIANQFNSAIGKIQDSLSSTASALGKLQDVVNQNAQALNTLVKQLSSNFGAISSVLNDILSRLDKVEAEVQIDRLITGRLQSLQTYVTQQLIRAAEIRASANLAATKMSECVLGQSKRVDFCGKGYHLMSFPQSAPHGVVFLHVTYVPAQEKNFTCAPAICHDGKAHFPREGVFVSNGTHWFVTQRNFYEPQIITTDNTFVSGNCDVVIGIVNNTVYDPLQPELDSGGGGSDIDPYKEFGSSYQLLNFLPLDFFPDLNALVDTATALYEEELTGREHCSPHHTAIRQALVCWDELTKLIAWMSSNITSEQVRTIIVNHVNDTWGLKVRQSLWFHLSCLTFGQHTVQEFLVSFGVWIRTPAPYRPPNAPILSTLPEHTVIC

SEQ ID NO: 11016 - protein, 1301 aa, Artificial Sequence
  SARS-CoV-2/Belgium/BA-02291/2020__EPI_ISL_415159 spike protein (1-1147)(I712C_T1077C) WhcAg construct
MFVFLVLLPLVSSQCVNLTTRTQLPPAYTNSFTRGVYYPDKVFRSSVLHSTQDLFLPFFSNVTWFHAIHVSGTNGTKRFDNPVLPFNDGVYFASTEKSNIIRGWIFGTTLDSKTQSLLIVNNATNVVIKVCEFQFCNDPFLGVYYHKNNKSWMESEFRVYSSANNCTFEYVSQPFLMDLEGKQGNFKNLREFVFKNIDGYFKIYSKHTPINLVRDLPQGFSALEPLVDLPIGINITRFQTLLALHRSYLTPGDSSSGWTAGAAAYYVGYLQPRTFLLKYNENGTITDAVDCALDPLSETKCTLKSFTVEKGIYQTSNFRVQPTESIVRFPNITNLCPFGEVFNATRFASVYAWNRKRISNCVADYSVLYNSASFSTFKCYGVSPTKLNDLCFTNVYADSFVIRGDEVRQIAPGQTGKIADYNYKLPDDFTGCVIAWNSNNLDSKVGGNYNYLYRLFRRSNLKPFERDISTEIYQAGSTPCNGVEGFNCYFPLQSYGFQPTNGVGYQPYRVVVLSFELLPAPATVCGPKKSTNLVKNKCVNFNFNGLTGTGVLTESNKKFLPFQQFGRDIADTTDAVRDPQTLEILDITPCSFGGVSVITPGTNTSNQVAVLYQGVNCTEVPVAIHADQLTPTWRVYSTGSNVFQTRAGCLIGAEHVNNSYECDIPIGAGICASYQTQTNSPRRARSVASQSIIAYTMSLGAENSVAYSNNSCAIPTNFTISVTTEILPVSMTKTSVDCTMYICGDSTECSNLLLQYGSFCTQLNRALTGIAVEQDKNTQEVFAQVKQIYKTPPIKDFGGFNFSQILPDPSKPSKRSFIEDLLFNKVTLADAGFIKQYGDCLGDIAARDLICAQKFNGLTVLPPLLTDEMIAQYTSALLAGTITSGWTFGAGAALQIPFAMQMAYRFNGIGVTQNVLYENQKLIANQFNSAIGKIQDSLSSAAPALGKLQDVVNQNAQALNTLVKQLSSNFGAISSVLNDILSRLDKVEAEVQIDRLITGRLQSLQTYVTQQLIRAAEIRASANLAATKMSECVLGQSKRVDFCGKGYHLMSFPQSAPHGVVFLHVTYVPAQEKNFTCAPAICHDGKAHFPREGVFVSNGTHWFVTQRNFYEPQIITTDNTFVSGNCDVVIGIVNNTVYDPLQPELDSGGGGSDIDPYKEFGSSYQLLNFLPLDFFPDLNALVDTATALYEEELTGREHCSPHHTAIRQALVCWDELTKLIAWMSSNITSEQVRTIIVNHVNDTWGLKVRQSLWFHLSCLTFGQHTVQEFLVSFGVWIRTPAPYRPPNAPILSTLPEHTVIC

SEQ ID NO: 11017 - protein, 1301 aa, Artificial Sequence
  SARS-CoV-2/USA/WA8-UW5/2020__EPI_ISL_413486 spike protein (1-1147)(I712C_T1077C) WhcAg construct
MFVFLVLLPLVSSQCVNLTTRTQLPPAYTNSFTRGVYYPDKVFRSSVLHSTQDLFLPFFSNVTWFHAIHVSGTNGTKRFDNPVLPFNDGVYFASTEKSNIIRGWIFGTTLDSKTQSLLIVNNATNVVIKVCEFQFCNDPFLGVYYHKNNKSWMESEFRVYSSANNCTFEYVSQPFLMDLEGKQGNFKNLREFVFKNIDGYFKIYSKHTPINLVRDLPQGFSALEPLVDLPIGINITRFQTLLALHRSYLTPGDSSSGWTAGAAAYYVGYLQPRTFLLKYNENGTITDAVDCALDPLSETKCTLKSFTVEKGIYQTSNFRVQPTESIVRFPNITNLCPFGEVFNATRFASVYAWNRKRISNCVADYSVLYNSASFSTFKCYGVSPTKLNDLCFTNVYADSFVIRGDEVRQIAPGQTGKIADYNYKLPDDFTGCVIAWNSNNLDSKVGGNYNYLYRLFRKSNLKPFERDISTEIYQAGSTPCNGVEGFNCYFPLQSYGFQPTNGVGYQPYRVVVLSFELLHAPATVCGPKKSTNLVKNKCVNFNFNGLTGTGVLTESNKKFLPFQQFGRDIADTTDAVRDPQTLEILDITPCSFGGVSVITPGTNTSNQVAVLYQDVNCTEVPVAIHADQLTPTWRVYSTGSNVFQTRAGCLIGAEYVNNSYECDIPIGAGICASYQTQTNSPRRARSVASQSIIAYTMSLGAENSVAYSNNSCAIPTNFTISVTTEILPVSMTKTSVDCTMYICGDSTECSNLLLQYGSFCTQLNRALTGIAVEQDKNTQEVFAQVKQIYKTPPIKDFGGFNFSQILPDPSKPSKRSFIEDLLFNKVTLADAGFIKQYGDCLGDIAARDLICAQKFNGLTVLPPLLTDEMIAQYTSALLAGTITSGWTFGAGAALQIPFAMQMAYRFNGIGVTQNVLYENQKLIANQFNSAIGKIQDSLSSTASALGKLQDVVNQNAQALNTLVKQLSSNFGAISSVLNDILSRLDKVEAEVQIDRLITGRLQSLQTYVTQQLIRAAEIRASANLAATKMSECVLGQSKRVDFCGKGYHLMSFPQSAPHGVVFLHVTYVPAQEKNFTCAPAICHDGKAHFPREGVFVSNGTHWFVTQRNFYEPQIITTDNTFVSGNCDVVIGIVNNTVYDPLQPELDSGGGGSDIDPYKEFGSSYQLLNFLPLDFFPDLNALVDTATALYEEELTGREHCSPHHTAIRQALVCWDELTKLIAWMSSNITSEQVRTIIVNHVNDTWGLKVRQSLWFHLSCLTFGQHTVQEFLVSFGVWIRTPAPYRPPNAPILSTLPEHTVIC

SEQ ID NO: 11018 - protein, 1301 aa, Artificial Sequence
  SARS-CoV-2/England/20102000506/2020__EPI_ISL_415147 spike protein (1-1147)(I712C_T1077C) WhcAg construct
MFVFLVLLPLVSSQCVNLTTRTQLPPAYTNSFTRGVYYPDKVFRSSVLHSTQDLFLPFFSNVTWFHAIHVSGTNGTKRFDNPVLPFNDGVYFASTEKSNIIRGWIFGTTLDSKTQSLLIVNNATNVVIKVCEFQFCNDPFLGVYYHKNNKSWMESEFRVYSSANNCTFEYVSQPFLMDLEGKQGNFKNLREFVFKNIDGYFKIYSKHTPINLVRDLPQGFSALEPLVDLPIGINITRFQTLLALHRSYLTPGDSSSGWTAGAAAYYVGYLQPRTFLLKYNENGTITDAVDCALDPLSETKCTLKSFTVEKGIYQTSNFRVQPTESIVRFPNITNLCPFGEVFNATRFASVYAWNRKRISNCVADYSVLYNSASFSTFKCYGVSPTKLNDLCFTNVYADSFVIRGDEVRQIAPGQTGKIADYNYKLPDDFTGCVIAWNSNNLDSKVGGNYNYLYRLFRKSNLKPFERDISTEIYQAGSTPCNGVEGFNCYFPLQSYGFQPTNGVGYQPYRVVVLSFELLHAPATVCGPKKSTNLVKNKCVNFNFNGLTGTGVLTESNKKFLPFQQFGRDIADTTDAVRDPQTLEILDITPCSFGGVSVITPGTNTSNQVAVLYQGVNCTEVPVAIHADQLTPTWRVYSTGSNVFQTRAGCLIGAEHVNNSYECDIPIGAGICASYQTQTNSPRRARSVASQSIIAYTMSLGAENSVAYSNNSCAIPTNFTISVTTEILPVSMTKTSVDCTMYICGDSTECSNLLLQYGSFCTQLNRALTGIAVEQDKNTQEVFAQVKQIYKTPPIKDFGGFNFSQILPDPSKPSKRSFIEDLLFNKVTLADAGFIKQYGYCLGDIAARDLICAQKFNGLTVLPPLLTDEMIAQYTSALLAGTITSGWTFGAGAALQIPFAMQMAYRFNGIGVTQNVLYENQKLIANQFNSAIGKIQDSLSSTASALGKLQDVVNQNAQALNTLVKQLSSNFGAISSVLNDILSRLDKVEAEVQIDRLITGRLQSLQTYVTQQLIRAAEIRASANLAATKMSECVLGQSKRVDFCGKGYHLMSFPQSAPHGVVFLHVTYVPAQEKNFTCAPAICHDGKAHFPREGVFVSNGTHWFVTQRNFYEPQIITTDNTFVSGNCDVVIGIVNNTVYDPLQPELDSGGGGSDIDPYKEFGSSYQLLNFLPLDFFPDLNALVDTATALYEEELTGREHCSPHHTAIRQALVCWDELTKLIAWMSSNITSEQVRTIIVNHVNDTWGLKVRQSLWFHLSCLTFGQHTVQEFLVSFGVWIRTPAPYRPPNAPILSTLPEHTVIC

SEQ ID NO: 11019 - protein, 1301 aa, Artificial Sequence
  SARS-CoV-2/Belgium/VAG-03013/2020__EPI_ISL_415155 spike protein (1-1147)(I712C_T1077C) WhcAg construct
MFVFLVLLPLVSSQCVNLTTRTQLPPAYTNSFTRGVYYPDKVFRSSVLHSTQDLFLPFFSNVTWFHAIHVSGTNGTKRFDNPVLPFNDGVYFASTEKSNIIRGWIFGTTLDSKTQSLLIVNNATNVVIKVCEFQFCNDPFLGVYYHKNNKSWMESEFRVYSSANNCTFEYVSQPFLMDLEGKQGNFKNLREFVFKNIDGYFKIYSKHTPINLVRDLPQGFSALEPLVDLPIGINITRFQTLLALHRSYLTPGDSSSGWTAGAAAYYVGYLQPRTFLLKYNENGTITDAVDCALDPLSETKCTLKSFTVEKGIYQTSNFRVQPTESIVRFPNITNLCPFGEVFNATRFASVYAWNRKRISNCVADYSVLYNSASFSTFKCYGVSPTKLNDLCFTNVYADSFVIRGDEVRQIAPGQTGKIADYNYKLPDDFTGCVIAWNSNNLDSKVGGNYNYLYRLFRKSNLKPFERDISTEIYQAGSTPCNGVEGFNCYFPLQSYGFQPTNGVGYQPYRVVVLSFELLHAPATVCGPKKSTNLVKNKCVNFNFNGLTGTGVLTESNKKFLPFQQFGRDIADTTDAVRDPQTLEILDITPCSFGGVSVITPGTNTSNQVAVLYQGVNCTEVPVAIHADQLTPTWRVYSTGSNVFQTRAGCLIGAEHVNNSYECDIPIGAGICASYQTQTNSPRRARSVASQSIIAYTMSLGAENSVAYSNNSCAIPTNFTISVTTEILPVSMTKTSVDCTMYICGDSTECSNLLLQYGSFCTQLNRALTGIAVEQDKNTQEVFAQVKQIYKTPPIKDFGGFNFSQILPDPSKPSKRSFIEDLLFNKVTLADAGFIKQYGDCLGDIAARDLICAQKFNGLTVLPPLLTDEMIAQYTSALLAGTITSGWTFGAGAALQIPFAMQMAYRFNGIGVTQNVLYENQKLIANQFNSAIGKIQDSLSSTATALGKLQDVVNQNAQALNTLVKQLSSNFGAISSVLNDILSRLDKVEAEVQIDRLITGRLQSLQTYVTQQLIRAAEIRASANLAATKMSECVLGQSKRVDFCGKGYHLMSFPQSAPHGVVFLHVTYVPAQEKNFTCAPAICHDGKAHFPREGVFVSNGTHWFVTQRNFYEPQIITTDNTFVSGNCDVVIGIVNNTVYDPLQPELDSGGGGSDIDPYKEFGSSYQLLNFLPLDFFPDLNALVDTATALYEEELTGREHCSPHHTAIRQALVCWDELTKLIAWMSSNITSEQVRTIIVNHVNDTWGLKVRQSLWFHLSCLTFGQHTVQEFLVSFGVWIRTPAPYRPPNAPILSTLPEHTVIC

SEQ ID NO: 11020 - protein, 1301 aa, Artificial Sequence
  SARS-CoV-2/Belgium/BC-03016/2020__EPI_ISL_415157 spike protein (1-1147)(I712C_T1077C) WhcAg construct
MFVFLVLLPLVSSQCVNLTTRTQLPPAYTNSFTRGVYYPDKVFRSSVLHSTQDLFLPFFSNVTWFHAIHVSGTNGTKRFDNPVLPFNDGVYFASTEKSNIIRGWIFGTTLDSKTQSLLIVNNATNVVIKVCEFQFCNDPFLGVYYHKNNKSWMESEFRVYSSANNCTFEYVSQPFLMDLEGKQGNFKNLREFVFKNIDGYFKIYSKHTPINLVRDLPQGFSALEPLVDLPIGINITRFQTLLALHRSYLTPGDSSSGWTAGAAAYYVGYLQPRTFLLKYNENGTITDAVDCALDPLSETKCTLKSFTVEKGIYQTSNFRVQPTESIVRFPNITNLCPFGEVFNATRFASVYAWNRKRISNCVADYSVLYNSASFSTFKCYGVSPTKLNDLCFTNVYADSFVIRGDEVRQIAPGQTGKIADYNYKLPDDFTGCVIAWNSNNLDSKVGGNYNYLYRLFRKSNLKPFERDISTEIYQAGSTPCNGVEGFNCYFPLQSYGFQPTNGVGYQPYRVVVLSFELLHAPATVCGPKKSTNLVKNKCVNFNFNGLTGTGVLTESNKKFLPFQQFGRDIADTTDAVRDPQTLEILDITPCSFGGVSVITPGTNTSNQVAVLYQGVNCTEVPVAIHADQLTPTWRVYSTGSNVFQTRAGCLIGAEHVNNSYECDIPIGAGICASYQTQTNSPRRARSVASQSIIAYTMSLGAENSVAYSNNSCAIPTNFTISVTTEILPVSMTKTSVDCTMYICGDSTECSNLLLQYGSFCTQLNRALTGIAVEQDKNTQEVFAQVKQIYKTPPIKDFGGFNFSQILPDPSKPSKRSFIEDLLFNKVTLADAGFIKQYGDCLGDIAARDLICAQKFNGLTVLPPLLTDEMIAQYTSALLAGTITSGWTFGAGAALQIPFAMQMAYRFNGIGVTQNVLYENQKLIANQFNSAIGKIQDSLSSTAPALGKLQDVVNQNAQALNTLVKQLSSNFGAISSVLNDILSRLDKVEAEVQIDRLITGRLQSLQTYVTQQLIRAAEIRASANLAATKMSECVLGQSKRVDFCGKGYHLMSFPQSAPHGVVFLHVTYVPAQEKNFTCAPAICHDGKAHFPREGVFVSNGTHWFVTQRNFYEPQIITTDNTFVSGNCDVVIGIVNNTVYDPLQPELDSGGGGSDIDPYKEFGSSYQLLNFLPLDFFPDLNALVDTATALYEEELTGREHCSPHHTAIRQALVCWDELTKLIAWMSSNITSEQVRTIIVNHVNDTWGLKVRQSLWFHLSCLTFGQHTVQEFLVSFGVWIRTPAPYRPPNAPILSTLPEHTVIC

SEQ ID NO: 11021 - protein, 1301 aa, Artificial Sequence
  SARS-CoV-2/Germany/BavPat3/2020__EPI_ISL_414521 spike protein (1-1147)(I712C_T1077C) WhcAg construct
MFVFLVLLPLVSSQCVNLTTRTQLPPAYTNSFTRGVYYPDKVFRSSVLHSTQDLFLPFFSNVTWFHAIHVSGTNGTKRFDNPVLPFNDGVYFASTEKSNIIRGWIFGTTLDSKTQSLLIVNNATNVVIKVCEFQFCNDPFLGVYYHKNNKSWMESEFRVYSSANNCTFEYVSQPFLMDLEGKQGNFKNLREFVFKNIDGYFKIYSKHTPINLVRDLPQGFSALEPLVDLPIGINITRFQTLLALHRSYLTPGDSSSGWTAGAAAYYVGYLQPRTFLLKYNENGTITDAVDCALDPLSETKCTLKSFTVEKGIYQTSNFRVQPTESIVRFPNITNLCPFGEVFNATRFASVYAWNRKRISNCVADYSVLYNSASFSTFKCYGVSPTKLNDLCFTNVYADSFVIRGDEVRQIAPGQTGKIADYNYKLPDDFTGCVIAWNSNNLDSKVGGNYNYLYRLFRKSNLKPFERDISTEIYQAGSTPCNGVEGFNCYFPLQSYGFQPTNGVGYQPYRVVVLSFELLHAPATVCGPKKSTNLVKNKCVNFNFNGLTGTGVLTESNKKFLPFQQFGRDIADTTDAVRDPQTLEILDITPCSFGGVSVITPGTNTSNQVAVLYQDVNCTEVPVAIHADQLTPTWRVYSTGSNVFQTRAGCLIGAEHVNNSYECDIPIGAGICASYQTQTNSPRRARSVASQSIIAYTMSLGAENSVAYSNNSCAIPTNFTISVTTEILPVSMTKTSVDCTMYICGDSTECSNLLLQYGSFCTQLNRALTGIAVEQDKNTQQVFAQVKQIYKTPPIKDFGGFNFSQILPDPSKPSKRSFIEDLLFNKVTLADAGFIKQYGDCLGDIAARDLICAQKFNGLTVLPPLLTDEMIAQYTSALLAGTITSGWTFGAGAALQIPFAMQMAYRFNGIGVTQNVLYENQKLIANQFNSAIGKIQDSLSSTASALGKLQDVVNQNAQALNTLVKQLSSNFGAISSVLNDILSRLDKVEAEVQIDRLITGRLQSLQTYVTQQLIRAAEIRASANLAATKMSECVLGQSKRVDFCGKGYHLMSFPQSAPHGVVFLHVTYVPAQEKNFTCAPAICHDGKAHFPREGVFVSNGTHWFVTQRNFYEPQIITTDNTFVSGNCDVVIGIVNNTVYDPLQPELDSGGGGSDIDPYKEFGSSYQLLNFLPLDFFPDLNALVDTATALYEEELTGREHCSPHHTAIRQALVCWDELTKLIAWMSSNITSEQVRTIIVNHVNDTWGLKVRQSLWFHLSCLTFGQHTVQEFLVSFGVWIRTPAPYRPPNAPILSTLPEHTVIC

SEQ ID NO: 11022 - protein, 1301 aa, Artificial Sequence
  SARS-CoV-2/France/HF1805/2020__EPI_ISL_414628 spike protein (1-1147)(I712C_T1077C) WhcAg construct
MFVFLVLLPLVSSQCVNLTTRTQLPPAYTNSFTRGVYYPDKVFRSSVLHSTQDLFLPFFSNVTWFHAIHVSGTNGTKRFDNPVLPFNDGVYFASTEKSNIIRGWIFGTTLDSKTQSLLIVNNATNVVIKVCEFQFCNDPFLGVYYHKNNKSWMESEFRVYSSANNCTFEYVSQPFLMDLEGKQGNFKNLREFVFKNIDGYFKIYSKHTPINLVRDLPQGFSALEPLVDLPIGINITRFQTLLALHRSYLTPGDSSSGWTAGAAAYYVGYLQPRTFLLKYNENGTITDAVDCALDPLSETKCTLKSFTVEKGIYQTSNFRVQPTESIVRFPNITNLCPFGEVFNATRFASVYAWNRKRISNCVADYSVLYNSASFSTFKCYGVSPTKLNDLCFTNVYADSFVIRGDEVRQIAPGQTGKIADYNYKLPDDFTGCVIAWNSNNLDSKVGGNYNYLYRLFRKSNLKPFERDISTEIYQAGSTPCNGVEGFNCYFPLQSYGFQPTNGVGYQPYRVVVLSFELLHAPATVCGPKKSTNLVKNKCVNFNFNGLTGTGVLTESNKKFLPFQQFGRDIADTTDAVRDPQTLEILDITPCSFGGVSVITPGTNTSNQVAVLYQGVNCTEVPVAIHADQLTPTWRVYSTGSNVFQTRAGCLIGAEHVNNSYECDIPIGAGICASYQTQTNSPRRARSVASQSIIAYTMSLGAENSVAYSNNSCAIPTNFTISVTTEILPVSMTKTSVDCTMYICGDSTECSNLLLQYGSFCTQLNRALTGIAVEQDKNTQEVFAQVKQIYKTPPIKDFGGFNFSQILPDPSKPSKRSFIEDLLFNKVTLADAGFIKQYGDCLGDIAARDLICAQKFNGLTVLPPLLTDEMIAQYTSALLAGTITSGWTFGAGAALQIPFAMQMAYRFNGIGVTQNVLYENQKLIANQFNSAIGKIQDSLSSTASALGKLQDVVNQNAQALNTLVKQLSSNFGAISSVLNDILSRLDKVEAEVQIDRLITGRLQSLQTYVTQQLIRAAEIRASANLAATKMSECVLGQSKRVDFCGKGYHLMSFPQSAPHGVVFLHVTYVPAQEKNFTCAPAICHDGKAHFPREGVFVSNGTHWFVTQRNFYEPQIITTDNTFVSGNCDVVIGVVNNTVYDPLQPELDSGGGGSDIDPYKEFGSSYQLLNFLPLDFFPDLNALVDTATALYEEELTGREHCSPHHTAIRQALVCWDELTKLIAWMSSNITSEQVRTIIVNHVNDTWGLKVRQSLWFHLSCLTFGQHTVQEFLVSFGVWIRTPAPYRPPNAPILSTLPEHTVIC

SEQ ID NO: 11023 - protein, 1301 aa, Artificial Sequence
  SARS-CoV-2/Netherlands/ZuidHolland_9/2020__EPI_ISL_414445 spike protein (1-1147)(I712C_T1077C) WhcAg construct
MFVFLVLLPLVSSQCVNLTTRTQLPPAYTNSFTRGVYYPDKVFRSSVLHSTQDLFLPFFSNVTWFHAIHVSGTNGTKRFDNPVLPFNDGVYFASTEKSNIIRGWIFGTTLDSKTQSLLIVNNATNVVIKVCEFQFCNDPFLGVYYHKNNKSWMESEFRVYSSANNCTFEYVSQPFLMDLEGKQGNFKNLREFVFKNIDGYFKIYSKHTPINLVRDLPQGFSALEPLVDLPIGINITRFQTLLALHRSYLTPGDSSSGWTAGAAAYYVGYLQPRTFLLKYNENGTITDAVDCALDPLSETKCTLKSFTVEKGIYQTSNFRVQPTESIVRFPNITNLCPFGEVFNATRFASVYAWNRKRISNCVADYSVLYNSASFSTFKCYGVSPTKLNDLCFTNVYADSFVIRGDEVRQIAPGQTGKIADYNYKLPDDFTGCVIAWNSNNLDSKVGGNYNYLYRLFRKSNLKPFERDISTEIYQAGSTPCNGVEGFNCYFPLQSYGFQPTNGVGYQPYRVVVLSFELLHAPATVCGPKKSTNLVKNKCVNFNFNGLTGTGVLTESNKKFLPFQQFGRDIADTTDAVRDPQTLEILDITPCSFGGVSVITPGTNTSNQVAVLYQGVNCTEVPVAIHADQLTPTWRVYSTGSNVFQTRAGCLIGAEHVNNSYECDIPIGAGICASYQTQTNSPRRARSVASQSIIAYTMSLGAENSVAYSNNSCAIPTNFTISVTTEILPVSMTKTSVDCTMYICGDSTECSNLLLQYGSFCTQLNRALTGIAVEQDKNTQEVFAQVKQIYKTPPIKDFGGFNFSQILPDPSKPSKRSFIEDLLFNKVTLADAGFIKQYGDCLGDIAARDLICVQKFNGLTVLPPLLTDEMIAQYTSALLAGTITSGWTFGAGAALQIPFAMQMAYRFNGIGVTQNVLYENQKLIANQFNSAIGKIQDSLSSTASALGKLQDVVNQNAQALNTLVKQLSSNFGAISSVLNDILSRLDKVEAEVQIDRLITGRLQSLQTYVTQQLIRAAEIRASANLAATKMSECVLGQSKRVDFCGKGYHLMSFPQSAPHGVVFLHVTYVPAQEKNFTCAPAICHDGKAHFPREGVFVSNGTHWFVTQRNFYEPQIITTDNTFVSGNCDVVIGIVNNTVYDPLQPELDSGGGGSDIDPYKEFGSSYQLLNFLPLDFFPDLNALVDTATALYEEELTGREHCSPHHTAIRQALVCWDELTKLIAWMSSNITSEQVRTIIVNHVNDTWGLKVRQSLWFHLSCLTFGQHTVQEFLVSFGVWIRTPAPYRPPNAPILSTLPEHTVIC

SEQ ID NO: 11024 - protein, 1301 aa, Artificial Sequence
  SARS-CoV-2/Finland/FIN03032020A/2020__EPI_ISL_413602 spike protein (1-1147)(I712C_T1077C) WhcAg construct
MFVFLVLLPLVSSQCVNLTTRTQLPPAYTNSFTRGVYYPDKVFRSSVLHSTQDLFLPFFSNVTWFHAIHVSGTNGTKRFDNPVLPFNDGVYFASTEKSNIIRGWIFGTTLDSKTQSLLIVNNATNVVIKVCEFQFCNDPFLGVYYHKNNKSWMESEFRVYSSANNCTFEYVSQPFLMDLEGKQGNFKNLREFVFKNIDGYFKIYSKHTPINLVRDLPQGFSALEPLVDLPIGINITRFQTLLALHRSYLTPGDSSSGWTAGAAAYYVGYLQPRTFLLKYNENGTITDAVDCALDPLSETKCTLKSFTVEKGIYQTSNFRVQPTESIVRFPNITNLCPFGEVFNATRFASVYAWNRKRISNCVADYSVLYNSASFSTFKCYGVSPTKLNDLCFTNVYADSFVIRGDEVRQIAPGQTGKIADYNYKLPDDFTGCVISWNSNNLDSKVGGNYNYLYRLFRKSNLKPFERDISTEIYQAGSTPCNGVEGFNCYFPLQSYGFQPTNGVGYQPYRVVVLSFELLHAPATVCGPKKSTNLVKNKCVNFNFNGLTGTGVLTESNKKFLPFQQFGRDIADTTDAVRDPQTLEILDITPCSFGGVSVITPGTNTSNQVAVLYQGVNCTEVPVAIHADQLTPTWRVYSTGSNVFQTRAGCLIGAEHVNNSYECDIPIGAGICASYQTQTNSPRRARSVASQSIIAYTMSLGAENSVAYSNNSCAIPTNFTISVTTEILPVSMTKTSVDCTMYICGDSTECSNLLLQYGSFCTQLNRALTGIAVEQDKNTQEVFAQVKQIYKTPPIKDFGGFNFSQILPDPSKPSKRSFIEDLLFNKVTLADAGFIKQYGDCLGDIAARDLICAQKFNGLTVLPPLLTDEMIAQYTSALLAGTITSGWTFGAGAALQIPFAMQMAYRFNGIGVTQNVLYENQKLIANQFNSAIGKIQDSLSSTASALGKLQDVVNQNAQALNTLVKQLSSNFGAISSVLNDILSRLDKVEAEVQIDRLITGRLQSLQTYVTQQLIRAAEIRASANLAATKMSECVLGQSKRVDFCGKGYHLMSFPQSAPHGVVFLHVTYVPAQEKNFTCAPAICHDGKAHFPREGVFVSNGTHWFVTQRNFYEPQIITTDNTFVSGNCDVVIGIVNNTVYDPLQPELDSGGGGSDIDPYKEFGSSYQLLNFLPLDFFPDLNALVDTATALYEEELTGREHCSPHHTAIRQALVCWDELTKLIAWMSSNITSEQVRTIIVNHVNDTWGLKVRQSLWFHLSCLTFGQHTVQEFLVSFGVWIRTPAPYRPPNAPILSTLPEHTVIC

SEQ ID NO: 11025 - protein, 1301 aa, Artificial Sequence
  SARS-CoV-2/France/GE1977/2020__EPI_ISL_414632 spike protein (1-1147)(I712C_T1077C) WhcAg construct
MFVFLVLLPLVSSQCVNLTTRTQLPPAYTNSFTRGVYYPDKVFRSSVLHSTQDLFLPFFSNVTWFHAIHVSGTNGTKRFDNPVLPFNDGVYFASTEKSNIIRGWIFGTTLDSKTQSLLIVNNATNVVIKVCEFQFCNDPFLGVYYHKNNKSWMESEFRVYSSANNCTFEYVSQPFLMDLEGKQGNFKNLREFVFKNIDGYFKIYSKHTPINLVRDLPQGFSALEPLVDLPIGINITRFQTLLALHRSYLTPGDSSSGWTAGAAAYYVGYLQPRTFLLKYNENGTITDAVDCALDPLSETKCTLKSFTVEKGIYQTSNFRVQPTESIVRFPNITNLCPFGEVFNATRFASVYAWNRKRISNCVADYSVLYNSASFSTFKCYGVSPTKLNDLCFTNVYADSFVIRGDEVRQIAPGQTGKIADYNYKLPDDFTGCVIAWNSNNLDSKVGGNYNYLYRLFRKSNLKPFERDISTEIYQAGSTPCNGVEGFNCYFPLQSYGFQPTNGVGYQPYRVVVLSFELLHAPATVCGPKKSTNLVKNKCVNFNFNGLTGTGVLTESNKKFLPFQQFGRDIADTTDAVRDPQTLEILDITPCSFGGVSVITPGTNTSNQVAVLYQGVNCTEVPVAIHADQLTPTWRVYSTGSNVFQTRAGCLIGAEHVNNSYECDIPIGAGICASYQTQTNSPRRARSVASQSIIAYTMSLGAENSVAYSNNSCAIPTNFTISVTTEILPVSMTKTSVDCTMYICGDSTECSNLLLQYGSFCTQLNRALTGIAVEQDKNTQEVFAQVKQIYKTPPIKDFGGFNFSQILPDPSKPSKRSFIEDLLFNKVTLADAGFIKQYGDCLGDIAARDLICAQKFNGLTVLPPLLTDEMIAQYTSALLAGTITSGWTFGAGAALQIPFAMQMAYRFNGIGVTQNVLYENQKLIANQFNSAIGKIQDSLFSTASALGKLQDVVNQNAQALNTLVKQLSSNFGAISSVLNDILSRLDKVEAEVQIDRLITGRLQSLQTYVTQQLIRAAEIRASANLAATKMSECVLGQSKRVDFCGKGYHLMSFPQSAPHGVVFLHVTYVPAQEKNFTCAPAICHDGKAHFPREGVFVSNGTHWFVTQRNFYEPQIITTDNTFVSGNCDVVIGIVNNTVYDPLQPELDSGGGGSDIDPYKEFGSSYQLLNFLPLDFFPDLNALVDTATALYEEELTGREHCSPHHTAIRQALVCWDELTKLIAWMSSNITSEQVRTIIVNHVNDTWGLKVRQSLWFHLSCLTFGQHTVQEFLVSFGVWIRTPAPYRPPNAPILSTLPEHTVIC

SEQ ID NO: 11026 - protein, 1301 aa, Artificial Sequence
  SARS-CoV-2/Finland/FIN-313/2020__EPI_ISL_414641 spike protein (1-1147)(I712C_T1077C) WhcAg construct
MFVFLVLLPLVSSQCVNLTTRTQLPPAYTNSFTRGVYYPDKVFRSSVLHSTQDLFLPFFSNVTWFHAIHVSGTNGTKRFDNPVLPFNDGVYFASTEKSNIIRGWIFGTTLDSKTQSLLIVNNATNVVIKVCEFQFCNDPFLGVYYHKNNKSWMESEFRVYSSANNCTFEYVSQPFLMDLEGKQGNFKNLREFVFKNIDGYFKIYSKHTPINLVRDLPQGFSALEPLVDLPIGINITRFKTLLALHRSYLTPGDSSSGWTAGAAAYYVGYLQPRTFLLKYNENGTITDAVDCALDPLSETKCTLKSFTVEKGIYQTSNFRVQPTESIVRFPNITNLCPFGEVFNATRFASVYAWNRKRISNCVADYSVLYNSASFSTFKCYGVSPTKLNDLCFTNVYADSFVIRGDEVRQIAPGQTGKIADYNYKLPDDFTGCVIAWNSNNLDSKVGGNYNYLYRLFRKSNLKPFERDISTEIYQAGSTPCNGVEGFNCYFPLQSYGFQPTNGVGYQPYRVVVLSFELLHAPATVCGPKKSTNLVKNKCVNFNFNGLTGTGVLTESNKKFLPFQQFGRDIADTTDAVRDPQTLEILDITPCSFGGVSVITPGTNTSNQVAVLYQGVNCTEVPVAIHADQLTPTWRVYSTGSNVFQTRAGCLIGAEHVNNSYECDIPIGAGICASYQTQTNSPRRARSVASQSIIAYTMSLGAENSVAYSNNSCAIPTNFTISVTTEILPVSMTKTSVDCTMYICGDSTECSNLLLQYGSFCTQLNRALTGIAVEQDKNTQEVFAQVKQIYKTPPIKDFGGFNFSQILPDPSKPSKRSFIEDLLFNKVTLADAGFIKQYGDCLGDIAARDLICAQKFNGLTVLPPLLTDEMIAQYTSALLAGTITSGWTFGAGAALQIPFAMQMAYRFNGIGVTQNVLYENQKLIANQFNSAIGKIQDSLSSTASALGKLQDVVNQNAQALNTLVKQLSSNFGAISSVLNDILSRLDKVEAEVQIDRLITGRLQSLQTYVTQQLIRAAEIRASANLAATKMSECVLGQSKRVDFCGKGYHLMSFPQSAPHGVVFLHVTYVPAQEKNFTCAPAICHDGKAHFPREGVFVSNGTHWFVTQRNFYEPQIITTDNTFVSGNCDVVIGIVNNTVYDPLQPELDSGGGGSDIDPYKEFGSSYQLLNFLPLDFFPDLNALVDTATALYEEELTGREHCSPHHTAIRQALVCWDELTKLIAWMSSNITSEQVRTIIVNHVNDTWGLKVRQSLWFHLSCLTFGQHTVQEFLVSFGVWIRTPAPYRPPNAPILSTLPEHTVIC

SEQ ID NO: 11027 - protein, 1301 aa, Artificial Sequence
  SARS-CoV-2/Netherlands/ZuidHolland_2/2020__EPI_ISL_414556 spike protein (1-1147)(I712C_T1077C) WhcAg construct
MFVFLVLLPLVSSQCVNLTTRTQLPPAYTNSFTRGVYYPDKVFRSSVLHSTQDLFLPFFSNVTWFHAIHVSGTNGTKRFDNPVLPFNDGVYFASTEKSNIIRGWIFGTTLDSKTQSLLIVNNATNVVIKVCEFQFCNDPFLGVYYHKNNKSWMESEFRVYSSANNCTFEYVSQPFLMDLEGKQGNFKNLREFVFKNIDGYFKIYSKHTPINLVRDLPQGFSALEPLVDLPIGINITRFQTLLALHRSYLTPGDSSSGWTAGAAAYYVGYLQPRTFLLKYNENGTITDAVDCALDPLSETKCTLKSFTVEKGIYQTSNFRVQPTESIVRFPNITNLCPFGEVFNATRFASVYAWNRKRISNCVADYSVLYNSASFSTFKCYGVSPTKLNDLCFTNVYADSFVIRGDEVRQIAPGQTGKIADYNYKLPDDFTGCVIAWNSNNLDSKVGGNYNYLYRLFRKSNLKPFERDISTEIYQAGSTPCNGVEGFNCYFPLQSYGFQPTNGVGYQPYRVVVLSFELLHAPATVCGPKKSTNLVKNKCVNFNFNGLTGTGVLTESNKKFLPFQQFGRDIADTTDAVRDPQTLEILDITPCSFGGVSVITPGTNTSNQVAVLYQGVNCTEVPVAIHADQLTPTWRVYSTGSNVFQTRAGCLIGAEHVNNSYECDIPIGAGICASYQTQTNSPRRARSVASQSIIAYTMSLGAENSVAYSNNSCAIPTNFTISVTTEILPVSMTKTSVDCTMYICGDSTECSNLLLQYGSFCTQLNRALTGIALEQDKNTQEVFAQVKQIYKTPPIKDFGGFNFSQILPDPSKPSKRSFIEDLLFNKVTLADAGFIKQYGDCLGDIAARDLICAQKFNGLTVLPPLLTDEMIAQYTSALLAGTITSGWTFGAGAALQIPFAMQMAYRFNGIGVTQNVLYENQKLIANQFNSAIGKIQDSLSSTASALGKLQDVVNQNAQALNTLVKQLSSNFGAISSVLNDILSRLDKVEAEVQIDRLITGRLQSLQTYVTQQLIRAAEIRASANLAATKMSECVLGQSKRVDFCGKGYHLMSFPQSAPHGVVFLHVTYVPAQEKNFTCAPAICHDGKAHFPREGVFVSNGTHWFVTQRNFYEPQIITTDNTFVSGNCDVVIGIVNNTVYDPLQPELDSGGGGSDIDPYKEFGSSYQLLNFLPLDFFPDLNALVDTATALYEEELTGREHCSPHHTAIRQALVCWDELTKLIAWMSSNITSEQVRTIIVNHVNDTWGLKVRQSLWFHLSCLTFGQHTVQEFLVSFGVWIRTPAPYRPPNAPILSTLPEHTVIC

SEQ ID NO: 11028 - protein, 1301 aa, Artificial Sequence
  SARS-CoV-2/USA/WA-UW31/2020__EPI_ISL_414618 spike protein (1-1147)(I712C_T1077C) WhcAg construct
MFVFLVLLPLVSSQCVNLTTRTQLPPAYTNSFTRGVYYPDKVFRSSVLHSTQDLFLPFFSNVTWFHAIHVSGTNGTKRFDNPVLPFNDGVYFASTEKSNIIRGWIFGTTLDSKTQSLLIVNNATNVVIKVCEFQFCNDPFLGVYYHKNNKSWMESEFRVYSSANNCTFEYVSQPFLMDLEGKQGNFKNLREFVFKNIDGYFKIYSKHTPINLVRDLPQGFSALEPLVDLPIGINITRFQTLLALHRSYLTPGDSSSGWTAGAAAYYVGYLQPRTFLLKYNENGTITDAVDCALDPLSETKCTLKSFTVEKGIYQTSNFRVQPTESIVRFPNITNLCPFGEVFNATRFASVYAWNRKRISNCVADYSVLYNSASFSTFKCYGVSPTKLNDLCFTNVYADSFVIRGDEVRQIAPGQTGKIADYNYKLPDDFTGCVIAWNSNNLDSKVGGNYNYLYRLFRKSNLKPFERDISTEIYQAGSTPCNGAEGFNCYFPLQSYGFQPTNGVGYQPYRVVVLSFELLHAPATVCGPKKSTNLVKNKCVNFNFNGLTGTGVLTESNKKFLPFQQFGRDIADTTDAVRDPQTLEILDITPCSFGGVSVITPGTNTSNQVAVLYQDVNCTEVPVAIHADQLTPTWRVYSTGSNVFQTRAGCLIGAEHVNNSYECDIPIGAGICASYQTQTNSPRRARSVASQSIIAYTMSLGAENSVAYSNNSCAIPTNFTISVTTEILPVSMTKTSVDCTMYICGDSTECSNLLLQYGSFCTQLNRALTGIAVEQDKNTQEVFAQVKQIYKTPPIKDFGGFNFSQILPDPSKPSKRSFIEDLLFNKVTLADAGFIKQYGDCLGDIAARDLICAQKFNGLTVLPPLLTDEMIAQYTSALLAGTITSGWTFGAGAALQIPFAMQMAYRFNGIGVTQNVLYENQKLIANQFNSAIGKIQDSLSSTASALGKLQDVVNQNAQALNTLVKQLSSNFGAISSVLNDILSRLDKVEAEVQIDRLITGRLQSLQTYVTQQLIRAAEIRASANLAATKMSECVLGQSKRVDFCGKGYHLMSFPQSAPHGVVFLHVTYVPAQEKNFTCAPAICHDGKAHFPREGVFVSNGTHWFVTQRNFYEPQIITTDNTFVSGNCDVVIGIVNNTVYDPLQPELDSGGGGSDIDPYKEFGSSYQLLNFLPLDFFPDLNALVDTATALYEEELTGREHCSPHHTAIRQALVCWDELTKLIAWMSSNITSEQVRTIIVNHVNDTWGLKVRQSLWFHLSCLTFGQHTVQEFLVSFGVWIRTPAPYRPPNAPILSTLPEHTVIC

SEQ ID NO: 11029 - protein, 1301 aa, Artificial Sequence
  SARS-CoV-2/South Korea/SNU01/2020__EPI_ISL_411929 spike protein (1-1147)(I712C_T1077C) WhcAg construct
MFVFLVLLPLVSSQCVNLTTRTQLPPAYTNSFTRGVYYPDKVFRSSVLHSTQDLFLPFFSNVTWFHAIHVSGTNGTKRFDNPVLPFNDGVYFASTEKSNIIRGWIFGTTLDSKTQSLLIVNNATNVVIKVCEFQFCNDPFLGVYYHKNNKSWMESEFRVYSSANNCTFEYVSQPFLMDLEGKQGNFKNLREFVFKNIDGYFKIYSKHTPINLVRDLPQGFWALEPLVDLPIGINITRFQTLLALHRSYLTPGDSSSGWTAGAAAYYVGYLQPRTFLLKYNENGTITDAVDCALDPLSETKCTLKSFTVEKGIYQTSNFRVQPTESIVRFPNITNLCPFGEVFNATRFASVYAWNRKRISNCVADYSVLYNSASFSTFKCYGVSPTKLNDLCFTNVYADSFVIRGDEVRQIAPGQTGKIADYNYKLPDDFTGCVIAWNSNNLDSKVGGNYNYLYRLFRKSNLKPFERDISTEIYQAGSTPCNGVEGFNCYFPLQSYGFQPTNGVGYQPYRVVVLSFELLHAPATVCGPKKSTNLVKNKCVNFNFNGLTGTGVLTESNKKFLPFQQFGRDIADTTDAVRDPQTLEILDITPCSFGGVSVITPGTNTSNQVAVLYQDVNCTEVPVAIHADQLTPTWRVYSTGSNVFQTRAGCLIGAEHVNNSYECDIPIGAGICASYQTQTNSPRRARSVASQSIIAYTMSLGAENSVAYSNNSCAIPTNFTISVTTEILPVSMTKTSVDCTMYICGDSTECSNLLLQYGSFCTQLNRALTGIAVEQDKNTQEVFAQVKQIYKTPPIKDFGGFNFSQILPDPSKPSKRSFIEDLLFNKVTLADAGFIKQYGDCLGDIAARDLICAQKFNGLTVLPPLLTDEMIAQYTSALLAGTITSGWTFGAGAALQIPFAMQMAYRFNGIGVTQNVLYENQKLIANQFNSAIGKIQDSLSSTASALGKLQDVVNQNAQALNTLVKQLSSNFGAISSVLNDILSRLDKVEAEVQIDRLITGRLQSLQTYVTQQLIRAAEIRASANLAATKMSECVLGQSKRVDFCGKGYHLMSFPQSAPHGVVFLHVTYVPAQEKNFTCAPAICHDGKAHFPREGVFVSNGTHWFVTQRNFYEPQIITTDNTFVSGNCDVVIGIVNNTVYDPLQPELDSGGGGSDIDPYKEFGSSYQLLNFLPLDFFPDLNALVDTATALYEEELTGREHCSPHHTAIRQALVCWDELTKLIAWMSSNITSEQVRTIIVNHVNDTWGLKVRQSLWFHLSCLTFGQHTVQEFLVSFGVWIRTPAPYRPPNAPILSTLPEHTVIC

SEQ ID NO: 11030 - protein, 1301 aa, Artificial Sequence
  SARS-CoV-2/China/WF0004/2020__EPI_ISL_413694 spike protein (1-1147)(I712C_T1077C) WhcAg construct
MFVFLVLLPLVSSQCVNLTTRTQLPPAYTNSFTRGVYYPDKVFRSSVLHSTQDLFLPFFSNVTWFHAIHVSGTNGTKRFDNPVLPFNDGVYFASTEKSNIIRGWIFGTTLDSKTQSLLIVNNATNVVIKVCEFQFCNDPFLGVYYHKNNKSWTESEFRVYSSANNCTFEYVSQPFLMDLEGKQGNFKNLREFVFKNIDGYFKIYSKHTPINLVRDLPQGFSALEPLVDLPIGINITRFQTLLALHRSYLTPGDSSSGWTAGAAAYYVGYLQPRTFLLKYNENGTITDAVDCALDPLSETKCTLKSFTVEKGIYQTSNFRVQPTESIVRFPNITNLCPFGEVFNATRFASVYAWNRKRISNCVADYSVLYNSASFSTFKCYGVSPTKLNDLCFTNVYADSFVIRGDEVRQIAPGQTGKIADYNYKLPDDFTGCVIAWNSNNLDSKVGGNYNYLYRLFRKSNLKPFERDISTEIYQAGSTPCNGVEGFNCYFPLQSYGFQPTNGVGYQPYRVVVLSFELLHAPATVCGPKKSTNLVKNKCVNFNFNGLTGTGVLTESNKKFLPFQQFGRDIADTTDAVRDPQTLEILDITPCSFGGVSVITPGTNTSNQVAVLYQDVNCTEVPVAIHADQLTPTWRVYSTGSNVFQTRAGCLIGAEHVNNSYECDIPIGAGICASYQTQTNSPRRARSVASQSIIAYTMSLGAENSVAYSNNSCAIPTNFTISVTTEILPVSMTKTSVDCTMYICGDSTECSNLLLQYGSFCTQLNRALTGIAVEQDKNTQEVFAQVKQIYKTPPIKDFGGFNFSQILPDPSKPSKRSFIEDLLFNKVTLADAGFIKQYGDCLGDIAARDLICAQKFNGLTVLPPLLTDEMIAQYTSALLAGTITSGWTFGAGAALQIPFAMQMAYRFNGIGVTQNVLYENQKLIANQFNSAIGKIQDSLSSTASALGKLQDVVNQNAQALNTLVKQLSSNFGAISSVLNDILSRLDKVEAEVQIDRLITGRLQSLQTYVTQQLIRAAEIRASANLAATKMSECVLGQSKRFDFCGKGYHLMSFPQSAPHGVVFLHVTYVPAQEKNFTCAPAICHDGKAHFPREGVFVSNGTHWFVTQRNFYEPQIITTDNTFVSGNCDVVIGIVNNTVYDPLQPELDSGGGGSDIDPYKEFGSSYQLLNFLPLDFFPDLNALVDTATALYEEELTGREHCSPHHTAIRQALVCWDELTKLIAWMSSNITSEQVRTIIVNHVNDTWGLKVRQSLWFHLSCLTFGQHTVQEFLVSFGVWIRTPAPYRPPNAPILSTLPEHTVIC

SEQ ID NO: 11031 - protein, 1301 aa, Artificial Sequence
  SARS-CoV-2/China/WF0028/2020__EPI_ISL_413791 spike protein (1-1147)(I712C_T1077C) WhcAg construct
MFVFLVLLPLVSSQCVNLTTRTQLPPAYTNSFTRGVYYPDKVFRSSVLHSTQDLFLPFFSNVTWFHAIHVSGTNGTKRFDNPVLPFNDGVYFASTEKSNIIRGWIFGTTLDSKTQSLLIVNNATNVVIKVCEFQFCNDPFLGVYYHKNNKSWMESEFRVYSSANNCTFEYVSQPFLMDLEGKQGNFKNLREFVFKNIDGYFKIYSKHTPINLVRDLPQGFSALEPLVDLPIGINITRFQTLLALHRSYLTPGDSSSGWTAGAAAYYVGYLQPRTFLLKYNENGTITDAVDCALDPLSETKCTLKSFTVEKGIYQTSNFRVQPTESIVRFPNITNLCPFGEVFNATRFASVYAWNRKRISNCVADYSVLYNSASFSTFKCYGVSPTKLNDLCFTNVYADSFVIRGDEVRQIAPGQTGKIADYNYKLPDDFTGCVIAWNSNNLDSKVGGNYNYLYRLFRKSNLKPFERDISTEIYQAGSTPCNGVEGFNCYFPLQSYGFQPTNGVGYQPYRVVVLSFELLHAPATVCGPKKSTNLVKNKCVNFNFNGLTGTGVLTESNKKFLPFQQFGRDIADTTDAVRDPQTLEILDITPCSFGGVSVITPGTNTSNQVAVLYQDVNCTEVPVAIHADQLTPTWRVYSTGSNVFQTRAGCLIGAEHVNNSYECDIPIGAGICASYQTQTNSPRRARSVASQSIIAYTMSLGAENSVAYSNNSCAIPTNFTISVTTEILPVSMTKTSVDCTMYICGDSTECSNLLLQYGSFCTQLNRALTGIAVEQDKNTQEVFAQVKQIYKTPPIKDFGGFNFSQILPDPSKPSKRSFIEDLLFNKVTLADAGFIKQYGDCLGDIAARDLICAQKFNGLTVLPPLLTDEMIAQYTSALLAGTITSGWTFGAGAALQIPFAMQMAYRFNGIGVTQNVLYENQKLIANQFNSAIGKIQDSLSSTASALGKLQDVVNQNAQALNTLVKQLSSNFGAISSVLNDILSRLDKVEAEVQIDRLITGRLQSLQTYVTQQLIRAAEIRASANLAATKMSECVLGQSKRVDFCGKGYHLMSFPQSAPHGVVFLHVTYVPAQEKNFTCAPAICHDGKAHFPREGVFVSNGTHWFVTQRNFYEPQIITTDNTFVSGNCDVVIGIVNNTVYDPLQPELESGGGGSDIDPYKEFGSSYQLLNFLPLDFFPDLNALVDTATALYEEELTGREHCSPHHTAIRQALVCWDELTKLIAWMSSNITSEQVRTIIVNHVNDTWGLKVRQSLWFHLSCLTFGQHTVQEFLVSFGVWIRTPAPYRPPNAPILSTLPEHTVIC

SEQ ID NO: 11032 - protein, 1301 aa, Artificial Sequence
  SARS-CoV-2/2019-nCoV/USA-CruiseA-18/2020__MT159716.1 spike protein (1-1147)(I712C_T1077C) WhcAg construct
MFVFLVLLPLVSSQCVNLTTRTQLPPAYTNSFTRGVYYPDKVFRSSVLHSTQDLFLPFFSNVTWFHAIHVSGTNGTKRFDNPVLPFNDGVYFASTEKSNIIRGWIFGTTLDSKTQSLLIVNNATNVVIKVCEFQFCNDPFLGVYYHKNNKSWMESELRVYSSANNCTFEYVSQPFLMDLEGKQGNFKNLREFVFKNIDGYFKIYSKHTPINLVRDLPQGFSALEPLVDLPIGINITRFQTLLALHRSYLTPGDSSSGWTAGAAAYYVGYLQPRTFLLKYNENGTITDAVDCALDPLSETKCTLKSFTVEKGIYQTSNFRVQPTESIVRFPNITNLCPFGEVFNATRFASVYAWNRKRISNCVADYSVLYNSASFSTFKCYGVSPTKLNDLCFTNVYADSFVIRGDEVRQIAPGQTGKIADYNYKLPDDFTGCVIAWNSNNLDSKVGGNYNYLYRLFRKSNLKPFERDISTEIYQAGSTPCNGVEGFNCYFPLQSYGFQPTNGVGYQPYRVVVLSFELLHAPATVCGPKKSTNLVKNKCVNFNFNGLTGTGVLTESNKKFLPFQQFGRDIADTTDAVRDPQTLEILDITPCSFGGVSVITPGTNTSNQVAVLYQDVNCTEVPVAIHADQLTPTWRVYSTGSNVFQTRAGCLIGAEHVNNSYECDIPIGAGICASYQTQTNSPRRARSVASQSIIAYTMSLGAENSVAYSNNSCAIPTNFTISVTTEILPVSMTKTSVDCTMYICGDSTECSNLLLQYGSFCTQLNRALTGIAVEQDKNTQEVFAQVKQIYKTPPIKDFGGFNFSQILPDPSKPSKRSFIEDLLFNKVTLADAGFIKQYGDCLGDIAARDLICAQKFNGLTVLPPLLTDEMIAQYTSALLAGTITSGWTFGAGAALQIPFAMQMAYRFNGIGVTQNVLYENQKLIANQFNSAIGKIQDSLSSTASALGKLQDVVNQNAQALNTLVKQLSSNFGAISSVLNDILSRLDKVEAEVQIDRLITGRLQSLQTYVTQQLIRAAEIRASANLAATKMSECVLGQSKRVDFCGKGYHLMSFPQSAPHGVVFLHVTYVPAQEKNFTCAPAICHDGKAHFPREGVFVSNGTHWFVTQRNFYEPQIITTDNTFVSGNCDVVIGIVNNTVYDPLQPELDSGGGGSDIDPYKEFGSSYQLLNFLPLDFFPDLNALVDTATALYEEELTGREHCSPHHTAIRQALVCWDELTKLIAWMSSNITSEQVRTIIVNHVNDTWGLKVRQSLWFHLSCLTFGQHTVQEFLVSFGVWIRTPAPYRPPNAPILSTLPEHTVIC

SEQ ID NO: 11033 - protein, 1301 aa, Artificial Sequence
  SARS-CoV-2/SARS-CoV-2/Yunnan-01/human/2020/CHN__MT049951.1 spike protein (1-1147)(I712C_T1077C) WhcAg construct
MFVFLVLLPLVSSQCVNLTTRTQLPPANTNSFTRGVYYPDKVFRSSVLHSTQDLFLPFFSNVTWFHAIHVSGTNGTKRFDNPVLPFNDGVYFASTEKSNIIRGWIFGTTLDSKTQSLLIVNNATNVVIKVCEFQFCNDPFLGVYYHKNNKSWMESEFRVYSSANNCTFEYVSQPFLMDLEGKQGNFKNLREFVFKNIDGYFKIYSKHTPINLVRDLPQGFSALEPLVDLPIGINITRFQTLLALHRSYLTPGDSSSGWTAGAAAYYVGYLQPRTFLLKYNENGTITDAVDCALDPLSETKCTLKSFTVEKGIYQTSNFRVQPTESIVRFPNITNLCPFGEVFNATRFASVYAWNRKRISNCVADYSVLYNSASFSTFKCYGVSPTKLNDLCFTNVYADSFVIRGDEVRQIAPGQTGKIADYNYKLPDDFTGCVIAWNSNNLDSKVGGNYNYLYRLFRKSNLKPFERDISTEIYQAGSTPCNGVEGFNCYFPLQSYGFQPTNGVGYQPYRVVVLSFELLHAPATVCGPKKSTNLVKNKCVNFNFNGLTGTGVLTESNKKFLPFQQFGRDIADTTDAVRDPQTLEILDITPCSFGGVSVITPGTNTSNQVAVLYQDVNCTEVPVAIHADQLTPTWRVYSTGSNVFQTRAGCLIGAEHVNNSYECDIPIGAGICASYQTQTNSPRRARSVASQSIIAYTMSLGAENSVAYSNNSCAIPTNFTISVTTEILPVSMTKTSVDCTMYICGDSTECSNLLLQYGSFCTQLNRALTGIAVEQDKNTQEVFAQVKQIYKTPPIKDFGGFNFSQILPDPSKPSKRSFIEDLLFNKVTLADAGFIKQYGDCLGDIAARDLICAQKFNGLTVLPPLLTDEMIAQYTSALLAGTITSGWTFGAGAALQIPFAMQMAYRFNGIGVTQNVLYENQKLIANQFNSAIGKIQDSLSSTASALGKLQDVVNQNAQALNTLVKQLSSNFGAISSVLNDILSRLDKVEAEVQIDRLITGRLQSLQTYVTQQLIRAAEIRASANLAATKMSECVLGQSKRVDFCGKGYHLMSFPQSAPHGVVFLHVTYVPAQEKNFTCAPAICHDGKAHFPREGVFVSNGTHWFVTQRNFYEPQIITTDNTFVSGNCDVVIGIVNNTVYDPLQPELDSGGGGSDIDPYKEFGSSYQLLNFLPLDFFPDLNALVDTATALYEEELTGREHCSPHHTAIRQALVCWDELTKLIAWMSSNITSEQVRTIIVNHVNDTWGLKVRQSLWFHLSCLTFGQHTVQEFLVSFGVWIRTPAPYRPPNAPILSTLPEHTVIC

SEQ ID NO: 11034 - protein, 1301 aa, Artificial Sequence
  SARS-CoV-2/USA/WA-UW292/2020__EPI_ISL_418077 spike protein (1-1147)(I712C_T1077C) WhcAg construct
MFVFLVLLPLVSSQCVNLTTRTQLPPAYTNSFTRGVYYPDKVFRSSVLHSTQDLFLPFFSNVTWFHAIHVSGTNGTKRFDNPVLPFNDGVYFASTEKSNIIRGWIFGTTLDSKTQSLLIVNNATNVVIKVCEFQFCNDPFLGVYYHKNNKSWMESEFRVYSSANNCTFEYVSQPFLMDLEGKQGNFKNLREFVFKNIDGYFKIYSKHTPINLVRDLPQGFSALEPLVDLPIGINITRFQTLLALHRSYLTPGDSSSGWTAGAAAYYVGYLQPRTFLLKYNENGTITDAVDCALDPLSETKCTLKSFTVEKGIYQTSNFRVQPTESIVRFPNITNLCPFGEVFNATRFASVYAWNRKRISNCVADYSVLYNSASFSTFKCYGVSPTKLNDLCFTNVYADSFVIRGDEVRQIAPGQTGKIADYNYKLPDDFTGCVIAWNSNNLDSKVGGNYNYLYRLFRKSNLKPFERDISTEIYQASSTPCNGVEGFNCYFPLQSYGFQPTNGVGYQPYRVVVLSFELLHAPATVCGPKKSTNLVKNKCVNFNFNGLTGTGVLTESNKKFLPFQQFGRDIADTTDAVRDPQTLEILDITPCSFGGVSVITPGTNTSNQVAVLYQDVNCTEVPVAIHADQLTPTWRVYSTGSNVFQTRAGCLIGAEHVNNSYECDIPIGAGICASYQTQTNSPRRARSVASQSIIAYTMSLGAENSVAYSNNSCAIPTNFTISVTTEILPVSMTKTSVDCTMYICGDSTECSNLLLQYGSFCTQLNRALTGIAVEQDKNTQEVFAQVKQIYKTPPIKDFGGFNFSQILPDPSKPSKRSFIEDLLFNKVTLADAGFIKQYGDCLGDIAARDLICAQKFNGLTVLPPLLTDEMIAQYTSALLAGTITSGWTFGAGAALQIPFAMQMAYRFNGIGVTQNVLYENQKLIANQFNSAIGKIQDSLSSTASALGKLQDVVNQNAQALNTLVKQLSSNFGAISSVLNDILSRLDKVEAEVQIDRLITGRLQSLQTYVTQQLIRAAEIRASANLAATKMSECVLGQSKRVDFCGKGYHLMSFPQSAPHGVVFLHVTYVPAQEKNFTCAPAICHDGKAHFPREGVFVSNGTHWFVTQRNFYEPQIITTDNTFVSGNCDVVIGIVNNTVYDPLQPELDSGGGGSDIDPYKEFGSSYQLLNFLPLDFFPDLNALVDTATALYEEELTGREHCSPHHTAIRQALVCWDELTKLIAWMSSNITSEQVRTIIVNHVNDTWGLKVRQSLWFHLSCLTFGQHTVQEFLVSFGVWIRTPAPYRPPNAPILSTLPEHTVIC

SEQ ID NO: 11035 - protein, 1301 aa, Artificial Sequence
  SARS-CoV-2/Iceland/192/2020__EPI_ISL_417819 spike protein (1-1147)(I712C_T1077C) WhcAg construct
MFVFFVLLPLVSSQCVNLTTRTQLPPAYTNSFTRGVYYPDKVFRSSVLHSTQDLFLPFFSNVTWFHAIHVSGTNGTKRFDNPVLPFNDGVYFASTEKSNIIRGWIFGTTLDSKTQSLLIVNNATNVVIKVCEFQFCNDPFLGVYYHKNNKSWMESEFRVYSSANNCTFEYVSQPFLMDLEGKQGNFKNLREFVFKNIDGYFKIYSKHTPINLVRDLPQGFSALEPLVDLPIGINITRFQTLLALHRSYLTPGDSSSGWTAGAAAYYVGYLQPRTFLLKYNENGTITDAVDCALDPLSETKCTLKSFTVEKGIYQTSNFRVQPTESIVRFPNITNLCPFGEVFNATRFASVYAWNRKRISNCVADYSVLYNSASFSTFKCYGVSPTKLNDLCFTNVYADSFVIRGDEVRQIAPGQTGKIADYNYKLPDDFTGCVIAWNSNNLDSKVGGNYNYLYRLFRKSNLKPFERDISTEIYQAGSTPCNGVEGFNCYFPLQSYGFQPTNGVGYQPYRVVVLSFELLHAPATVCGPKKSTNLVKNKCVNFNFNGLTGTGVLTESNKKFLPFQQFGRDIADTTDAVRDPQTLEILDITPCSFGGVSVITPGTNTSNQVAVLYQGVNCTEVPVAIHADQLTPTWRVYSTGSNVFQTRAGCLIGAEHVNNSYECDIPIGAGICASYQTQTNSPRRARSVASQSIIAYTMSLGAENSVAYSNNSCAIPTNFTISVTTEILPVSMTKTSVDCTMYICGDSTECSNLLLQYGSFCTQLNRALTGIAVEQDKNTQEVFAQVKQIYKTPPIKDFGGFNFSQILPDPSKPSKRSFIEDLLFNKVTLADAGFIKQYGDCLGDIAARDLICAQKFNGLTVLPPLLTDEMIAQYTSALLAGTITSGWTFGAGAALQIPFAMQMAYRFNGIGVTQNVLYENQKLIANQFNSAIGKIQDSLSSTASALGKLQDVVNQNAQALNTLVKQLSSNFGAISSVLNDILSRLDKVEAEVQIDRLITGRLQSLQTYVTQQLIRAAEIRASANLAATKMSECVLGQSKRVDFCGKGYHLMSFPQSAPHGVVFLHVTYVPAQEKNFTCAPAICHDGKAHFPREGVFVSNGTHWFVTQRNFYEPQIITTDNTFVSGNCDVVIGIVNNTVYDPLQPELDSGGGGSDIDPYKEFGSSYQLLNFLPLDFFPDLNALVDTATALYEEELTGREHCSPHHTAIRQALVCWDELTKLIAWMSSNITSEQVRTIIVNHVNDTWGLKVRQSLWFHLSCLTFGQHTVQEFLVSFGVWIRTPAPYRPPNAPILSTLPEHTVIC

SEQ ID NO: 11036 - protein, 1301 aa, Artificial Sequence
  SARS-CoV-2/Belgium/ULG-6939/2020__EPI_ISL_417020 spike protein (1-1147)(I712C_T1077C) WhcAg construct
MFVFLVLLPLVSSQCVNLTTRTQLPPAYTNSFTRGVYYPDKVFRSSVLHSTQDLFLPFFSNVTWFHAIHVSGTNGTKRFDNPVLPFNDGVYFASTEKSNIIRGWIFGTTLDSKTQSLLIVNNATNVVIKVCEFQFCNDPFLGVYYHKNNKSWMESEFRVYSSANNCTFEYVSQPFLMDLEGKQGNFKNLREFVFKNIDGYFKIYSKHTPINLVRDLPQGFSALEPLVDLPIGINITRFQTLLALHRSYLTPGDSSSGWTAGAAAYYVGYLQPRTFLLKYNENGTITDAVDCALDPLSETKCTLKSFTVEKGIYQTSNFRVQPTESIVRFPNITNLCPFGEVFNATRFASVYAWNRKRISNCVADYSVLYNSASFSTFKCYGVSPTKLNDLCFTNVYADSFVIRGDEVRQIAPGQTGKIADYNYKLPDDFTGCVIAWNSNNLDSKVGGNYNYLYRLFRKSNLKPFERDISTEIYQAGSTPCNGVEGFNCYFPLQSYGFQPTNGVGYQPYRVVVLSFELLHAPATVCGPKKSTNLVKNKCVNFNFNGLTGTGVLTESNKKFLPFQQFGRDIADTTDAVRDPQTLEILDITPCSFGGVSVITPGTNTSNQVAVLYQGVNCTEVPVAIHADQLTPTWRVYSTGSNVFQTRAGCLIGAEHVNNSYECDIPIGAGICASYQTQTNSPRRARSVASQSIIAYTMSLGAENSVVYSNNSCAIPTNFTISVTTEILPVSMTKTSVDCTMYICGDSTECSNLLLQYGSFCTQLNRALTGIAVEQDKNTQEVFAQVKQIYKTPPIKDFGGFNFSQILPDPSKPSKRSFIEDLLFNKVTLADAGFIKQYGDCLGDIAARDLICAQKFNGLTVLPPLLTDEMIAQYTSALLAGTITSGWTFGAGAALQIPFAMQMAYRFNGIGVTQNVLYENQKLIANQFNSAIGKIQDSLSSTASALGKLQDVVNQNAQALNTLVKQLSSNFGAISSVLNDILSRLDKVEAEVQIDRLITGRLQSLQTYVTQQLIRAAEIRASANLAATKMSECVLGQSKRVDFCGKGYHLMSFPQSAPHGVVFLHVTYVPAQEKNFTCAPAICHDGKAHFPREGVFVSNGTHWFVTQRNFYEPQIITTDNTFVSGNCDVVIGIVNNTVYDPLQPELDSGGGGSDIDPYKEFGSSYQLLNFLPLDFFPDLNALVDTATALYEEELTGREHCSPHHTAIRQALVCWDELTKLIAWMSSNITSEQVRTIIVNHVNDTWGLKVRQSLWFHLSCLTFGQHTVQEFLVSFGVWIRTPAPYRPPNAPILSTLPEHTVIC

SEQ ID NO: 11037 - protein, 1301 aa, Artificial Sequence
  SARS-CoV-2/France/HF2496/2020__EPI_ISL_418231 spike protein (1-1147)(I712C_T1077C) WhcAg construct
MFVFLVLLPLVSSQCVNLTTRTQLPPAYTNSFTRGVYYPDKVFRSSVLHSTQDLFLPFFSNVTWFHAIHVSGTNGTKRFDNPVLPFNDGVYFASTEKSNIIRGWIFGTTLDSKTQSLLIVNNATNVVIKVCEFQFCNDPFLGVYYHKNNKSWMESEFRVYSSANNCTFEYVSQPFLMDLEGKQGNFKNLREFVFKNIDGYFKIYSKHTPINLVRDLPQGFSALEPLVDLPIGINITRFQTLLALHRSYLTPGDSSSGWTAGAAAYYVGYLQPRTFLLKYNENGTITDAVDCALDPLSETKCTLKSFTVEKGIYQTSNFRVQPTESIVRFPNITNLCPFGEVFNATRFASVYAWNRKRISNCVADYSVLYNSASFSTFKCYGVSPTKLNDLCFTNVYADSFVIRGDEVRQIAPGQTGKIADYNYKLPDDFTGCVIAWNSNNLDSKVGGNYNYLYRLFRKSNLKPFERDISTEIYQAGSTPCNGVEGFNCYFPLQSYGFQPTNGVGYQPYRVVVLSFELLHAPATVCGPKKSTNLVKNKCVNFNFNGLTGTGVLTESNKKFLPFQQFGRDIADTTDAVRDPQTLEILDITPCSFGGVSVITPGTNTSNQVAVLYQGVNCTEVPVAIHADQLTPTWRVYSTGSNVFQTRAGCLIGAEHVNNSYECDIPIGAGICASYQTQTNSPRRARSVASQSIIAYTMSLGAENSVAYSNNSCAIPTNFTISVTTEILPVSMTKTSVDCTMYICGDSTECSNLLLQYGSFCTQLNRALTGIAVEQDKNTQEVFAQVKQIYKTPPIKDFGGFNFSQILPDPSKPSKRSFIEDLLFNKVTLADAGFIKQYGDCLGDIVARDLICAQKFNGLTVLPPLLTDEMIAQYTSALLAGTITSGWTFGAGAALQIPFAMQMAYRFNGIGVTQNVLYENQKLIANQFNSAIGKIQDSLSSTASALGKLQDVVNQNAQALNTLVKQLSSNFGAISSVLNDILSRLDKVEAEVQIDRLITGRLQSLQTYVTQQLIRAAEIRASANLAATKMSECVLGQSKRVDFCGKGYHLMSFPQSAPHGVVFLHVTYVPAQEKNFTCAPAICHDGKAHFPREGVFVSNGTHWFVTQRNFYEPQIITTDNTFVSGNCDVVIGIVNNTVYDPLQPELDSGGGGSDIDPYKEFGSSYQLLNFLPLDFFPDLNALVDTATALYEEELTGREHCSPHHTAIRQALVCWDELTKLIAWMSSNITSEQVRTIIVNHVNDTWGLKVRQSLWFHLSCLTFGQHTVQEFLVSFGVWIRTPAPYRPPNAPILSTLPEHTVIC

SEQ ID NO: 11038 - protein, 1301 aa, Artificial Sequence
  SARS-CoV-2/USA/WA-UW291/2020__EPI_ISL_418076 spike protein (1-1147)(I712C_T1077C) WhcAg construct
MFVFLVLLPLVSSQCVNLTTRTQLPPAYTNSFTRGVYYPDKVFRSSVLHSTQDLFLPFFSNVTWFHAIHVSGTNGTKRFDNPVLPFNDGVYFASTEKSNIIRGWIFGTTLDSKTQSLLIVNNATNVVIKVCEFQFCNDPFLGVYYHKNNKSWMESEFRVYSSANNCTFEYVSQPFLMDLEGKQGNFKNLREFVFKNIDGYFKIYSKHTPINLVRDLPQGFSALEPLVDLPIGINITRFQTLLALHRSYLTPGDSSSGWTAGAAAYYVGYLQPRTFLLKYNENGTITDAVDCALDPLSETKCTLKSFTVEKGIYQTSNFRVQPTESIVRFPNITNLCPFGEVFNATRFASVYAWNRKRISNCVADYSVLYNSASFSTFKCYGVSPTKLNDLCFTNVYADSFVIRGDEVRQIAPGQTGKIADYNYKLPDDFTGCVIAWNSNNLDSKVGGNYNYLYRLFRKSNLKPFERDISTEIYQAGSTPCNGVEGFNCYFPLQSYGFQPTNGVGYQPYRVVVLSFELLHAPATVCGPKKSTNLVKNKCVNFNFNGLTGTGVLTESNKKFLPFQQFGRDIADTTDAVRDPQTLEILDITPCSFGGVSVITPGTNTSNQVAVLYQGVNCTEVPVAIHADQLTPTWRVYSTGSNVFQTRAGCLIGAEHVNNSYECDIPIGAGICASYQTQTNSPRRARSVASQSIIAYTMSLGAENSVAYSNNSCAIPTNFTISVTTEILPVSMTKTSVDCTMYICGDSTECSNLLLQYGSFCTQLNRALTGIAVEQDKNTQEVFAQVKQIYKTPPIKDFGGFNFSQILPDPSKPSKRSFIEDLLFNKVTLADAGFIKQYGDCLGDIAARDLICAQKFNGLTVLPPLLTDEMIAQYTSALLAGTITSGWTFGAGAALQIPFAMQMAYRFNGIGVTQNVLYENQKLIANQFNSAIGKIQYSLSSTASALGKLQDVVNQNAQALNTLVKQLSSNFGAISSVLNDILSRLDKVEAEVQIDRLITGRLQSLQTYVTQQLIRAAEIRASANLAATKMSECVLGQSKRVDFCGKGYHLMSFPQSAPHGVVFLHVTYVPAQEKNFTCAPAICHDGKAHFPREGVFVSNGTHWFVTQRNFYEPQIITTDNTFVSGNCDVVIGIVNNTVYDPLQPELDSGGGGSDIDPYKEFGSSYQLLNFLPLDFFPDLNALVDTATALYEEELTGREHCSPHHTAIRQALVCWDELTKLIAWMSSNITSEQVRTIIVNHVNDTWGLKVRQSLWFHLSCLTFGQHTVQEFLVSFGVWIRTPAPYRPPNAPILSTLPEHTVIC

SEQ ID NO: 11039 - protein, 1301 aa, Artificial Sequence; identical to SEQ ID NO: 11002
  SARS-CoV-2/Portugal/PT0034/2020__EPI_ISL_418019 spike protein (1-1147)(I712C_T1077C) WhcAg construct

SEQ ID NO: 11040 - protein, 1301 aa, Artificial Sequence; identical to SEQ ID NO: 10994
  SARS-CoV-2/Iceland/202/2020__EPI_ISL_417750 spike protein (1-1147)(I712C_T1077C) WhcAg construct

SEQ ID NO: 11041 - protein, 1301 aa, Artificial Sequence
  SARS-CoV-2/USA/WA-UW261/2020__EPI_ISL_418046 spike protein (1-1147)(I712C_T1077C) WhcAg construct
MFVFLVLLPLVSSQCVNLTTRTQLPPAYTNSFTRGVYYPDKVFRSSVLHSTQDLFLPFFSNVTWFHAIHVSGTNGTKRFDNPVLPFNDGVYFASTEKSNIIRGWIFGTTLDSKTQSLLIVNNATNVVIKVCEFQFCNDPFLGVYYHKNNKSWMESEFRVYSSANNCTFEYVSQPFLMDLEGKQGNFKNLREFVFKNIDGYFKIYSKHTPINLVRDLPQGFSALEPLVDLPIGINITRFQTLLALHRSYLTPGDSSSGWTAGAAAYYVGYLQPRTFLLKYNENGTITDAVDCALDPLSETKCTLKSFTVEKGIYQTSNFRVQPTESIVRFPNITNLCPFGEVFNATRFTSVYAWNRKRISNCVADYSVLYNSASFSTFKCYGVSPTKLNDLCFTNVYADSFVIRGDEVRQIAPGQTGKIADYNYKLPDDFTGCVIAWNSNNLDSKVGGNYNYLYRLFRKSNLKPFERDISTEIYQAGSTPCNGVEGFNCYFPLQSYGFQPTNGVGYQPYRVVVLSFELLHAPATVCGPKKSTNLVKNKCVNFNFNGLTGTGVLTESNKKFLPFQQFGRDIADTTDAVRDPQTLEILDITPCSFGGVSVITPGTNTSNQVAVLYQDVNCTEVPVAIHADQLTPTWRVYSTGSNVFQTRAGCLIGAEHVNNSYECDIPIGAGICASYQTQTNSPRRARSVASQSIIAYTMSLGAENSVAYSNNSCAIPTNFTISVTTEILPVSMTKTSVDCTMYICGDSTECSNLLLQYGSFCTQLNRALTGIAVEQDKNTQEVFAQVKQIYKTPPIKDFGGFNFSQILPDPSKPSKRSFIEDLLFNKVTLADAGFIKQYGDCLGDIAARDLICAQKFNGLTVLPPLLTDEMIAQYTSALLAGTITSGWTFGAGAALQIPFAMQMAYRFNGIGVTQNVLYENQKLIANQFNSAIGKIQDSLSSTASALGKLQDVVNQNAQALNTLVKQLSSNFGAISSVLNDILSRLDKVEAEVQIDRLITGRLQSLQTYVTQQLIRAAEIRASANLAATKMSECVLGQSKRVDFCGKGYHLMSFPQSAPHGVVFLHVTYVPAQEKNFTCAPAICHDGKAHFPREGVFVSNGTHWFVTQRNFYEPQIITTDNTFVSGNCDVVIGIVNNTVYDPLQPELDSGGGGSDIDPYKEFGSSYQLLNFLPLDFFPDLNALVDTATALYEEELTGREHCSPHHTAIRQALVCWDELTKLIAWMSSNITSEQVRTIIVNHVNDTWGLKVRQSLWFHLSCLTFGQHTVQEFLVSFGVWIRTPAPYRPPNAPILSTLPEHTVIC

SEQ ID NO: 11042 - protein, 1301 aa, Artificial Sequence
  SARS-CoV-2/Portugal/PT0035/2020__EPI_ISL_418020 spike protein (1-1147)(I712C_T1077C) WhcAg construct
MFVFLVLLPLVSSQCVNLTTRTQLPPAYTNSFTRGVYYPDKVFRSSVLHSTQDLFLPFFSNVTWFHAIHVSGTNGTKRFDNPVLPFNDGVYFASTEKSNIIRGWIFGTTLDSKTQSLLIVNNATNVVIKVCEFQFCNDPFLGVYYHKNNKSWMESEFRVYSSANNCTFEYVSQPFLMDLEGKQGNFKNLREFVFKNIDGYFKIYSKHTPINLVRDLPQGFSALEPLVDLPIGINITRFQTLLALHRSYLTPGDSSSGWTAGAAAYYVGYLQPRTFLLKYNENGTITDAVDCALDPLSETKCTLKSFTVEKGIYQTSNFRVQPTESIVRFPNITNLCPFGEVFNATRFASVYAWNRKRISNCVADYSVLYNSASFSTFKCYGVSPTKLNDLCFTNVYADSFVIRGDEVRQIAPGQTGKIADYNYKLPDDFTGCVIAWNSNNLDSKVGGNYNYLYRLFRKSNLKPFERDISTEIYQAGSTPCNGVEGFNCYFPLQSYGFQPTNGVGYQPYRVVVLSFELLHAPATVCGPKKSTNLVKNKCVNFNFNGLTGTGVLTESNKKFLPFQQFGRDIADTTDAVRDPQTLEILDITPCSFGGVSVITPGTNTSNQVAVLYQDVNCTEVPVAIHADQLTPTWRVYSTGSNVFQTRAGCLIGAEHVNNSYECDIPIGAGICASYQTQTNSPRRARSVASQSIIAYTMSLGAENSVAYSNNSCAIPTNFTISVTTEILPVSMTKTSVDCTMYICGDSTECSNLLLQYGSFCTQLNRALTGIAVEQDKNTQEVFAQVKQIYKTPPIKDFGGFNFSQILPDPSKPSKRSFIEDLLFNKVTLADAGFIKQYGDCLGDISARDLICAQKFNGLTVLPPLLTDEMIAQYTSALLAGTITSGWTFGAGAALQIPFAMQMAYRFNGIGVTQNVLYENQKLIANQFNSAIGKIQDSLSSTASALGKLQDVVNQNAQALNTLVKQLSSNFGAISSVLNDILSRLDKVEAEVQIDRLITGRLQSLQTYVTQQLIRAAEIRASANLAATKMSECVLGQSKRVDFCGKGYHLMSFPQSAPHGVVFLHVTYVPAQEKNFTCAPAICHDGKAHFPREGVFVSNGTHWFVTQRNFYEPQIITTDNTFVSGNCDVVIGIVNNTVYDPLQPELDSGGGGSDIDPYKEFGSSYQLLNFLPLDFFPDLNALVDTATALYEEELTGREHCSPHHTAIRQALVCWDELTKLIAWMSSNITSEQVRTIIVNHVNDTWGLKVRQSLWFHLSCLTFGQHTVQEFLVSFGVWIRTPAPYRPPNAPILSTLPEHTVIC

SEQ ID NO: 11043 - protein, 1301 aa, Artificial Sequence
  SARS-CoV-2/USA/NY-NYUMC7/2020__EPI_ISL_418192 spike protein (1-1147)(I712C_T1077C) WhcAg construct
MFVFLVLLPLVSSQCVNLTTRTQLPPAYTNSFTRGVYYPDKVFRSSVLHSTQDLFLPFFSNVTWFHAIHVSGTNGTKRFDNPVLPFNDGVYFASTEKSNIIRGWIFGTTLDSKTQSLLIVNNATNVVIKVCEFQFCNDPFLGVYHHKNNKSWMESEFRVYSSANNCTFEYVSQPFLMDLEGKQGNFKNLREFVFKNIDGYFKIYSKHTPINLVRDLPQGFSALEPLVDLPIGINITRFQTLLALHRSYLTPGDSSSGWTAGAAAYYVGYLQPRTFLLKYNENGTITDAVDCALDPLSETKCTLKSFTVEKGIYQTSNFRVQPTESIVRFPNITNLCPFGEVFNATRFASVYAWNRKRISNCVADYSVLYNSASFSTFKCYGVSPTKLNDLCFTNVYADSFVIRGDEVRQIAPGQTGKIADYNYKLPDDFTGCVIAWNSNNLDSKVGGNYNYLYRLFRKSNLKPFERDISTEIYQAGSTPCNGVEGFNCYFPLQSYGFQPTNGVGYQPYRVVVLSFELLHAPATVCGPKKSTNLVKNKCVNFNFNGLTGTGVLTESNKKFLPFQQFGRDIADTTDAVRDPQTLEILDITPCSFGGVSVITPGTNTSNQVAVLYQGVNCTEVPVAIHADQLTPTWRVYSTGSNVFQTRAGCLIGAEHVNNSYECDIPIGAGICASYQTQTNSPRRARSVASQSIIAYTMSLGAENSVAYSNNSCAIPTNFTISVTTEILPVSMTKTSVDCTMYICGDSTECSNLLLQYGSFCTQLNRALTGIAVEQDKNTQEVFAQVKQIYKTPPIKDFGGFNFSQILPDPSKPSKRSFIEDLLFNKVTLADAGFIKQYGDCLGDIAARDLICAQKFNGLTVLPPLLTDEMIAQYTSALLAGTITSGWTFGAGAALQIPFAMQMAYRFNGIGVTQNVLYENQKLIANQFNSAIGKIQDSLSSTASALGKLQDVVNQNAQALNTLVKQLSSNFGAISSVLNDILSRLDKVEAEVQIDRLITGRLQSLQTYVTQQLIRAAEIRASANLAATKMSECVLGQSKRVDFCGKGYHLMSFPQSAPHGVVFLHVTYVPAQEKNFTCAPAICHDGKAHFPREGVFVSNGTHWFVTQRNFYEPQIITTDNTFVSGNCDVVIGIVNNTVYDPLQPELDSGGGGSDIDPYKEFGSSYQLLNFLPLDFFPDLNALVDTATALYEEELTGREHCSPHHTAIRQALVCWDELTKLIAWMSSNITSEQVRTIIVNHVNDTWGLKVRQSLWFHLSCLTFGQHTVQEFLVSFGVWIRTPAPYRPPNAPILSTLPEHTVIC

SEQ ID NO: 11044 - protein, 1301 aa, Artificial Sequence
  SARS-CoV-2/Iceland/189/2020__EPI_ISL_417709 spike protein (1-1147)(I712C_T1077C) WhcAg construct
MFVFLVLLPLVSSQCVNLTTRTQLPPAYTNSFTRGVYYPDKVFRSSVLHSTQDLFLPFFSNVTWFHAIHVSGTNGTKRFDNPVLPFNDGVYFASTEKSNIIRGWIFGTTLDSKTQSLLIVNNATNVVIKVCEFQFCNDPFLGVYYHKNNKSWMESEFRVYSSANNCTFEYVSQPFLMDLEGKQGNFKNLREFVFKNIDGYFKIYSKHTPINLVRDLPQGFSALEPLVDLPIGINITRFQTLLALHRSYLTPGDSSSGWTAGAAAYYVGYLQPRTFLLKYNENGTITDAVDCALDPLSETKCTLKSFTVEKGIYQTSNFRVQPTESIVRFPNITNLCPFGEVFNATRFASVYAWNRKRISNCVADYSVLYNSASFSTFKCYGVSPTKLNDLCFTNVYADSFVIRGDEVRQIAPGQTGKIADYNYKLPDDFTGCVIAWNSNNLDSKVGGNYNYLYRLFRKSNLKPFERDISTEIYQAGSTPCNGVEGFNCYFPLQSYGFQPTNGVGYQPYRVVVLSFELLHAPATVCGPKKSTNLVKNKCVNFNFNGLTGTGVLTESNKKFLPFQQFGRDIADTTDAVRDPQTLEILDITPCSFGGVSVITPGTNTSNQVAVLYQGVNCTEVPVAIHADQLTPTWRVYSTGSNVFQTRAGCLIGAEHVNNSYECDIPIGAGICASYQTQTNSPRRARSVASQSIIAYTMSLGAENSVAYSNNSCAIPTNFTISVTTEILPVSMTKTSVDCTMYICGDSTECSNLLLQYGSFCTQLNRALTGIAVEQDKNTQEVFAQVKQIYKTPPIKDFGGFNFSQILPDPSKPSKRSFIEDLLFNKVTLADAGFTKQYGDCLGDIAARDLICAQKFNGLTVLPPLLTDEMIAQYTSALLAGTITSGWTFGAGAALQIPFAMQMAYRFNGIGVTQNVLYENQKLIANQFNSAIGKIQDSLSSTASALGKLQDVVNQNAQALNTLVKQLSSNFGAISSVLNDILSRLDKVEAEVQIDRLITGRLQSLQTYVTQQLIRAAEIRASANLAATKMSECVLGQSKRVDFCGKGYHLMSFPQSAPHGVVFLHVTYVPAQEKNFTCAPAICHDGKAHFPREGVFVSNGTHWFVTQRNFYEPQIITTDNTFVSGNCDVVIGIVNNTVYDPLQPELDSGGGGSDIDPYKEFGSSYQLLNFLPLDFFPDLNALVDTATALYEEELTGREHCSPHHTAIRQALVCWDELTKLIAWMSSNITSEQVRTIIVNHVNDTWGLKVRQSLWFHLSCLTFGQHTVQEFLVSFGVWIRTPAPYRPPNAPILSTLPEHTVIC

SEQ ID NO: 11045 - protein, 1301 aa, Artificial Sequence
  SARS-CoV-2/Australia/NSW56/2020__EPI_ISL_417408 spike protein (1-1147)(I712C_T1077C) WhcAg construct
MFVFLVLLPLVSSQCVNLTTRTQLPPAYTNSFTRGVYYPDKVFRSSVLHSTQDLFLPFFSNVTWFHAIHVSGTNGTKRFDNPVLPFNDGVYFASTEKSNIIRGWIFGTTLDSKTQSLLIVNNATNVVIKVCEFQFCNDPFLGVYYHKNNKSWMESEFRVYSSANNCTFEYVSQPFLMDLEGKQGNFKNLREFVFKNIDGYFKIYSKHTPINLVRDLPQGFSALEPLVDLPIGINITRFQTLLALHRSYLTPGDSSSGWTAGAAAYYVGYLQPRTFLLKYNENGTITDAVDCALDPLSETKCTLKSFTVEKGIYQTSNFRVQPTESIVRFPNITNLCPFGEVFNATRFASVYAWNRKRISNCVADYSVLYNSASFSTFKCYGVSPTKLNDLCFTNVYADSFVIRGDEVRQIAPGQTGKIADYNYKLPDDFTGCVIAWNSNNLDSKVGGNYNYLYRLFRKSNLKPFERDISTEIYQAGSTPCNGVEGFNCYFPLQSYGFQPTNGVGYQPYRVVVLSFELLHAPATVCGPKKSTNLVKNKCVNFNFNGLTGTGVLTESNKKFLPFQQFGRDIADTTDAVRDPQTLEILDITPCSFGGVSVITPGTNTSNQVAVLYQDVNCTEVPVAIHADQLTPTWRVYSTGSNVFQTRAGCLIGAEHVNNSYECDIPIGAGICASYQTQTNSPRRARSVASQSIIAYTMSLGAENSVAYSNNSCAIPTNFTISVTTEILPVSMTKTSVDCTMYICGDSTECSNLLLQYGSFCTQLNRALTGIAVEQDKNTQEVFAQVKQIYKTPPIKDFGGFNFSQILPDSSKPSKRSFIEDLLFNKVTLADAGFIKQYGDCLGDIAARDLICAQKFNGLTVLPPLLTDEMIAQYTSALLAGTITSGWTFGAGAALQIPFAMQMAYRFNGIGVTQNVLYENQKLIANQFNSAIGKIQDSLSSTASALGKLQDVVNQNAQALNTLVKQLSSNFGAISSVLNDILSRLDKVEAEVQIDRLITGRLQSLQTYVTQQLIRAAEIRASANLAATKMSECVLGQSKRVDFCGKGYHLMSFPQSAPHGVVFLHVTYVPAQEKNFTCAPAICHDGKAHFPREGVFVSNGTHWFVTQRNFYEPQIITTDNTFVSGNCDVVIGIVNNTVYDPLQPELDSGGGGSDIDPYKEFGSSYQLLNFLPLDFFPDLNALVDTATALYEEELTGREHCSPHHTAIRQALVCWDELTKLIAWMSSNITSEQVRTIIVNHVNDTWGLKVRQSLWFHLSCLTFGQHTVQEFLVSFGVWIRTPAPYRPPNAPILSTLPEHTVIC

SEQ ID NO: 11046 - protein, 1301 aa, Artificial Sequence
  SARS-CoV-2/Iceland/280/2020__EPI_ISL_417608 spike protein (1-1147)(I712C_T1077C) WhcAg construct
MFVFLVLLPLVSSQCVNLTTRTQLPPAYTNSFTRGVYYPDKVFRSSVLHSTQDLFLPFFSNVTWFHAIHVSGTNGTKRFDNPVLPFNDGVYFASTEKSNIIRGWIFGTTLDSKTQSLLIVNNATNVVIKVCEFQFCNDPFLGVYYHKNNKSWMESEFRVYSSANNCTFEYVSQPFLMDLEGKQGNFKNLREFVFKNIDGYFKIYSKHTPINLVRDLPQGFSALEPLVDLPIGINITRFQTLLALHRSYLTPGDSSSGWTAGAAAYYVGYLQPRTFLLKYNENGTITDAVDCALDPLSETKCTLKSFTVEKGIYQTSNFRVQPTESIVRFPNITNLCPFGEVFNATRFASVYAWNRKRISNCVADYSVLYNSASFSTFKCYGVSPTKLNDLCFTNVYADSFVIRGDEVRQIAPGQTGKIADYNYKLPDDFTGCVIAWNSNNLDSKVGGNYNYLYRLFRKSNLKPFERDISTEIYQAGSTPCNGVEGFNCYFPLQSYGFQPTNGVGYQPYRVVVLSFELLHAPATVCGPKKSTNLVKNKCVNFNFNGLTGTGVLTESNKKFLPFQQFGRDIADTTDAVRDPQTLEILDITPCSFGGVSVITPGTNTSNQVAVLYQGVNCTEVPVAIHADQLTPTWRVYSTGSNVFQTRAGCLIGAEHVNNSYECDIPIGAGICASYHTQTNSPRRARSVASQSIIAYTMSLGAENSVAYSNNSCAIPTNFTISVTTEILPVSMTKTSVDCTMYICGDSTECSNLLLQYGSFCTQLNRALTGIAVEQDKNTQEVFAQVKQIYKTPPIKDFGGFNFSQILPDPSKPSKRSFIEDLLFNKVTLADAGFIKQYGDCLGDIAARDLICAQKFNGLTVLPPLLTDEMIAQYTSALLAGTITSGWTFGAGAALQIPFAMQMAYRFNGIGVTQNVLYENQKLIANQFNSAIGKIQDSLSSTASALGKLQDVVNQNAQALNTLVKQLSSNFGAISSVLNDILSRLDKVEAEVQIDRLITGRLQSLQTYVTQQLIRAAEIRASANLAATKMSECVLGQSKRVDFCGKGYHLMSFPQSAPHGVVFLHVTYVPAQEKNFTCAPAICHDGKAHFPREGVFVSNGTHWFVTQRNFYEPQIITTDNTFVSGNCDVVIGIVNNTVYDPLQPELDSGGGGSDIDPYKEFGSSYQLLNFLPLDFFPDLNALVDTATALYEEELTGREHCSPHHTAIRQALVCWDELTKLIAWMSSNITSEQVRTIIVNHVNDTWGLKVRQSLWFHLSCLTFGQHTVQEFLVSFGVWIRTPAPYRPPNAPILSTLPEHTVIC

SEQ ID NO: 11047 - protein, 1301 aa, Artificial Sequence; identical to SEQ ID NO: 11002
  SARS-CoV-2/Iceland/247/2020__EPI_ISL_417575 spike protein (1-1147)(I712C_T1077C) WhcAg construct

SEQ ID NO: 11048 - protein, 1301 aa, Artificial Sequence
  SARS-CoV-2/Iceland/238/2020__EPI_ISL_417566 spike protein (1-1147)(I712C_T1077C) WhcAg construct
MFVFLVLLPLVSSQCVNLTTRTQLPPAYTNSFTRGVYYPDKVFRSSVLHSTQDLFLPFFSNVTWFHAIHVSGTNGTKRFDNPVLPFNDGVYFASTEKSNIIRGWIFGTTLDSKTQSLLIVNNATNVVIKVCEFQFCNDPFLGVYYHKNNKSWMESEFRVYSSANNCTFEYVSQPFLMDLEGKQGNFKNLREFVFKNIDGYFKIYSKHTPINLVRDLPQGFSALEPLVDLPIGINITRFQTLLALHRSYLTPGDSSSGWTAGAAAYYVGYLQPRTFLLKYNENGTITDAVDCALDPLSETKCTLKSFTVEKGIYQTSNFRVQPTESIVRFPNITNLCPFGEVFNATRFASVYAWNRKRISNCVADYSVLYNSASFSTFKCYGVSPTKLNDLCFTNVYADSFVIRGDEVRQIAPGQTGKIADYNYKLPDDFTGCVIAWNSNNLDSKVGGNYNYLYRLFRKSNLKPFERDISTEIYQAGSTPCNGVEGFNCYFPLQSYGFQPTNGVGYQPYRVVVLSFELLHAPATVCGPKKSTNLVKNKCVNFNFNGLTGTGVLTESNKKFLPFQQFGRDIADTTDAVRDPQTLEILDITPCSFGGVSVITPGTNTSNQVAVLYQGVNCTEVPVAIHADQLTPTWRVYSTGSNVFQTRAGCLIGAEHVNNSYECDIPIGAGICASYQTQTNSPRRARSVASQSIIAYTMSLGAENSVAYSNNSCAIPTNFTISVTTEILPVSMTKTSVDCTMYICGDSTECSNLLLQYGSFCTQLNRALTGIAVEQDKNTQEVFAQVKQIYKTPPIKDFGGFNFSQILPDPSKPSKRSFIEDLLFNKVTLADVGFIKQYGDCLGDIAARDLICAQKFNGLTVLPPLLTDEMIAQYTSALLAGTITSGWTFGAGAALQIPFAMQMAYRFNGIGVTQNVLYENQKLIANQFNSAIGKIQDSLSSTASALGKLQDVVNQNAQALNTLVKQLSSNFGAISSVLNDILSRLDKVEAEVQIDRLITGRLQSLQTYVTQQLIRAAEIRASANLAATKMSECVLGQSKRVDFCGKGYHLMSFPQSAPHGVVFLHVTYVPAQEKNFTCAPAICHDGKAHFPREGVFVSNGTHWFVTQRNFYEPQIITTDNTFVSGNCDVVIGIVNNTVYDPLQPELDSGGGGSDIDPYKEFGSSYQLLNFLPLDFFPDLNALVDTATALYEEELTGREHCSPHHTAIRQALVCWDELTKLIAWMSSNITSEQVRTIIVNHVNDTWGLKVRQSLWFHLSCLTFGQHTVQEFLVSFGVWIRTPAPYRPPNAPILSTLPEHTVIC

SEQ ID NO: 11049 - protein, 1301 aa, Artificial Sequence
  SARS-CoV-2/Greece/16/2020__EPI_ISL_418265 spike protein (1-1147)(I712C_T1077C) WhcAg construct
MFVFLVLLPLVSSQCVNLTTRTQLPPAYTNSFTRGVYYPDKVFRSSVLHSTQDLFLPFFSNVTWFHAIHVSGTNGTKRFDNPVLPFNDGVYFASTEKSNIIRGWIFGTTLDSKTQSLLIVNNATNVVIKVCEFQFCNDPFLGVYYHKNNKSWMESEFRVYSSANNCTFEYVSQPFLMDLEGKQGNFKNLREFVFKNVDGYFKIYSKHTPINLVRDLPQGFSALEPLVDLPIGINITRFQTLLALHRSYLTPGDSSSGWTAGAAAYYVGYLQPRTFLLKYNENGTITDAVDCALDPLSETKCTLKSFTVEKGIYQTSNFRVQPTESIVRFPNITNLCPFGEVFNATRFASVYAWNRKRISNCVADYSVLYNSASFSTFKCYGVSPTKLNDLCFTNVYADSFVIRGDEVRQIAPGQTGKIADYNYKLPDDFTGCVIAWNSNNLDSKVGGNYNYLYRLFRKSNLKPFERDISTEIYQAGSTPCNGVEGFNCYFPLQSYGFQPTNGVGYQPYRVVVLSFELLHAPATVCGPKKSTNLVKNKCVNFNFNGLTGTGVLTESNKKFLPFQQFGRDIADTTDAVRDPQTLEILDITPCSFGGVSVITPGTNTSNQVAVLYQDVNCTEVPVAIHADQLTPTWRVYSTGSNVFQTRAGCLIGAEHVNNSYECDIPIGAGICASYQTQTNSPRRARSVASQSIIAYTMSLGAENSVAYSNNSCAIPTNFTISVTTEILPVSMTKTSVDCTMYICGDSTECSNLLLQYGSFCTQLNRALTGIAVEQDKNTQEVFAQVKQIYKTPPIKDFGGFNFSQILPDPSKPSKRSFIEDLLFNKVTLADAGFIKQYGDCLGDIAARDLICAQKFNGLTVLPPLLTDEMIAQYTSALLAGTITSGWTFGAGAALQIPFAMQMAYRFNGIGVTQNVLYENQKLIANQFNSAIGKIQDSLSSTASALGKLQDVVNQNAQALNTLVKQLSSNFGAISSVLNDILSRLDKVEAEVQIDRLITGRLQSLQTYVTQQLIRAAEIRASANLAATKMSECVLGQSKRVDFCGKGYHLMSFPQSAPHGVVFLHVTYVPAQEKNFTCAPAICHDGKAHFPREGVFVSNGTHWFVTQRNFYEPQIITTDNTFVSGNCDVVIGIVNNTVYDPLQPELDSGGGGSDIDPYKEFGSSYQLLNFLPLDFFPDLNALVDTATALYEEELTGREHCSPHHTAIRQALVCWDELTKLIAWMSSNITSEQVRTIIVNHVNDTWGLKVRQSLWFHLSCLTFGQHTVQEFLVSFGVWIRTPAPYRPPNAPILSTLPEHTVIC

SEQ ID NO: 11050 - protein, 1301 aa, Artificial Sequence
  SARS-CoV-2/Iceland/319/2020__EPI_ISL_417648 spike protein (1-1147)(I712C_T1077C) WhcAg construct
MFVFLVLLPLVSSQCVNLTTRTQLPPAYTNSFTRGVYYPDKVFRSSVLHSTQDLFLPFFSNVTWFHAIHVSGTNGTKRFDNPVLPFNDGVYFASTEKSNIIRGWIFGTTLDSKTQSLLIVNNATNVVIKVCEFQFCNDPFLGVYYHKNNKSWMESEFRVYSSANNCTFEYVSQPFLIDLEGKQGNFKNLREFVFKNIDGYFKIYSKHTPINLVRDLPQGFSALEPLVDLPIGINITRFQTLLALHRSYLTPGDSSSGWTAGAAAYYVGYLQPRTFLLKYNENGTITDAVDCALDPLSETKCTLKSFTVEKGIYQTSNFRVQPTESIVRFPNITNLCPFGEVFNATRFASVYAWNRKRISNCVADYSVLYNSASFSTFKCYGVSPTKLNDLCFTNVYADSFVIRGDEVRQIAPGQTGKIADYNYKLPDDFTGCVIAWNSNNLDSKVGGNYNYLYRLFRKSNLKPFERDISTEIYQAGSTPCNGVEGFNCYFPLQSYGFQPTNGVGYQPYRVVVLSFELLHAPATVCGPKKSTNLVKNKCVNFNFNGLTGTGVLTESNKKFLPFQQFGRDIADTTDAVRDPQTLEILDITPCSFGGVSVITPGTNTSNQVAVLYQGVNCTEVPVAIHADQLTPTWRVYSTGSNVFQTRAGCLIGAEHVNNSYECDIPIGAGICASYQTQTNSPRRARSVASQSIIAYTMSLGAENSVAYSNNSCAIPTNFTISVTTEILPVSMTKTSVDCTMYICGDSTECSNLLLQYGSFCTQLNRALTGIAVEQDKNTQEVFAQVKQIYKTPPIKDFGGFNFSQILPDPSKPSKRSFIEDLLFNKVTLADAGFIKQYGDCLGDIAARDLICAQKFNGLTVLPPLLTDEMIAQYTSALLAGTITSGWTFGAGAALQIPFAMQMAYRFNGIGVTQNVLYENQKLIANQFNSAIGKIQDSLSSTASALGKLQDVVNQNAQALNTLVKQLSSNFGAISSVLNDILSRLDKVEAEVQIDRLITGRLQSLQTYVTQQLIRAAEIRASANLAATKMSECVLGQSKRVDFCGKGYHLMSFPQSAPHGVVFLHVTYVPAQEKNFTCAPAICHDGKAHFPREGVFVSNGTHWFVTQRNFYEPQIITTDNTFVSGNCDVVIGIVNNTVYDPLQPELDSGGGGSDIDPYKEFGSSYQLLNFLPLDFFPDLNALVDTATALYEEELTGREHCSPHHTAIRQALVCWDELTKLIAWMSSNITSEQVRTIIVNHVNDTWGLKVRQSLWFHLSCLTFGQHTVQEFLVSFGVWIRTPAPYRPPNAPILSTLPEHTVIC

SEQ ID NO: 11051 - protein, 1301 aa, Artificial Sequence
  SARS-CoV-2/Congo/94/2020__EPI_ISL_417947 spike protein (1-1147)(I712C_T1077C) WhcAg construct
MFVFLVLLPLVSSQCVNLTTRTQLPPAYTNSFTRGVYYPDKVFRSSVLHSTQDLFLPFFSNVTWFHAIHVSGTNGTKRFDNPVLPFNDGVYFASTEKSNIIRGWIFGTTLDSKTQSLLIVNNATNVVIKVCEFQFCNDPFLGVYYHKNNKSWMESEFRVYSSANNCTFEYVSQPFLMDLEGKQGNFKNLREFVFKNIDGYFKIYSKHTPINLVRDLPQGFSALEPLVDLPIGINITRFQTLLALHRSYLTPGDSSSGWTAGAAAYYVGYLQPRTFLLKYNENGTITDAVDCALDPLSETKCTLKSFTVEKGIYQTSNFRVQPTESIVRFPNITNLCPFGEVFNATRFASVYAWNRKRISNCVADYSVLYNSASFSTFKCYGVSPTKLNDLCFTNVYADSFVIRGDEVRQIAPGQTGKIADYNYKLPDDFTGCVIAWNSNNLDSKVGGNYNYLYRLFRKSNLKPFERDISTEIYQAGSTPCNGVEGFNCYFPLQSYGFQPTNGVGYQPYRVVVLSFELLHAPATVCGPKKSTNLVKNKCVNFNFNGLTGTGVLTESNKKFLPFQQFGRDIADTTDAVRDPQTLEILDITPCSFGGVSVITPGTNTSNQVAVLYQGVNCTEVPVAIHADQLTPTWRVYSTGSNVFQTRAGCLIGAEHVNNSYECDIPIGAGICASYQTQTNSPRRARSVASQSIIAYTMSLGAENSVAYSNNSCAIPTNFTISVTTEILPVSMTKTSVDCTMYICGDSTECSNLLLQYGSFCTQLNRALTGIAVEQDKNTQEVFAQVKQIYKTPPIKDFGGFNFSQILPDPSKPSKRSFIEDILFNKVTLADAGFIKQYGDCLGDIAARDLICAQKFNGLTVLPPLLTDEMIAQYTSALLAGTITSGWTFGAGAALQIPFAMQMAYRFNGIGVTQNVLYENQKLIANQFNSAIGKIQDSLSSTASALGKLQDVVNQNAQALNTLVKQLSSNFGAISSVLNDILSRLDKVEAEVQIDRLITGRLQSLQTYVTQQLIRAAEIRASANLAATKMSECVLGQSKRVDFCGKGYHLMSFPQSAPHGVVFLHVTYVPAQEKNFTCAPAICHDGKAHFPREGVFVSNGTHWFVTQRNFYEPQIITTDNTFVSGNCDVVIGIVNNTVYDPLQPELDSGGGGSDIDPYKEFGSSYQLLNFLPLDFFPDLNALVDTATALYEEELTGREHCSPHHTAIRQALVCWDELTKLIAWMSSNITSEQVRTIIVNHVNDTWGLKVRQSLWFHLSCLTFGQHTVQEFLVSFGVWIRTPAPYRPPNAPILSTLPEHTVIC

SEQ ID NO: 11052 - protein, 1301 aa, Artificial Sequence
  SARS-CoV-2/Congo/158/2020__EPI_ISL_417950 spike protein (1-1147)(I712C_T1077C) WhcAg construct
MFVFLVLLPLVSSQCVNLTTRTQLPPAYTNSFTRGVYYPDKVFRSSVLHSTQDLFLPFFSNVTWFHAIHVSGTNGTKRFDNPVLPFNDGVYFASTEKSNIIRGWIFGTTLDSKTQSLLIVNNATNVVIKVCEFQFCNDPFLGVYYHKNNKSWMESEFRVYSSANNCTFEYVSQPFLMDLEGKQGNFKNLREFVFKNIDGYFKIYSKHTPINLVRDLPQGFSALEPLVDLPIGINITRFQTLLALHRSYLTPGDSSSGWTAGAAAYYVGYLQPRTFLLKYNENGTITDAVDCALDPLSETKCTLKSFTVEKGIYQTSNFRVQPTESIVRFPNITNLCPFGEVFNATRFASVYAWNRKRISNCVADYSVLYNSASFSTFKCYGVSPTKLNDLCFTNVYADSFVIRGDEVRQIAPGQTGKIADYNYKLPDDFTGCVIAWNSNNLDSKVGGNYNYLYRLFRKSNLKPFERDISTEIYQAGSTPCNGVEGFNCYFPLQSYGFQPTNGVGYQPYRVVVLSFELLHAPATVCGPKKSTNLVKNKCVNFNFNGLTGTGVLTESNKKFLPFQQFGRDIADTTDAVRDPQTLEILDITPCSFGGVSVITPGTNTSNQVAVLYQDVNCTEVPVAIHADQLTPTWRVYSTGSNVFQTRAGCLIGAEHVNNSYECDIPIGAGICASYQTQTNSPRRARSVASQSIIAYTMSLGAENSVAYSNNSCAIPTNFTISVTTEILPVSMTKTSVDCTMYICGDSTECSNLLLQYGSFCTQLNRALTGIAVEQDKNTQEVFAQVKQIYKTPPIKDFGGFNFSQILPDPSKPSKRSFIEDLLFNKVTLADAGFIKQYGDCLGDIAARDLICAQKFNGLTVLPPLLTDEMIAQYTSALLAGTITSGWTFGAGAALQIPFAMQMAYRFNGIGVTQNVLYENQKLIANQFNSAIGKIQDSLSSTASALGKLQDVVNQNAQALNTLVKQLSSNFGAISSVLNDILSRLDKVEAEVQIDRLITGRLQSLQTYVTQQLIRAAEIRASANLAATKMSECVLGQSKRVDFCGKGYHLMSFPQSAPHGVVFLHVTYVPAQEKNFTCAPAICHDGKAHFPREGVFVSNGTHWFVTQRNFYEPQIITTDNTFLSGNCDVVIGIVNNTVYDPLQPELDSGGGGSDIDPYKEFGSSYQLLNFLPLDFFPDLNALVDTATALYEEELTGREHCSPHHTAIRQALVCWDELTKLIAWMSSNITSEQVRTIIVNHVNDTWGLKVRQSLWFHLSCLTFGQHTVQEFLVSFGVWIRTPAPYRPPNAPILSTLPEHTVIC

SEQ ID NO: 11053 - protein, 1301 aa, Artificial Sequence
  SARS-CoV-2/USA/UT-00034/2020__EPI_ISL_417977 spike protein (1-1147)(I712C_T1077C) WhcAg construct
MFVFLVLLPLVSSQCVNLTTRTQLPPAYTNSFTRGVYYPDKVFRSSVLHSTQDLFLPFFSNVTWFHAIHVSGTNGTKRFDNPVLPFNDGVYFASTEKSNIIRGWIFGTTLDSKTQSLLIVNNATNVVIKVCEFQFCNDPFLGVYYYKNNKSWMESEFRVYSSANNCTFEYVSQPFLMDLEGKQGNFKNLREFVFKNIDGYFKIYSKHTPINLVRDLPQGFSALEPLVDLPIGINITRFQTLLALHRSYLTPGDSSSGWTAGAAAYYVGYLQPRTFLLKYNENGTITDAVDCALDPLSETKCTLKSFTVEKGIYQTSNFRVQPTESIVRFPNITNLCPFGEVFNATRFASVYAWNRKRISNCVADYSVLYNSASFSTFKCYGVSPTKLNDLCFTNVYADSFVIRGDEVRQIAPGQTGKIADYNYKLPDDFTGCVIAWNSNNLDSKVGGNYNYLYRLFRKSNLKPFERDISTEIYQAGSTPCNGVEGFNCYFPLQSYGFQPTNGVGYQPYRVVVLSFELLHAPATVCGPKKSTNLVKNKCVNFNFNGLTGTGVLTESNKKFLPFQQFGRDIADTTDAVRDPQTLEILDITPCSFGGVSVITPGTNTSNQVAVLYQGVNCTEVPVAIHADQLTPTWRVYSTGSNVFQTRAGCLIGAEHVNNSYECDIPIGAGICASYQTQTNSPRRARSVASQSIIAYTMSLGAENSVAYSNNSCAIPTNFTISVTTEILPVSMTKTSVDCTMYICGDSTECSNLLLQYGSFCTQLNRALTGIAVEQDKNTQEVFAQVKQIYKTPPIKDFGGFNFSQILPDPSKPSKRSFIEDLLFNKVTLADAGFIKQYGDCLGDIAARDLICAQKFNGLTVLPPLLTDEMIAQYTSALLAGTITSGWTFGAGAALQIPFAMQMAYRFNGIGVTQNVLYENQKLIANQFNSAIGKIQDSLSSTASALGKLQDVVNQNAQALNTLVKQLSSNFGAISSVLNDILSRLDKVEAEVQIDRLITGRLQSLQTYVTQQLIRAAEIRASANLAATKMSECVLGQSKRVDFCGKGYHLMSFPQSAPHGVVFLHVTYVPAQEKNFTCAPAICHDGKAHFPREGVFVSNGTHWFVTQRNFYEPQIITTDNTFVSGNCDVVIGIVNNTVYDPLQPELDSGGGGSDIDPYKEFGSSYQLLNFLPLDFFPDLNALVDTATALYEEELTGREHCSPHHTAIRQALVCWDELTKLIAWMSSNITSEQVRTIIVNHVNDTWGLKVRQSLWFHLSCLTFGQHTVQEFLVSFGVWIRTPAPYRPPNAPILSTLPEHTVIC

SEQ ID NO: 11054 - protein, 1301 aa, Artificial Sequence
  SARS-CoV-2/USA/UT-00033/2020__EPI_ISL_417976 spike protein (1-1147)(I712C_T1077C) WhcAg construct
MFVFLVLLPLVSSQCVNLTTRTQLPPAYTNSFTRGVYYPDKVFRSSVLHSTQDLFLPFFSNVTWFHAIHVSGTNGTKRFDNPVLPFNDGVYFASTEKSNIIRGWIFGTTLDSKTQSLLIVNNATNVVIKVCEFQFCNDPFLGVYYHKNNKSWMESEFRVYSSANNCTFEYVSQPFLMDLEGKQGNFKNLREFVFKNIDGYFKIYSKHTPINLVRDLPQGFSALEPLVDLPIGINITRFQTLLALHRSYLTPGDSSSGLTAGAAAYYVGYLQPRTFLLKYNENGTITDAVDCALDPLSETKCTLKSFTVEKGIYQTSNFRVQPTESIVRFPNITNLCPFGEVFNATRFASVYAWNRKRISNCVADYSVLYNSASFSTFKCYGVSPTKLNDLCFTNVYADSFVIRGDEVRQIAPGQTGKIADYNYKLPDDFTGCVIAWNSNNLDSKVGGNYNYLYRLFRKSNLKPFERDISTEIYQAGSTPCNGVEGFNCYFPLQSYGFQPTNGVGYQPYRVVVLSFELLHAPATVCGPKKSTNLVKNKCVNFNFNGLTGTGVLTESNKKFLPFQQFGRDIADTTDAVRDPQTLEILDITPCSFGGVSVITPGTNTSNQVAVLYQGVNCTEVPVAIHADQLTPTWRVYSTGSNVFQTRAGCLIGAEHVNNSYECDIPIGAGICASYQTQTNSPRRARSVASQSIIAYTMSLGAENSVAYSNNSCAIPTNFTISVTTEILPVSMTKTSVDCTMYICGDSTECSNLLLQYGSFCTQLNRALTGIAVEQDKNTQEVFAQVKQIYKTPPIKDFGGFNFSQILPDPSKPSKRSFIEDLLFNKVTLADAGFIKQYGDCLGDIAARDLICAQKFNGLTVLPPLLTDEMIAQYTSALLAGTITSGWTFGAGAALQIPFAMQMAYRFNGIGVTQNVLYENQKLIANQFNSAIGKIQDSLSSTASALGKLQDVVNQNAQALNTLVKQLSSNFGAISSVLNDILSRLDKVEAEVQIDRLITGRLQSLQTYVTQQLIRAAEIRASANLAATKMSECVLGQSKRVDFCGKGYHLMSFPQSAPHGVVFLHVTYVPAQEKNFTCAPAICHDGKAHFPREGVFVSNGTHWFVTQRNFYEPQIITTDNTFVSGNCDVVIGIVNNTVYDPLQPELDSGGGGSDIDPYKEFGSSYQLLNFLPLDFFPDLNALVDTATALYEEELTGREHCSPHHTAIRQALVCWDELTKLIAWMSSNITSEQVRTIIVNHVNDTWGLKVRQSLWFHLSCLTFGQHTVQEFLVSFGVWIRTPAPYRPPNAPILSTLPEHTVIC

SEQ ID NO: 11055 - protein, 1301 aa, Artificial Sequence
  SARS-CoV-2/USA/WI-13/2020__EPI_ISL_417516 spike protein (1-1147)(I712C_T1077C) WhcAg construct
MFVFLVLLPLVSSQCVNLTTRTQLPPAYTNSFTRGVYYPDKVFRSSVLHSTQDLFLPFFSNVTWFHAIHVSGTNGTKRFDNPVLPFNDGVYFASTEKSNIIRGWIFGTTLDSKTQSLLIVNNATNVVIKVCEFQFCNDPFLGVYYHKNNKSWMESEFRVYSSANNCTFEYVSQPFLMDLEGKQGNFKNLREFVFKNIDGYFKIYSKHTPINLVRDLPQGFSALEPLVDLPIGINITRFQTLLALHRSYLTPGDSSSGWTAGAAAYYVGYLQPRTFLLKYNENGTITDAVDCALDPLSETKCTLKSFTVEKGIYQTSNFRVLPTESIVRFPNITNLCPFGEVFNATRFASVYAWNRKRISNCVADYSVLYNSASFSTFKCYGVSPTKLNDLCFTNVYADSFVIRGDEVRQIAPGQTGKIADYNYKLPDDFTGCVIAWNSNNLDSKVGGNYNYLYRLFRKSNLKPFERDISTEIYQAGSTPCNGVEGFNCYFPLQSYGFQPTNGVGYQPYRVVVLSFELLHAPATVCGPKKSTNLVKNKCVNFNFNGLTGTGVLTESNKKFLPFQQFGRDIADTTDAVRDPQTLEILDITPCSFGGVSVITPGTNTSNQVAVLYQGVNCTEVPVAIHADQLTPTWRVYSTGSNVFQTRAGCLIGAEHVNNSYECDIPIGAGICASYQTQTNSPRRARSVASQSIIAYTMSLGAENSVAYSNNSCAIPTNFTISVTTEILPVSMTKTSVDCTMYICGDSTECSNLLLQYGSFCTQLNRALTGIAVEQDKNTQEVFAQVKQIYKTPPIKDFGGFNFSQILPDPSKPSKRSFIEDLLFNKVTLADAGFIKQYGDCLGDIAARDLICAQKFNGLTVLPPLLTDEMIAQYTSALLAGTITSGWTFGAGAALQIPFAMQMAYRFNGIGVTQNVLYENQKLIANQFNSAIGKIQDSLSSTASALGKLQDVVNQNAQALNTLVKQLSSNFGAISSVLNDILSRLDKVEAEVQIDRLITGRLQSLQTYVTQQLIRAAEIRASANLAATKMSECVLGQSKRVDFCGKGYHLMSFPQSAPHGVVFLHVTYVPAQEKNFTCAPAICHDGKAHFPREGVFVSNGTHWFVTQRNFYEPQIITTDNTFVSGNCDVVIGIVNNTVYDPLQPELDSGGGGSDIDPYKEFGSSYQLLNFLPLDFFPDLNALVDTATALYEEELTGREHCSPHHTAIRQALVCWDELTKLIAWMSSNITSEQVRTIIVNHVNDTWGLKVRQSLWFHLSCLTFGQHTVQEFLVSFGVWIRTPAPYRPPNAPILSTLPEHTVIC

SEQ ID NO: 11056 - protein, 1300 aa, Artificial Sequence
  SARS-CoV-2/India/1-27/2020__EPI_ISL_413522 spike protein (1-1146)(I711C_T1076C) WhcAg construct
MFVFLVLLPLVSSQCVNLTTRTQLPPAYTNSFTRGVYYPDKVFRSSVLHSTQDLFLPFFSNVTWFHAIHVSGTNGTKRFDNPVLPFNDGVYFASTEKSNIIRGWIFGTTLDSKTQSLLIVNNATNVVIKVCEFQFCNDPFLGVYHKNNKSWMESEFRVYSSANNCTFEYVSQPFLMDLEGKQGNFKNLREFVFKNIDGYFKIYSKHTPINLVRDLPQGFSALEPLVDLPIGINITRFQTLLALHRSYLTPGDSSSGWTAGAAAYYVGYLQPRTFLLKYNENGTITDAVDCALDPLSETKCTLKSFTVEKGIYQTSNFRVQPTESIVRFPNITNLCPFGEVFNATRFASVYAWNRKRISNCVADYSVLYNSASFSTFKCYGVSPTKLNDLCFTNVYADSFVIRGDEVIQIAPGQTGKIADYNYKLPDDFTGCVIAWNSNNLDSKVGGNYNYLYRLFRKSNLKPFERDISTEIYQAGSTPCNGVEGFNCYFPLQSYGFQPTNGVGYQPYRVVVLSFELLHAPATVCGPKKSTNLVKNKCVNFNFNGLTGTGVLTESNKKFLPFQQFGRDIADTTDAVRDPQTLEILDITPCSFGGVSVITPGTNTSNQVAVLYQDVNCTEVPVAIHADQLTPTWRVYSTGSNVFQTRAGCLIGAEHVNNSYECDIPIGAGICASYQTQTNSPRRARSVASQSIIAYTMSLGAENSVAYSNNSCAIPTNFTISVTTEILPVSMTKTSVDCTMYICGDSTECSNLLLQYGSFCTQLNRALTGIAVEQDKNTQEVFAQVKQIYKTPPIKDFGGFNFSQILPDPSKPSKRSFIEDLLFNKVTLADAGFIKQYGDCLGDIAARDLICAQKFNGLTVLPPLLTDEMIAQYTSALLAGTITSGWTFGAGAALQIPFAMQMAYRFNGIGVTQNVLYENQKLIANQFNSAIGKIQDSLSSTASALGKLQDVVNQNAQALNTLVKQLSSNFGAISSVLNDILSRLDKVEAEVQIDRLITGRLQSLQTYVTQQLIRAAEIRASANLAATKMSECVLGQSKRVDFCGKGYHLMSFPQSAPHGVVFLHVTYVPAQEKNFTCAPAICHDGKAHFPREGVFVSNGTHWFVTQRNFYEPQIITTDNTFVSGNCDVVIGIVNNTVYDPLQPELDSGGGGSDIDPYKEFGSSYQLLNFLPLDFFPDLNALVDTATALYEEELTGREHCSPHHTAIRQALVCWDELTKLIAWMSSNITSEQVRTIIVNHVNDTWGLKVRQSLWFHLSCLTFGQHTVQEFLVSFGVWIRTPAPYRPPNAPILSTLPEHTVIC

SEQ ID NO: 11057 - protein, 1295 aa, Artificial Sequence
  SARS-CoV-2/pangolin/Guangxi/P4L/2017__EPI_ISL_410538 spike protein (1-1141)(I706C_T1071C) WhcAg construct
MFVFLFVLPLVSSQCVNLTTRTGIPPGYTNSSTRGVYYPDKVFRSSILHLTQDLFLPFFSNVTWFNTINYQGGFKKFDNPVLPFNDGVYFASTEKSNIIRGWIFGTTLDARTQSLLIVNNATNVVIKVCEFQFCTDPFLGVYYHNNNKTWVENEFRVYSSANNCTFEYISQPFLMDLEGKQGNFKNLREFVFKNVDGYFKIYSKHTPIDLVRDLPRGFAALEPLVDLPIGINITRFQTLLALHRSYLTPGNLESGWTTGAAAYYVGYLQQRTFLLSYNQNGTITDAVDCSLDPLSETKCTLKSLTVEKGIYQTSNFRVQPTISIVRFPNITNLCPFGEVFNASKFASVYAWNRKRISNCVADYSVLYNSTSFSTFKCYGVSPTKLNDLCFTNVYADSFVVKGDEVRQIAPGQTGVIADYNYKLPDDFTGCVIAWNSVKQDALTGGNYGYLYRLFRKSKLKPFERDISTEIYQAGSTPCNGQVGLNCYYPLERYGFHPTTGVNYQPFRVVVLSFELLNGPATVCGPKLSTTLVKDKCVNFNFNGLTGTGVLTTSKKQFLPFQQFGRDISDTTDAVRDPQTLEILDITPCSFGGVSVITPGTNTSNQVAVLYQDVNCTEVPMAIHAEQLTPAWRVYSAGANVFQTRAGCLVGAEHVNNSYECDIPVGAGICASYHSMSSLRSVNQRSIIAYTMSLGAENSVAYSNNSCAIPTNFTISVTTEILPVSMTKTSVDCTMYICGDSIECSNLLLQYGSFCTQLNRALTGIAVEQDKNTQEVFAQVKQIYKTPPIKDFGGFNFSQILPDPSKPSKRSFIEDLLFNKVTLADAGFIKQYGDCLGDIAARDLICAQKFNGLTVLPPLLTDEMIAQYTSALLAGTITSGWTFGAGAALQIPFAMQMAYRFNGIGVTQNVLYENQKLIANQFNSAIGKIQDSLSSTASALGKLQDVVNQNAQALNTLVKQLSSNFGAISSVLNDILSRLDKVEAEVQIDRLITGRLQSLQTYVTQQLIRAAEIRASANLAATKMSECVLGQSKRVDFCGKGYHLMSFPQSAPHGVVFLHVTYVPAQEKNFTCAPAICHEGKAHFPREGVFVSNGTHWFITQRNFYEPQIITTDNTFVSGSCDVVIGIVNNTVYDPLQPELDSGGGGSDIDPYKEFGSSYQLLNFLPLDFFPDLNALVDTATALYEEELTGREHCSPHHTAIRQALVCWDELTKLIAWMSSNITSEQVRTIIVNHVNDTWGLKVRQSLWFHLSCLTFGQHTVQEFLVSFGVWIRTPAPYRPPNAPILSTLPEHTVIC

SEQ ID NO: 11058 - protein, 1295 aa, Artificial Sequence
  SARS-CoV-2/pangolin/Guangxi/P5L/2017__EPI_ISL_410540 spike protein (1-1141)(I706C_T1071C) WhcAg construct
MFVFLFVLPLVSSQCVNLTTRTGIPPGYTNSSTRGVYYPDKVFRSSILHLTQDLFLPFFSNVTWFNTINYQGGFKKFDNPVLPFNDGVYFASTEKSNIIRGWIFGTTLDARTQSLLIVNNATNVVIKVCEFQFCTDPFLGVYYHNNNKTWVENEFRVYSSANNCTFEYISQPFLMDLEGKQGNFKNLREFVFKNVDGYFKIYSKHTPIDLVRDLPRGFAALEPLVDLPIGINITRFQTLLALHRSYLTPGKLESGWTTGAAAYYVGYLQQRTFLLSYNQNGTITDAVDCSLDPLSETKCTLKSLTVEKGIYQTSNFRVQPTISIVRFPNITNLCPFGEVFNASKFASVYAWNRKRISNCVADYSVLYNSTSFSTFKCYGVSPTKLNDLCFTNVYADSFVVKGDEVRQIAPGQTGVIADYNYKLPDDFTGCVIAWNSVKQDALTGGNYGYLYRLFRKSKLKPFERDISTEIYQAGSTPCNGQVGLNCYYPLERYGFHPTTGVNYQPFRVVVLSFELLNGPATVCGPKLSTTLVKDKCVNFNFNGLTGTGVLTTSKKQFLPFQQFGRDISDTTDAVRDPQTLEILDITPCSFGGVSVITPGTNTSNQVAVLYQDVNCTEVPMAIHAEQLTPAWRVYSAGANVFQTRAGCLVGAEHVNNSYECDIPVGAGICASYHSMSSFRSVNQRSIIAYTMSLGAENSVAYSNNSCAIPTNFTISVTTEILPVSMTKTSVDCTMYICGDSIECSNLLLQYGSFCTQLNRALTGIAVEQDKNTQEVFAQVKQIYKTPPIKDFGGFNFSQILPDPSKPSKRSFIEDLLFNKVTLADAGFIKQYGDCLGDIAARDLICAQKFNGLTVLPPLLTDEMIAQYTSALLAGTITSGWTFGAGAALQIPFAMQMAYRFNGIGVTQNVLYENQKLIANQFNSAIGKIQDSLSSTASALGKLQDVVNQNAQALNTLVKQLSSNFGAISSVLNDILSRLDKVEAEVQIDRLITGRLQSLQTYVTQQLIRAAEIRASANLAATKMSECVLGQSKRVDFCGKGYHLMSFPQSAPHGVVFLHVTYVPAQEKNFTCAPAICHEGKAHFPREGVFVSNGTHWFITQRNFYEPQIITTDNTFVSGSCDVVIGIVNNTVYDPLQPELDSGGGGSDIDPYKEFGSSYQLLNFLPLDFFPDLNALVDTATALYEEELTGREHCSPHHTAIRQALVCWDELTKLIAWMSSNITSEQVRTIIVNHVNDTWGLKVRQSLWFHLSCLTFGQHTVQEFLVSFGVWIRTPAPYRPPNAPILSTLPEHTVIC

SEQ ID NO: 11059 - protein, 1295 aa, Artificial Sequence
  SARS-CoV-2/pangolin/Guangxi/P5E/2017__EPI_ISL_410541 spike protein (1-1141)(I706C_T1071C) WhcAg construct
MFVFLFVLPLVSSQCVNLTTRTGIPPGYTNSSTRGVYYPDKVFRSSILHLTQDLFLPFFSNVTWFNTITYQGGSKKFDNPVLPFNDGVYFASTEKSNIIRGWIFGTTLDARTQSLLIVNNATNVVIKVCEFQFCTDPFLGVYYHNNNKTWVENEFRVYSSANNCTFEYISQPFLMDLEGKQGNFKNLREFVFKNVDGYFKIYSKHTPIDLVRDLPRGFAALEPLVDLPIGINITRFQTLLALHRSYLTPGKLESGWTTGAAAYYVGYLQQRTFLLSYNQNGTITDAVDCSLDPLSETKCTLKSLTVEKGIYQTSNFRVQPTISIVRFPNITNLCPFGEVFNASKFASVYAWNRKRISNCVADYSVLYNSTSFSTFKCYGVSPTKLNDLCFTNVYADSFVVKGDEVRQIAPGQTGVIADYNYKLPDDFTGCVIAWNSVKQDALTGDNYGYLYRLFRKSKLKPFERDISTEIYQAGSTPCNGQVGLNCYYPLERYGFHPTTGVNYQPFRVVVLSFELLNGPATVCGPKLSTTLVKDKCVNFNFNGLTGTGVLTTSKKQFLPFQQFGRDISDTTDAVRDPQTLEILDITPCSFGGVSVITPGTNTSNQVAVLYQDVNCTEVPMAIHAEQLTPAWRVYSAGANVFQTRAGCLVGAEHVNNSYECDIPVGAGICASYHSMSSFRSVNQRSIIAYTMSLGAENSVAYSNNSCAIPTNFTISVTTEILPVSMTKTSVDCTMYICGDSIECSNLLLQYGSFCTQLNRALTGIAVEQDKNTQEVFAQVKQIYKTPPIKDFGGFNFSQILPDPSKPSKRSFIEDLLFNKVTLADAGFIKQYGDCLGDIAARDLICAQKFNGLTVLPPLLTDEMIAQYTSALLAGTITSGWTFGAGAALQIPFAMQMAYRFNGIGVTQNVLYENQKLIANQFNSAIGKIQDSLSSTASALGKLQDVVNQNAQALNTLVKQLSSNFGAISSVLNDILSRLDKVEAEVQIDRLITGRLQSLQTYVTQQLIRAAEIRASANLAATKMSECVLGQSKRVDFCGKGYHLMSFPQSAPHGVVFLHVTYVPAQEKNFTCAPAICHEGKAHFPREGVFVSNGTHWFITQRNFYEPQIITTDNTFVSGSCDVVIGIVNNTVYDPLQPELDSGGGGSDIDPYKEFGSSYQLLNFLPLDFFPDLNALVDTATALYEEELTGREHCSPHHTAIRQALVCWDELTKLIAWMSSNITSEQVRTIIVNHVNDTWGLKVRQSLWFHLSCLTFGQHTVQEFLVSFGVWIRTPAPYRPPNAPILSTLPEHTVIC

SEQ ID NO: 11060 - protein, 1293 aa, Artificial Sequence
  SARS-CoV-2/pangolin/Guangxi/P1E/2017__EPI_ISL_410539 spike protein (1-1139)(I704C_T1069C) WhcAg construct
MFVFLFVLPLVSSQCVNLTTRTGIQPGYTNSSTRGVYYPDKVFRSSILHLTQDLFLPFFSNVTWFNTINYQGGFKKFDNPVLPFNDGVYFASTEKSNIIRGWIFGTTLDARTQSLLIVNNATNVVIKVCEFQFCTDPFLGVYYHNNNKTWVENEFRVYSSANNCTFEYISQPFLMDLEGKQGNFKNLREFVFKNVDGYFKIYSKHTPIDLVRDLPRGFAALEPLVDLPIGINITRFQTLLALHRSYLTPGKLESGWTTGAAAYYVGYLQQRTFLLSYNQNGTITDAVDCSLDPLSETKCTLKSLTVEKGIYQTSNFRVQPTISIVRFPNITNLCPFGEVFNASKFASVYAWNRKRISNCVADYSVLYNSTSFSTFKCYGVSPTKLNDLCFTNVYADSFVVKGDEVRQIAPGQTGVIADYNYKLPDDFTGCVIAWNSVKQDALTGGNYLYRLFRKSKLKPFERDISTEIYQAGSTPCNGQVGLNCYYPLERYGFHPTTGVNYQPFRVVVLSFELLNGPATVCGPKLSTTLVKDKCVNFNFNGLTGTGVLTTSKKQFLPFQQFGRDISDTTDAVRDPQTLEILDITPCSFGGVSVITPGTNTSNQVAVLYQDVNCTEVPMAIHAEQLTPAWRVYSAGANVFQTRAGCLVGAEHVNNSYECDIPVGAGICASYHSMSSLRSVNQRSIIAYTMSLGAENSVAYSNNSCAIPTNFTISVTTEILPVSMTKTSVDCTMYICGDSIECSNLLLQYGSFCTQLNRALTGIAVEQDKNTQEVFAQVKQIYKTPPIKDFGGFNFSQILPDPSKPSKRSFIEDLLFNKVTLADAGFIKQYGDCLGDIAARDLICAQKFNGLTVLPPLLTDEMIAQYTSALLAGTITSGWTFGAGAALQIPFAMQMAYRFNGIGVTQNVLYENQKLIANQFNSAIGKIQDSLSSTASALGKLQDVVNQNAQALNTLVKQLSSNFGAISSVLNDILSRLDKVEAEVQIDRLITGRLQSLQTYVTQQLIRAAEIRASANLAATKMSECVLGQSKRVDFCGKGYHLMSFPQSAPHGVVFLHVTYVPAQEKNFTCAPAICHEGKAHFPREGVFVSNGTHWFITQRNFYEPQIITTDNTFVSGSCDVVIGIVNNTVYDPLQPELDSGGGGSDIDPYKEFGSSYQLLNFLPLDFFPDLNALVDTATALYEEELTGREHCSPHHTAIRQALVCWDELTKLIAWMSSNITSEQVRTIIVNHVNDTWGLKVRQSLWFHLSCLTFGQHTVQEFLVSFGVWIRTPAPYRPPNAPILSTLPEHTVIC

SEQ ID NO: 11061 - protein, 1301 aa, Artificial Sequence
  SARS-CoV-2/Wuhan/WIV05/2019__EPI_ISL_402128 spike protein (1-1147)(I714C_Y1110C) WhcAg construct
MFVFLVLLPLVSSQCVNLTTRTQLPPAYTNSFTRGVYYPDKVFRSSVLHSTQDLFLPFFSNVTWFHAIHVSGTNGTKRFDNPVLPFNDGVYFASTEKSNIIRGWIFGTTLDSKTQSLLIVNNATNVVIKVCEFQFCNDPFLGVYYHKNNKSWMESEFRVYSSANNCTFEYVSQPFLMDLEGKQGNFKNLREFVFKNIDGYFKIYSKHTPINLVRDLPQGFSALEPLVDLPIGINITRFQTLLALHRSYLTPGDSSSGWTAGAAAYYVGYLQPRTFLLKYNENGTITDAVDCALDPLSETKCTLKSFTVEKGIYQTSNFRVQPTESIVRFPNITNLCPFGEVFNATRFASVYAWNRKRISNCVADYSVLYNSASFSTFKCYGVSPTKLNDLCFTNVYADSFVIRGDEVRQIAPGQTGKIADYNYKLPDDFTGCVIAWNSNNLDSKVGGNYNYLYRLFRKSNLKPFERDISTEIYQAGSTPCNGVEGFNCYFPLQSYGFQPTNGVGYQPYRVVVLSFELLHAPATVCGPKKSTNLVKNKCVNFNFNGLTGTGVLTESNKKFLPFQQFGRDIADTTDAVRDPQTLEILDITPCSFGGVSVITPGTNTSNQVAVLYQDVNCTEVPVAIHADQLTPTWRVYSTGSNVFQTRAGCLIGAEHVNNSYECDIPIGAGICASYQTQTNSPRRARSVASQSIIAYTMSLGAENSVAYSNNSIACPTNFTISVTTEILPVSMTKTSVDCTMYICGDSTECSNLLLQYGSFCTQLNRALTGIAVEQDKNTQEVFAQVKQIYKTPPIKDFGGFNFSQILPDPSKPSKRSFIEDLLFNKVTLADAGFIKQYGDCLGDIAARDLICAQKFNGLTVLPPLLTDEMIAQYTSALLAGTITSGWTFGAGAALQIPFAMQMAYRFNGIGVTQNVLYENQKLIANQFNSAIGKIQDSLSSTASALGKLQDVVNQNAQALNTLVKQLSSNFGAISSVLNDILSRLDKVEAEVQIDRLITGRLQSLQTYVTQQLIRAAEIRASANLAATKMSECVLGQSKRVDFCGKGYHLMSFPQSAPHGVVFLHVTYVPAQEKNFTTAPAICHDGKAHFPREGVFVSNGTHWFVTQRNFCEPQIITTDNTFVSGNCDVVIGIVNNTVYDPLQPELDSGGGGSDIDPYKEFGSSYQLLNFLPLDFFPDLNALVDTATALYEEELTGREHCSPHHTAIRQALVCWDELTKLIAWMSSNITSEQVRTIIVNHVNDTWGLKVRQSLWFHLSCLTFGQHTVQEFLVSFGVWIRTPAPYRPPNAPILSTLPEHTVIC

SEQ ID NO: 11062 - protein, 1297 aa, Artificial Sequence
  SARS-CoV-2/bat/Yunnan/RaTG13/2013__EPI_ISL_402131 spike protein (1-1143)(I710C_Y1106C) WhcAg construct
MFVFLVLLPLVSSQCVNLTTRTQLPPAYTNSSTRGVYYPDKVFRSSVLHLTQDLFLPFFSNVTWFHAIHVSGTNGIKRFDNPVLPFNDGVYFASTEKSNIIRGWIFGTTLDSKTQSLLIVNNATNVVIKVCEFQFCNDPFLGVYYHKNNKSWMESEFRVYSSANNCTFEYVSQPFLMDLEGKQGNFKNLREFVFKNIDGYFKIYSKHTPINLVRDLPPGFSALEPLVDLPIGINITRFQTLLALHRSYLTPGDSSSGWTAGAAAYYVGYLQPRTFLLKYNENGTITDAVDCALDPLSETKCTLKSFTVEKGIYQTSNFRVQPTDSIVRFPNITNLCPFGEVFNATTFASVYAWNRKRISNCVADYSVLYNSTSFSTFKCYGVSPTKLNDLCFTNVYADSFVITGDEVRQIAPGQTGKIADYNYKLPDDFTGCVIAWNSKHIDAKEGGNFNYLYRLFRKANLKPFERDISTEIYQAGSKPCNGQTGLNCYYPLYRYGFYPTDGVGHQPYRVVVLSFELLNAPATVCGPKKSTNLVKNKCVNFNFNGLTGTGVLTESNKKFLPFQQFGRDIADTTDAVRDPQTLEILDITPCSFGGVSVITPGTNASNQVAVLYQDVNCTEVPVAIHADQLTPTWRVYSTGSNVFQTRAGCLIGAEHVNNSYECDIPIGAGICASYQTQTNSRSVASQSIIAYTMSLGAENSVAYSNNSIACPTNFTISVTTEILPVSMTKTSVDCTMYICGDSTECSNLLLQYGSFCTQLNRALTGIAVEQDKNTQEVFAQVKQIYKTPPIKDFGGFNFSQILPDPSKPSKRSFIEDLLFNKVTLADAGFIKQYGDCLGDIAARDLICAQKFNGLTVLPPLLTDEMIAQYTSALLAGTITSGWTFGAGAALQIPFAMQMAYRFNGIGVTQNVLYENQKLIANQFNSAIGKIQDSLSSTASALGKLQDVVNQNAQALNTLVKQLSSNFGAISSVLNDILSRLDKVEAEVQIDRLITGRLQSLQTYVTQQLIRAAEIRASANLAATKMSECVLGQSKRVDFCGKGYHLMSFPQSAPHGVVFLHVTYVPAQEKNFTTAPAICHDGKAHFPREGVFVSNGTHWFVTQRNFCEPQIITTDNTFVSGSCDVVIGIVNNTVYDPLQPELDSGGGGSDIDPYKEFGSSYQLLNFLPLDFFPDLNALVDTATALYEEELTGREHCSPHHTAIRQALVCWDELTKLIAWMSSNITSEQVRTIIVNHVNDTWGLKVRQSLWFHLSCLTFGQHTVQEFLVSFGVWIRTPAPYRPPNAPILSTLPEHTVIC

SEQ ID NO: 11063 - protein, 1301 aa, Artificial Sequence
  SARS-CoV-2/Wuhan/HBCDC-HB-01/2019__EPI_ISL_402132 spike protein (1-1147)(I714C_Y1110C) WhcAg construct
MFVFLVLLPLVSSQCVNLTTRTQLPPAYTNSITRGVYYPDKVFRSSVLHSTQDLFLPFFSNVTWFHAIHVSGTNGTKRFDNPVLPFNDGVYFASTEKSNIIRGWIFGTTLDSKTQSLLIVNNATNVVIKVCEFQFCNDPFLGVYYHKNNKSWMESEFRVYSSANNCTFEYVSQPFLMDLEGKQGNFKNLREFVFKNIDGYFKIYSKHTPINLVRDLPQGFSALEPLVDLPIGINITRFQTLLALHRSYLTPGDSSSGWTAGAAAYYVGYLQPRTFLLKYNENGTITDAVDCALDPLSETKCTLKSFTVEKGIYQTSNFRVQPTESIVRFPNITNLCPFGEVFNATRFASVYAWNRKRISNCVADYSVLYNSASFSTFKCYGVSPTKLNDLCFTNVYADSFVIRGDEVRQIAPGQTGKIADYNYKLPDDFTGCVIAWNSNNLDSKVGGNYNYLYRLFRKSNLKPFERDISTEIYQAGSTPCNGVEGFNCYFPLQSYGFQPTNGVGYQPYRVVVLSFELLHAPATVCGPKKSTNLVKNKCVNFNFNGLTGTGVLTESNKKFLPFQQFGRDIADTTDAVRDPQTLEILDITPCSFGGVSVITPGTNTSNQVAVLYQDVNCTEVPVAIHADQLTPTWRVYSTGSNVFQTRAGCLIGAEHVNNSYECDIPIGAGICASYQTQTNSPRRARSVASQSIIAYTMSLGAENSVAYSNNSIACPTNFTISVTTEILPVSMTKTSVDCTMYICGDSTECSNLLLQYGSFCTQLNRALTGIAVEQDKNTQEVFAQVKQIYKTPPIKDFGGFNFSQILPDPSKPSKRSFIEDLLFNKVTLADAGFIKQYGDCLGDIAARDLICAQKFNGLTVLPPLLTDEMIAQYTSALLAGTITSGWTFGAGAALQIPFAMQMAYRFNGIGVTQNVLYENQKLIANQFNSAIGKIQDSLSSTASALGKLQDVVNQNAQALNTLVKQLSSNFGAISSVLNDILSRLDKVEAEVQIDRLITGRLQSLQTYVTQQLIRAAEIRASANLAATKMSECVLGQSKRVDFCGKGYHLMSFPQSAPHGVVFLHVTYVPAQEKNFTTAPAICHDGKAHFPREGVFVSNGTHWFVTQRNFCEPQIITTDNTFVSGNCDVVIGIVNNTVYDPLQPELDSGGGGSDIDPYKEFGSSYQLLNFLPLDFFPDLNALVDTATALYEEELTGREHCSPHHTAIRQALVCWDELTKLIAWMSSNITSEQVRTIIVNHVNDTWGLKVRQSLWFHLSCLTFGQHTVQEFLVSFGVWIRTPAPYRPPNAPILSTLPEHTVIC

SEQ ID NO: 11064 - protein, 1301 aa, Artificial Sequence
  SARS-CoV-2/Guangdong/20SF028/2020__EPI_ISL_403936 spike protein (1-1147)(I714C_Y1110C) WhcAg construct
MFVFLVLLPLVSSQCVNLTTRTQLPPAYTNSFTRGVYYPDKVFRSSVLYSTQDLFLPFFSNVTWFHAIHVSGTNGTKRFDNPVLPFNDGVYFASTEKSNIIRGWIFGTTLDSKTQSLLIVNNATNVVIKVCEFQFCNDPFLGVYYHKNNKSWMESEFRVYSSANNCTFEYVSQPFLMDLEGKQGNFKNLREFVFKNIDGYFKIYSKHTPINLVRDLPQGFSALEPLVDLPIGINITRFQTLLALHRSYLTPGDSSSGWTAGAAAYYVGYLQPRTFLLKYNENGTITDAVDCALDPLSETKCTLKSFTVEKGIYQTSNFRVQPTESIVRFPNITNLCPFGEVFNATRFASVYAWNRKRISNCVADYSVLYNSASFSTFKCYGVSPTKLNDLCFTNVYADSFVIRGDEVRQIAPGQTGKIADYNYKLPDDFTGCVIAWNSNNLDSKVGGNYNYLYRLFRKSNLKPFERDISTEIYQAGSTPCNGVEGFNCYFPLQSYGFQPTNGVGYQPYRVVVLSFELLHAPATVCGPKKSTNLVKNKCVNFNFNGLTGTGVLTESNKKFLPFQQFGRDIADTTDAVRDPQTLEILDITPCSFGGVSVITPGTNTSNQVAVLYQDVNCTEVPVAIHADQLTPTWRVYSTGSNVFQTRAGCLIGAEHVNNSYECDIPIGAGICASYQTQTNSPRRARSVASQSIIAYTMSLGAENSVAYSNNSIACPTNFTISVTTEILPVSMTKTSVDCTMYICGDSTECSNLLLQYGSFCTQLNRALTGIAVEQDKNTQEVFAQVKQIYKTPPIKDFGGFNFSQILPDPSKPSKRSFIEDLLFNKVTLADAGFIKQYGDCLGDIAARDLICAQKFNGLTVLPPLLTDEMIAQYTSALLAGTITSGWTFGAGAALQIPFAMQMAYRFNGIGVTQNVLYENQKLIANQFNSAIGKIQDSLSSTASALGKLQDVVNQNAQALNTLVKQLSSNFGAISSVLNDILSRLDKVEAEVQIDRLITGRLQSLQTYVTQQLIRAAEIRASANLAATKMSECVLGQSKRVDFCGKGYHLMSFPQSAPHGVVFLHVTYVPAQEKNFTTAPAICHDGKAHFPREGVFVSNGTHWFVTQRNFCEPQIITTDNTFVSGNCDVVIGIVNNTVYDPLQPELDSGGGGSDIDPYKEFGSSYQLLNFLPLDFFPDLNALVDTATALYEEELTGREHCSPHHTAIRQALVCWDELTKLIAWMSSNITSEQVRTIIVNHVNDTWGLKVRQSLWFHLSCLTFGQHTVQEFLVSFGVWIRTPAPYRPPNAPILSTLPEHTVIC

SEQ ID NO: 11065 - protein, 1301 aa, Artificial Sequence
  SARS-CoV-2/Shenzhen/SZTH-001/2020__EPI_ISL_406592 spike protein (1-1147)(I714C_Y1110C) WhcAg construct
MFVFLVLLPLVSSQCVNLTTRTQLPPAYTNSFTRGVYYPDKVFRSSVLHSTQDLFLPFFSNVTWFHAIHVSGTNGTKRFDNPVLPFNDGVYFASTEKSNIIRGWIFGTTLDSKTQSLLIVNNATNVVIKVCEFQFCNDPFLGVYYHKNNKSWMESEFRVYSSANNCTFEYVSQPFLMDLEGKQGNFKNLREFVFKNIDGYFKIYSKHTPINLVRDLPQGFSALEPLVDLPIGINITRFQTLLALHRSYLTPGDSSSGWTAGAAAYYVGYLQPRTFLLKYNENGTITDAVDCALDPLSETKCTLKSFTVEKGIYQTSNFRVQPTESIVRFPNITNLCPFGEVFNATRFASVYAWNRKRISNCVADYSVLYNSASFSTFKCYGVSPTKLNDLCFTNVYADSFVIRGDEVRQIAPGQTGKIADYNYKLPDDFTGCVIAWNSNNLDSKVGGNYNYLYRLFRKSNLKPFERDISTEIYQAGSTPCNGVEGFNCYFPLQSYGFQPTNGVGYQPYRVVVLSFELLHAPATVCGPKKSTNLVKNKCVNFNFNGLTGTGVLTESNKKFLPFQQFGRDIADTTDAVRDPQTLEILDITPCSFGGVSVITPGTNTSNQVAVLYQDVNCTEVPVAIHADQLTPTWRVYSTGSNVFQTRAGCLIGAEHVNNSYECDIPIGAGICASYQTQTNSPRRARSVASQSIIAYTMSLGAENSVAYSNNSIACPTNFTISVTTEILPVSMTKTSVDCTMYICGDSTECSNLLLQYGSFCTQLNRALTGIAVEQDKNTQEVFAQVKQIYKTPPIKDFGGFNFSQILPDPSKPSKRSFIEDLLFNKVTLADAGFIKQYGDCLGDIAARDLICAQKFNGLTVLPPLLTDEMIAQYTSALLAGTITSGWTFGAGAALQIPFAMQMAYRFNGIGVTQNVLYENQKLIANQFNSAIGKIQDSLSSTASALGKLQDVVNQNAQALNTLVKQLSSNFGAISSVLNDILSRLDKVEAEVQIDRLITGRLQSLQTYVTQQLIRAAEIRASANLAATKMSECVLGQSKRVDFCGKGYHLMSFPQSAPHGVVFLHVTYVPAQEKNFTTAPAICHDGKAHFPREGVFVSNGTHWFVTQRNFCEPQIITTDNTFVSGNCDVLIGIVNNTVYDPLQPELDSGGGGSDIDPYKEFGSSYQLLNFLPLDFFPDLNALVDTATALYEEELTGREHCSPHHTAIRQALVCWDELTKLIAWMSSNITSEQVRTIIVNHVNDTWGLKVRQSLWFHLSCLTFGQHTVQEFLVSFGVWIRTPAPYRPPNAPILSTLPEHTVIC

SEQ ID NO: 11066 - protein, 1301 aa, Artificial Sequence
  SARS-CoV-2/Shenzhen/SZTH-004/2020__EPI_ISL_406595 spike protein (1-1147)(I714C_Y1110C) WhcAg construct
MFVFLVLLPLVSSQCVNLTTRTQLPPAYTNSFTRGVYYPDKVFRSSVLHSTQDLFLPFFSNVTWFHAIHVSGTNGTKRFDNPVLPFNDGVYFASTEKSNIIRGWIFGTTLDSKTQSLLIVNNATNVVIKVCEFQFCNDPFLGVYYHKNNKSWMESEFRVYSSANNCTFEYVSQPFLMDLEGKQGNFKNLREFVFKNIDGYFKIYSKHTPINLVRDLPQGFSALEPLVDLPIGINITRFQTLLALHRSYLTPGDSSSGWTAGAAAYYVGYLQPRTFLLKYNENGTITDAVDCALDPLSETKCTLKSFTVEKGIYQTSNFRVQPTESIVRFPNITNLCPFGEVFNATRFASVYAWDRKRISNCVAYYSVLYNSASFSTFKCYGVSPTKLNDLCFTNVYADSFVIRGDEVRQIAPGQTGKIADYNYKLPDDFTGCVIAWNSNNLDSKVGGNYNYLYRLFRKSNLKPFERDISTEIYQAGSTPCNGVEGFNCYFPLQSYGFQPTNGVGYQPYRVVVLSFELLHAPATVCGPKKSTNLVKNKCVNFNFNGLTGTGVLTESNKKFLPFQQFGRDIADTTDAVRDPQTLEILDITPCSFGGVSVITPGTNTSNQVAVLYQDVNCTEVPVAIHADQLTPTWRVYSTGSNVFQTRAGCLIGAEHVNNSYECDIPIGAGICASYQTQTNSPRRARSVASQSIIAYTMSLGAENSVAYSNNSIACPTNFTISVTTEILPVSMTKTSVDCTMYICGDSTECSNLLLQYGSFCTQLNRALTGIAVEQDKNTQEVFAQVKQIYKTPPIKDFGGFNFSQILPDPSKPSKRSFIEDLLFNKVTLADAGFIKQYGDCLGDIAARDLICAQKFNGLTVLPPLLTDEMIAQYTSALLAGTITSGWTFGAGAALQIPFAMQMAYRFNGIGVTQNVLYENQKLIANQFNSAIGKIQDSLSSTASALGKLQDVVNQNAQALNTLVKQLSSNFGAISSVLNDILSRLDKVEAEVQIDRLITGRLQSLQTYVTQQLIRAAEIRASANLAATKMSECVLGQSKRVDFCGKGYHLMSFPQSAPHGVVFLHVTYVPAQEKNFTTAPAICHDGKAHFPREGVFVSNGTHWFVTQRNFCEPQIITTDNTFVSGNCDVVIGIVNNTVYDPLQPELDSGGGGSDIDPYKEFGSSYQLLNFLPLDFFPDLNALVDTATALYEEELTGREHCSPHHTAIRQALVCWDELTKLIAWMSSNITSEQVRTIIVNHVNDTWGLKVRQSLWFHLSCLTFGQHTVQEFLVSFGVWIRTPAPYRPPNAPILSTLPEHTVIC

SEQ ID NO: 11067 - protein, 1301 aa, Artificial Sequence
  SARS-CoV-2/France/IDF0372/2020__EPI_ISL_406596 spike protein (1-1147)(I714C_Y1110C) WhcAg construct
MFVFLVLLPLVSSQCVNLTTRTQLPPAYTNSFTRGVYYPDKVFRSSVLHSTQDLFLPFFSNVTWFHAIHVSGTNGTKRFDNPVLPFNDGVYFASTEKSNIIRGWIFGTTLDSKTQSLLIVNNATNVVIKVCEFQFCNDPFLGVYYHKNNKSWMESEFRVYSSANNCTFEYVSQPFLMDLEGKQGNFKNLREFVFKNIDGYFKIYSKHTPINLVRDLPQGFSALEPLVDLPIGINITRFQTLLALHRSYLTPGDSSSGWTAGAAAYYVGYLQPRTFLLKYNENGTITDAVDCALDPLSETKCTLKSFTVEKGIYQTSNFRVQPTESIVRFPNITNLCPFGEVFNATRFASVYAWNRKRISNCVADYSFLYNSASFSTFKCYGVSPTKLNDLCFTNVYADSFVIRGDEVRQIAPGQTGKIADYNYKLPDDFTGCVIAWNSNNLDSKVGGNYNYLYRLFRKSNLKPFERDISTEIYQAGSTPCNGVEGFNCYFPLQSYGFQPTNGVGYQPYRVVVLSFELLHAPATVCGPKKSTNLVKNKCVNFNFNGLTGTGVLTESNKKFLPFQQFGRDIADTTDAVRDPQTLEILDITPCSFGGVSVITPGTNTSNQVAVLYQDVNCTEVPVAIHADQLTPTWRVYSTGSNVFQTRAGCLIGAEHVNNSYECDIPIGAGICASYQTQTNSPRRARSVASQSIIAYTMSLGAENSVAYSNNSIACPTNFTISVTTEILPVSMTKTSVDCTMYICGDSTECSNLLLQYGSFCTQLNRALTGIAVEQDKNTQEVFAQVKQIYKTPPIKDFGGFNFSQILPDPSKPSKRSFIEDLLFNKVTLADAGFIKQYGDCLGDIAARDLICAQKFNGLTVLPPLLTDEMIAQYTSALLAGTITSGWTFGAGAALQIPFAMQMAYRFNGIGVTQNVLYENQKLIANQFNSAIGKIQDSLSSTASALGKLQDVVNQNAQALNTLVKQLSSNFGAISSVLNDILSRLDKVEAEVQIDRLITGRLQSLQTYVTQQLIRAAEIRASANLAATKMSECVLGQSKRVDFCGKGYHLMSFPQSAPHGVVFLHVTYVPAQEKNFTTAPAICHDGKAHFPREGVFVSNGTHWFVTQRNFCEPQIITTDNTFVSGNCDVVIGIVNNTVYDPLQPELDSGGGGSDIDPYKEFGSSYQLLNFLPLDFFPDLNALVDTATALYEEELTGREHCSPHHTAIRQALVCWDELTKLIAWMSSNITSEQVRTIIVNHVNDTWGLKVRQSLWFHLSCLTFGQHTVQEFLVSFGVWIRTPAPYRPPNAPILSTLPEHTVIC

SEQ ID NO: 11068 - protein, 1301 aa, Artificial Sequence
  SARS-CoV-2/Australia/VIC01/2020__EPI_ISL_406844 spike protein (1-1147)(I714C_Y1110C) WhcAg construct
MFVFLVLLPLVSSQCVNLTTRTQLPPAYTNSFTRGVYYPDKVFRSSVLHSTQDLFLPFFSNVTWFHAIHVSGTNGTKRFDNPVLPFNDGVYFASTEKSNIIRGWIFGTTLDSKTQSLLIVNNATNVVIKVCEFQFCNDPFLGVYYHKNNKSWMESEFRVYSSANNCTFEYVSQPFLMDLEGKQGNFKNLREFVFKNIDGYFKIYSKHTPINLVRDLPQGFSALEPLVDLPIGINITRFQTLLALHRRYLTPGDSSSGWTAGAAAYYVGYLQPRTFLLKYNENGTITDAVDCALDPLSETKCTLKSFTVEKGIYQTSNFRVQPTESIVRFPNITNLCPFGEVFNATRFASVYAWNRKRISNCVADYSVLYNSASFSTFKCYGVSPTKLNDLCFTNVYADSFVIRGDEVRQIAPGQTGKIADYNYKLPDDFTGCVIAWNSNNLDSKVGGNYNYLYRLFRKSNLKPFERDISTEIYQAGSTPCNGVEGFNCYFPLQSYGFQPTNGVGYQPYRVVVLSFELLHAPATVCGPKKSTNLVKNKCVNFNFNGLTGTGVLTESNKKFLPFQQFGRDIADTTDAVRDPQTLEILDITPCSFGGVSVITPGTNTSNQVAVLYQDVNCTEVPVAIHADQLTPTWRVYSTGSNVFQTRAGCLIGAEHVNNSYECDIPIGAGICASYQTQTNSPRRARSVASQSIIAYTMSLGAENSVAYSNNSIACPTNFTISVTTEILPVSMTKTSVDCTMYICGDSTECSNLLLQYGSFCTQLNRALTGIAVEQDKNTQEVFAQVKQIYKTPPIKDFGGFNFSQILPDPSKPSKRSFIEDLLFNKVTLADAGFIKQYGDCLGDIAARDLICAQKFNGLTVLPPLLTDEMIAQYTSALLAGTITSGWTFGAGAALQIPFAMQMAYRFNGIGVTQNVLYENQKLIANQFNSAIGKIQDSLSSTASALGKLQDVVNQNAQALNTLVKQLSSNFGAISSVLNDILSRLDKVEAEVQIDRLITGRLQSLQTYVTQQLIRAAEIRASANLAATKMSECVLGQSKRVDFCGKGYHLMSFPQSAPHGVVFLHVTYVPAQEKNFTTAPAICHDGKAHFPREGVFVSNGTHWFVTQRNFCEPQIITTDNTFVSGNCDVVIGIVNNTVYDPLQPELDSGGGGSDIDPYKEFGSSYQLLNFLPLDFFPDLNALVDTATALYEEELTGREHCSPHHTAIRQALVCWDELTKLIAWMSSNITSEQVRTIIVNHVNDTWGLKVRQSLWFHLSCLTFGQHTVQEFLVSFGVWIRTPAPYRPPNAPILSTLPEHTVIC

SEQ ID NO: 11069 - protein, 1301 aa, Artificial Sequence
  SARS-CoV-2/Germany/BavPat1/2020__EPI_ISL_406862 spike protein (1-1147)(I714C_Y1110C) WhcAg construct
MFVFLVLLPLVSSQCVNLTTRTQLPPAYTNSFTRGVYYPDKVFRSSVLHSTQDLFLPFFSNVTWFHAIHVSGTNGTKRFDNPVLPFNDGVYFASTEKSNIIRGWIFGTTLDSKTQSLLIVNNATNVVIKVCEFQFCNDPFLGVYYHKNNKSWMESEFRVYSSANNCTFEYVSQPFLMDLEGKQGNFKNLREFVFKNIDGYFKIYSKHTPINLVRDLPQGFSALEPLVDLPIGINITRFQTLLALHRSYLTPGDSSSGWTAGAAAYYVGYLQPRTFLLKYNENGTITDAVDCALDPLSETKCTLKSFTVEKGIYQTSNFRVQPTESIVRFPNITNLCPFGEVFNATRFASVYAWNRKRISNCVADYSVLYNSASFSTFKCYGVSPTKLNDLCFTNVYADSFVIRGDEVRQIAPGQTGKIADYNYKLPDDFTGCVIAWNSNNLDSKVGGNYNYLYRLFRKSNLKPFERDISTEIYQAGSTPCNGVEGFNCYFPLQSYGFQPTNGVGYQPYRVVVLSFELLHAPATVCGPKKSTNLVKNKCVNFNFNGLTGTGVLTESNKKFLPFQQFGRDIADTTDAVRDPQTLEILDITPCSFGGVSVITPGTNTSNQVAVLYQGVNCTEVPVAIHADQLTPTWRVYSTGSNVFQTRAGCLIGAEHVNNSYECDIPIGAGICASYQTQTNSPRRARSVASQSIIAYTMSLGAENSVAYSNNSIACPTNFTISVTTEILPVSMTKTSVDCTMYICGDSTECSNLLLQYGSFCTQLNRALTGIAVEQDKNTQEVFAQVKQIYKTPPIKDFGGFNFSQILPDPSKPSKRSFIEDLLFNKVTLADAGFIKQYGDCLGDIAARDLICAQKFNGLTVLPPLLTDEMIAQYTSALLAGTITSGWTFGAGAALQIPFAMQMAYRFNGIGVTQNVLYENQKLIANQFNSAIGKIQDSLSSTASALGKLQDVVNQNAQALNTLVKQLSSNFGAISSVLNDILSRLDKVEAEVQIDRLITGRLQSLQTYVTQQLIRAAEIRASANLAATKMSECVLGQSKRVDFCGKGYHLMSFPQSAPHGVVFLHVTYVPAQEKNFTTAPAICHDGKAHFPREGVFVSNGTHWFVTQRNFCEPQIITTDNTFVSGNCDVVIGIVNNTVYDPLQPELDSGGGGSDIDPYKEFGSSYQLLNFLPLDFFPDLNALVDTATALYEEELTGREHCSPHHTAIRQALVCWDELTKLIAWMSSNITSEQVRTIIVNHVNDTWGLKVRQSLWFHLSCLTFGQHTVQEFLVSFGVWIRTPAPYRPPNAPILSTLPEHTVIC

SEQ ID NO: 11070 - protein, 1301 aa, Artificial Sequence
  SARS-CoV-2/Wuhan/HBCDC-HB-02/2020__EPI_ISL_412978 spike protein (1-1147)(I714C_Y1110C) WhcAg construct
MFVFLVLLPLVSSQCVNLTTRTQLPPAYTNSFTRGVYYPDKVFRSSVLHSTQDLFLPFFSNVTWFHAIHVSGTNGTKRFDNPVLPFNDGVYFASTEKSNIIRGWIFGTTLDSKTQSLLIVNNATNVVIKVCEFQFCNDPFLGVYYHKNNKSWMESEFRVYSSANNCTFEYVSQPFLMDLEGKQGNFKNLREFVFKNIDGYFKIYSKHTPINLVRDLPQGFSALEPLVDLPIGINITRFQTLLALHRSYLTPGDSSSGWTAGAAAYYVGYLQPRTFLLKYNENGTITDAVDCALDPLSETKCTLKSFTVEKGIYQTSNFRVQPTESIVRFPNITNLCPFGEVFNATRFASVYAWNRKRISNCVADYSVLYNSASFSTFKCYGVSPTKLNDLCFTNVYADSFVIRGDEVRQIAPGQTGKIADYNYKLPDDFTGCVIAWNSNNLDSKVGGNYNYLYRLFRKSNLKPFERDISTEIYQAGSTPCNGVEGFNCYFPLQSYGFQPTNGVGYQPYRVVVLSFELLHAPATVCGPKKSTNLVKNKCVNFNFNGLTGTGVLTESNKKFLPFQQFGRDIADTTDAVRDPQTLEILDITPCSFGGVSVITPGTNTSNQVAVLYQDVNCTEVPVAIHADQLTPTWRVYSTGSNVFQTRAGCLIGAEHVNNSYECDIPIGAGICASYQTQTNSPRRARSVASQSIIAYTMSLGAENSVAYSNNSIACPTNFTISVTTEILPVSMTKTSVDCTMYICGDSTECSNFLLQYGSFCTQLNRALTGIAVEQDKNTQEVFAQVKQIYKTPPIKDFGGFNFSQILPDPSKPSKRSFIEDLLFNKVTLADAGFIKQYGDCLGDIAARDLICAQKFNGLTVLPPLLTDEMIAQYTSALLAGTITSGWTFGAGAALQIPFAMQMAYRFNGIGVTQNVLYENQKLIANQFNSAIGKIQDSLSSTASALGKLQDVVNQNAQALNTLVKQLSSNFGAISSVLNDILSRLDKVEAEVQIDRLITGRLQSLQTYVTQQLIRAAEIRASANLAATKMSECVLGQSKRVDFCGKGYHLMSFPQSAPHGVVFLHVTYVPAQEKNFTTAPAICHDGKAHFPREGVFVSNGTHWFVTQRNFCEPQIITTDNTFVSGNCDVVIGIVNNTVYDPLQPELDSGGGGSDIDPYKEFGSSYQLLNFLPLDFFPDLNALVDTATALYEEELTGREHCSPHHTAIRQALVCWDELTKLIAWMSSNITSEQVRTIIVNHVNDTWGLKVRQSLWFHLSCLTFGQHTVQEFLVSFGVWIRTPAPYRPPNAPILSTLPEHTVIC

SEQ ID NO: 11071 - protein, 1301 aa, Artificial Sequence
  SARS-CoV-2/Australia/QLD02/2020__EPI_ISL_407896 spike protein (1-1147)(I714C_Y1110C) WhcAg construct
MFVFLVLLPLVSSQCVNLTTRTQLPPAYTNSFTRGVYYPDKVFRSSVLHSTQDLFLPFFSNVTWFHAIHVSGTNGTKRFDNPVLPFNDGVYFASTEKSNIIRGWIFGTTLDSKTQSLLIVNNATNVVIKVCEFQFCNDPFLGVYYHKNNKSWMESEFRVYSSANNCTFEYVSQPFLMDLEGKQGNFKNLREFVFKNIDGYFKIYSKHTPINLVRDLPQGFSALEPLVDLPIGINITRFQTLLALHRSYLTPGDSSSGWTAGAAAYYVGYLQPRTFLLKYNENGTITDAVDCALDPLSETKCTLKSFTVEKGIYQTSNFRVQPTESIVRFPNITNLCPFGEVFNATRFASVYAWNRKRISNCVADYSVLYNSASFSTFKCYGVSPTKLNDLCFTNVYADSFVIRGDEVRQIAPGQTGKIADYNYKLPDDFTGCVIAWNSNNLDSKVGGNYNYLYRLFRKSNLKPFERDISTEIYQAGSTPCNGVEGFNCYFPLQSYGFQPTNGVGYQPYRVVVLSFELLHAPATVCGPKKSTNLVKNKCVNFNFNGLTGTGVLTESNKKFLPFQQFGRDIADTTDAVRDPQTLEILDITPCSFGGVSVITPGTNTSNQVAVLYQDVNCTEVPVAIHADQLTPTWRVYSTGSNVFQTRAGCLIGAEHVNNSYECDIPIGAGICASYQTQTNSPRRARSVASQSIIAYTMSLGAENSVAYSNNSIACPTNFTISVTTEILPVSMTKTSVDCTMYICGDSTECSNLLLQYGSFCTQLNRALTGIAVEQDKNTQEVFAQVKQIYKTPPIKDFGGFNFSQILPDPSKPSKRSFIEDLLFNKVTLADAGFIKQYGDCLGDIAARDLICAQKFNGLTVLPPLLTDEMIAQYTSALLAGTITSGWTFGAGAALQIPFAMQMAYRFNGIGVTQNVLYENQKLIANQFNSAIGKIQDSLSSTASALGKLQDVVNQNAQALNTLVKQLSSNFGAISSVLNDILSRLDKVEAEVQIDRLITGRLQSLQTYVTQQLIRAAEIRASANLAATKMSECVLGQSKRVDFCGKGYHLMSFPQSAPHGVVFLHVTYVPAQEKNFTTAPAICHDGKAHFPREGVFVSNGTHWFVTQRNFCEPQIITTDNTFVSGNCDVVIGIVNNTVYDPLQLELDSGGGGSDIDPYKEFGSSYQLLNFLPLDFFPDLNALVDTATALYEEELTGREHCSPHHTAIRQALVCWDELTKLIAWMSSNITSEQVRTIIVNHVNDTWGLKVRQSLWFHLSCLTFGQHTVQEFLVSFGVWIRTPAPYRPPNAPILSTLPEHTVIC

SEQ ID NO: 11072 - protein, 1301 aa, Artificial Sequence
  SARS-CoV-2/India/1-31/2020__EPI_ISL_413523 spike protein (1-1147)(I714C_Y1110C) WhcAg construct
MFVFLVLLPLVSSQCVNLTTRTQLPPAYTNSFTRGVYYPDKVFRSSVLHSTQDLFLPFFSNVTWFHAIHVSGTNGTKRFDNPVLPFNDGVYFASTEKSNIIRGWIFGTTLDSKTQSLLIVNNATNVVIKVCEFQFCNDPFLGVYYHKNNKSWMESEFRVYSSANNCTFEYVSQPFLMDLEGKQGNFKNLREFVFKNIDGYFKIYSKHTPINLVRDLPQGFSALEPLVDLPIGINITRFQTLLALHRSYLTPGDSSSGWTAGAAAYYVGYLQPRTFLLKYNENGTITDAVDCALDPLSETKCTLKSFTVEKGIYQTSNFRVQPTESIVRFPNITNLCPFGEVFNATRFASVYAWNRKRISNCVADYSVLYNSASFSTFKCYGVSPTKLNDLCFTNVYADSFVIRGDEVRQIAPGQTGKIADYNYKLPDDFTGCVIAWNSNNLDSKVGGNYNYLYRLFRKSNLKPFERDISTEIYQAGSTPCNGVEGFNCYFPLQSYGFQPTNGVGYQPYRVVVLSFELLHAPATVCGPKKSTNLVKNKCVNFNFNGLTGTGVLTESNKKFLPFQQFGRDIADTTDAVRDPQTLEILDITPCSFGGVSVITPGTNTSNQVAVLYQDVNCTEVPVAIHADQLTPTWRVYSTGSNVFQTRAGCLIGAEHVNNSYECDIPIGAGICASYQTQTNSPRRARSVASQSIIAYTMSLGAENSVAYSNNSIACPTNFTISVTTEILPVSMTKTSVDCTMYICGDSTECSNLLLQYGSFCTQLNRALTGIAVEQDKNTQEVFAQVKQIYKTPPIKDFGGFNFSQILPDPSKPSKRSFIEDLLFNKVTLADAGFIKQYGDCLGDIAARDLICAQKFNGLTVLPPLLTDEMIAQYTSALLAGTITSGWTFGAGAALQIPFAMQMAYRFNGIGVTQNVLYENQKLIANQFNSVIGKIQDSLSSTASALGKLQDVVNQNAQALNTLVKQLSSNFGAISSVLNDILSRLDKVEAEVQIDRLITGRLQSLQTYVTQQLIRAAEIRASANLAATKMSECVLGQSKRVDFCGKGYHLMSFPQSAPHGVVFLHVTYVPAQEKNFTTAPAICHDGKAHFPREGVFVSNGTHWFVTQRNFCEPQIITTDNTFVSGNCDVVIGIVNNTVYDPLQPELDSGGGGSDIDPYKEFGSSYQLLNFLPLDFFPDLNALVDTATALYEEELTGREHCSPHHTAIRQALVCWDELTKLIAWMSSNITSEQVRTIIVNHVNDTWGLKVRQSLWFHLSCLTFGQHTVQEFLVSFGVWIRTPAPYRPPNAPILSTLPEHTVIC

SEQ ID NO: 11073 - protein, 1301 aa, Artificial Sequence
  SARS-CoV-2/Guangdong/GD2020087-P0008/2020__EPI_ISL_413863 spike protein (1-1147)(I714C_Y1110C) WhcAg construct
MFVFLVLLPLVSSQCVNLTTRTQLPPAYTNSFTRGVYYPDKVFRSSVLHSTQDLFLPFFSNVTWFHAIHVSGTNGTKRFDNPVLPFNDGVYFASTEKSNIIRGWIFGTTLDSKTQSLLIVNNATNVVIKVCEFQFCNDPFLGVYYHKNNKSWMESEFRVYSSANNCTFEYVSQPFLMDLEGKQGNFKNLREFVFKNIDGYFKIYSKHTPINLVRDLPQGFSALEPLVDLPIGINITRFQTLLALHRSYLTPGDSSSGWTAGAAAYYVGYLQPRTFLLKYNENGTITDAVDCALDPLSETKCTLKSFTVEKGIYQTSNFRVQPTESIVRFPNITNLCPFGEVFNATRFASVYAWNRKRISNCVADYSVLYNSASFSTFKCYGVSPTKLNDLCFTNVYADSFVIRGDEVREIAPGQTGKIADYNYKLPDDFTGCVIAWNSNNLDSKVGGNYNYLYRLFRKSNLKPFERDISTEIYQAGSTPCNGVEGFNCYFPLQSYGFQPTNGVGYQPYRVVVLSFELLHAPATVCGPKKSTNLVKNKCVNFNFNGLTGTGVLTESNKKFLPFQQFGRDIADTTDAVRDPQTLEILDITPCSFGGVSVITPGTNTSNQVAVLYQDVNCTEVPVAIHADQLTPTWRVYSTGSNVFQTRAGCLIGAEHVNNSYECDIPIGAGICASYQTQTNSPRRARSVASQSIIAYTMSLGAENSVAYSNNSIACPTNFTISVTTEILPVSMTKTSVDCTMYICGDSTECSNLLLQYGSFCTQLNRALTGIAVEQDKNTQEVFAQVKQIYKTPPIKDFGGFNFSQILPDPSKPSKRSFIEDLLFNKVTLADAGFIKQYGDCLGDIAARDLICAQKFNGLTVLPPLLTDEMIAQYTSALLAGTITSGWTFGAGAALQIPFAMQMAYRFNGIGVTQNVLYENQKLIANQFNSAIGKIQDSLSSTASALGKLQDVVNQNAQALNTLVKQLSSNFGAISSVLNDILSRLDKVEAEVQIDRLITGRLQSLQTYVTQQLIRAAEIRASANLAATKMSECVLGQSKRVDFCGKGYHLMSFPQSAPHGVVFLHVTYVPAQEKNFTTAPAICHDGKAHFPREGVFVSNGTHWFVTQRNFCEPQIITTDNTFVSGNCDVVIGIVNNTVYDPLQPELDSGGGGSDIDPYKEFGSSYQLLNFLPLDFFPDLNALVDTATALYEEELTGREHCSPHHTAIRQALVCWDELTKLIAWMSSNITSEQVRTIIVNHVNDTWGLKVRQSLWFHLSCLTFGQHTVQEFLVSFGVWIRTPAPYRPPNAPILSTLPEHTVIC

SEQ ID NO: 11074 - protein, 1301 aa, Artificial Sequence
  SARS-CoV-2/Sweden/01/2020__EPI_ISL_411951 spike protein (1-1147)(I714C_Y1110C) WhcAg construct
MFVFLVLLPLVSSQCVNLTTRTQLPPAYTNSFTRGVYYPDKVFRSSVLHSTQDLFLPFFSNVTWFHAIHVSGTNGTKRFDNPVLPFNDGVYFASTEKSNIIRGWIFGTTLDSKTQSLLIVNNATNVVIKVCEFQFCNDPFLGVYYHKNNKSWMESEFRVYSSANNCTFEYVSQPFLMDLEGKQGNFKNLREFVFKNIDGYFKIYSKHTPINLVRDLPQGFSALEPLVDLPIGINITRFQTLLALHRSYLTPGDSSSGWTAGAAAYYVGYLQPRTFLLKYNENGTITDAVDCALDPLSETKCTLKSFTVEKGIYQTSNFRVQPTESIVRFPNITNLCPFGEVFNATRFASVYAWNRKRISNCVADYSVLYNSASFSTFKCYGVSPTKLNDLCFTNVYADSFVIRGDEVRQIAPGQTGKIADYNYKLPDDFTGCVIAWNSNNLDSKVGGNYNYLYRLFRKSNLKPFERDISTEIYQAGSTPCNGVEGFNCYFPLQSYGFQPTNGVGYQPYRVVVLSFELLHAPATVCGPKKSTNLVKNKCVNFNFNGLTGTGVLTESNKKFLPFQQFGRDIADTTDAVRDPQTLEILDITPCSFGGVSVITPGTNTSNQVAVLYQDVNCTEVPVAIHADQLTPTWRVYSTGSNVFQTRAGCLIGAEHVNNSYECDIPIGAGICASYQTQTNSPRRARSVASQSIIAYTMSLGAENSVAYSNNSIACPTNFTISVTTEILPVSMTKTSVDCTMYICGDSTECSNLLLQYGSFCTQLNRALTGIAVEQDKNTQEVFAQVKQIYKTPPIKDCGGFNFSQILPDPSKPSKRSFIEDLLFNKVTLADAGFIKQYGDCLGDIAARDLICAQKFNGLTVLPPLLTDEMIAQYTSALLAGTITSGWTFGAGAALQIPFAMQMAYRFNGIGVTQNVLYENQKLIANQFNSAIGKIQDSLSSTASALGKLQDVVNQNAQALNTLVKQLSSNFGAISSVLNDILSRLDKVEAEVQIDRLITGRLQSLQTYVTQQLIRAAEIRASANLAATKMSECVLGQSKRVDFCGKGYHLMSFPQSAPHGVVFLHVTYVPAQEKNFTTAPAICHDGKAHFPREGVFVSNGTHWFVTQRNFCEPQIITTDNTFVSGNCDVVIGIVNNTVYDPLQPELDSGGGGSDIDPYKEFGSSYQLLNFLPLDFFPDLNALVDTATALYEEELTGREHCSPHHTAIRQALVCWDELTKLIAWMSSNITSEQVRTIIVNHVNDTWGLKVRQSLWFHLSCLTFGQHTVQEFLVSFGVWIRTPAPYRPPNAPILSTLPEHTVIC

SEQ ID NO: 11075 - protein, 1301 aa, Artificial Sequence
  SARS-CoV-2/Tianmen/HBCDC-HB-07/2020__EPI_ISL_412983 spike protein (1-1147)(I714C_Y1110C) WhcAg construct
MFVFLVLLPLVSSQCVNLTTRTQLPPAYTNSFTRGVYYPDKVFRSSVLHSTQDLFLPFFSNVTWFHAIHVSGTNGTKRFDNPVLPFNDGVYFASTEKSNIIRGWIFGTTLDSKTQSLLIVNNATNVVIKVCEFQFCNDPFLGVYYHKNNKSWMESEFRVYSSANNCTFEYVSQPFLMDLEGKQGNFKNLREFVFKNIDGYFKIYSKHTPINLVRDLPQGFSALEPLVDLPIGINITRFQTLLALHRSYLTPGDSSSGWTAGAAAYYVGYLQPRTFLLKYNENGTITDAVDCALDPLSETKCTLKSFTVEKGIYQTSNFRVQPTESIVRFPNITNLCPFGEVFNATRFASVYAWNRKRISNCVADYSVLYNSASFSTFKCYGVSPTKLNDLCFTNVYADSFVIRGDEVRQIAPGQTGKIADYNYKLPDDFTGCVIAWNSNNLDSKVGGNYNYLYRLFRKSNLKPFERDISTEIYQAGSTPCNGVEGFNCYFPLQSYGFQPTNGVGYQPYRVVVLSFELLHAPATVCGPKKSTNLVKNKCVNFNFNGLTGTGVLTESNKKFLPFQQFGRDIADTTDAVRDPQTLEILDITPCSFGGVSVITPGTNTSNQVAVLYQDLNCTEVPVAIHADQLTPTWRVYSTGSNVFQTRAGCLIGAEHVNNSYECDIPIGAGICASYQTQTNSPRRARSVASQSIIAYTMSLGAENSVAYSNNSIACPTNFTISVTTEILPVSMTKTSVDCTMYICGDSTECSNLLLQYGSFCTQLNRALTGIAVEQDKNTQEVFAQVKQIYKTPPIKDFGGFNFSQILPDPSKPSKRSFIEDLLFNKVTLADAGFIKQYGDCLGDIAARDLICAQKFNGLTVLPPLLTDEMIAQYTSALLAGTITSGWTFGAGAALQIPFAMQMAYRFNGIGVTQNVLYENQKLIANQFNSAIGKIQDSLSSTASALGKLQDVVNQNAQALNTLVKQLSSNFGAISSVLNDILSRLDKVEAEVQIDRLITGRLQSLQTYVTQQLIRAAEIRASANLAATKMSECVLGQSKRVDFCGKGYHLMSFPQSAPHGVVFLHVTYVPAQEKNFTTAPAICHDGKAHFPREGVFVSNGTHWFVTQRNFCEPQIITTDNTFVSGNCDVVIGIVNNTVYDPLQPELDSGGGGSDIDPYKEFGSSYQLLNFLPLDFFPDLNALVDTATALYEEELTGREHCSPHHTAIRQALVCWDELTKLIAWMSSNITSEQVRTIIVNHVNDTWGLKVRQSLWFHLSCLTFGQHTVQEFLVSFGVWIRTPAPYRPPNAPILSTLPEHTVIC

SEQ ID NO: 11076 - protein, 1301 aa, Artificial Sequence
  SARS-CoV-2/Hong Kong/case42_VM20002493/2020__EPI_ISL_414527 spike protein (1-1147)(I714C_Y1110C) WhcAg construct
MFVFLVLLPLVSSQCVNLTTRTQLPPAYTNSFTRGVYYPDKVFRSSVLHSTQDLFLPFFSNVTWFHAIHVSGTNGTKRFDNPVLPFNDGVYFASTEKSNIIRGWIFGTTLDSKTQSLLIVNNATNVVIKVCEFQFCNDPFLGVYYHKNNKSWMESEFRVYSSANNCTFEYVSQPFLMDLEGKQGNFKNLREFVFKNIDGYFKIYSKHTPINLVRDLPQGFSALEPLVDLPIGINITRFQTLLALHRSYLTPGDSSSGWTAGAAAYYVGYLQPRTFLLKYNENGTITDAVDCALDPLSETKCTLKSFTVEKGIYQTSNFRVQPTESIVRFPNITNLCPFGEVFNATRFASVYAWNRKRISNCVADYSVLYNSASFSTFKCYGVSPTKLNDLCFTNVYADSFVIRGDEVRQIAPGQTGKIADYNYKLPDDFTGCVIAWNSNNLDSKVGGNYNYLYRLFRKSNLKPFERDISTEIYQAGSTPCNGVEGFNCYFPLQSYGFQPTNGVGYQPYRVVVLSFELLHAPATVCGPKKSTNLVKNKCVNFNFNGLTGTGVLTESNKKFLPFQQFGRDIADTTDAVRDPQTLEILDITPCSFGGVSVITPGTNTSNQVAVLYQDVNCTEVPVAIHADQLTPTWRVYSTGSNVFQTRAGCLIGAEHVNNSYECDIPIGAGICASYQTQTNSPRRARSVASQSIIAYTMSLGAENSVAYSNNSIACPTNFAISVTTEILPVSMTKTSVDCTMYICGDSTECSNLLLQYGSFCTQLNRALTGIAVEQDKNTQEVFAQVKQIYKTPPIKDFGGFNFSQILPDPSKPSKRSFIEDLLFNKVTLADAGFIKQYGDCLGDIAARDLICAQKFNGLTVLPPLLTDEMIAQYTSALLAGTITSGWTFGAGAALQIPFAMQMAYRFNGIGVTQNVLYENQKLIANQFNSAIGKIQDSLSSTASALGKLQDVVNQNAQALNTLVKQLSSNFGAISSVLNDILSRLDKVEAEVQIDRLITGRLQSLQTYVTQQLIRAAEIRASANLAATKMSECVLGQSKRVDFCGKGYHLMSFPQSAPHGVVFLHVTYVPAQEKNFTTAPAICHDGKAHFPREGVFVSNGTHWFVTQRNFCEPQIITTDNTFVSGNCDVVIGIVNNTVYDPLQPELDSGGGGSDIDPYKEFGSSYQLLNFLPLDFFPDLNALVDTATALYEEELTGREHCSPHHTAIRQALVCWDELTKLIAWMSSNITSEQVRTIIVNHVNDTWGLKVRQSLWFHLSCLTFGQHTVQEFLVSFGVWIRTPAPYRPPNAPILSTLPEHTVIC

SEQ ID NO: 11077 - protein, 1301 aa, Artificial Sequence
  SARS-CoV-2/USA/CruiseA-23/2020__EPI_ISL_414482 spike protein (1-1147)(I714C_Y1110C) WhcAg construct
MFVFLVLLPLVSSQCVNLTTRTQLPPAYTNSFTRGVYYPDKVFRSSVLHSTQDLFLPFFSNVTWFHAIHVSGTNGTKRFDNPVLPFNDGVYFASTEKSNIIRGWIFGTTLDSKTQSLLIVNNATNVVIKVCEFQFCNDPFLGVYYHKNNKSWMESEFRVYSSANNCTFEYVSQPFLMDLEVKQGNFKNLREFVFKNIDGYFKIYSKHTPINLVRDLPQGFSALEPLVDLPIGINITRFQTLLALHRSYLTPGDSSSGWTAGAAAYYVGYLQPRTFLLKYNENGTITDAVDCALDPLSETKCTLKSFTVEKGIYQTSNFRVQPTESIVRFPNITNLCPFGEVFNATRFASVYAWNRKRISNCVADYSVLYNSASFSTFKCYGVSPTKLNDLCFTNVYADSFVIRGDEVRQIAPGQTGKIADYNYKLPDDFTGCVIAWNSNNLDSKVGGNYNYLYRLFRKSNLKPFERDISTEIYQAGSTPCNGVEGFNCYFPLQSYGFQPTNGVGYQPYRVVVLSFELLHAPATVCGPKKSTNLVKNKCVNFNFNGLTGTGVLTESNKKFLPFQQFGRDIADTTDAVRDPQTLEILDITPCSFGGVSVITPGTNTSNQVAVLYQDVNCTEVPVAIHADQLTPTWRVYSTGSNVFQTRAGCLIGAEHVNNSYECDIPIGAGICASYQTQTNSPRRARSVASQSIIAYTMSLGAENSVAYSNNSIACPTNFTISVTTEILPVSMTKTSVDCTMYICGDSTECSNLLLQYGSFCTQLNRALTGIAVEQDKNTQEVFAQVKQIYKTPPIKDFGGFNFSQILPDPSKPSKRSFIEDLLFNKVTLADAGFIKQYGDCLGDIAARDLICAQKFNGLTVLPPLLTDEMIAQYTSALLAGTITSGWTFGAGAALQIPFAMQMAYRFNGIGVTQNVLYENQKLIANQFNSAIGKIQDSLSSTASALGKLQDVVNQNAQALNTLVKQLSSNFGAISSVLNDILSRLDKVEAEVQIDRLITGRLQSLQTYVTQQLIRAAEIRASANLAATKMSECVLGQSKRVDFCGKGYHLMSFPQSAPHGVVFLHVTYVPAQEKNFTTAPAICHDGKAHFPREGVFVSNGTHWFVTQRNFCEPQIITTDNTFVSGNCDVVIGIVNNTVYDPLQPELDSGGGGSDIDPYKEFGSSYQLLNFLPLDFFPDLNALVDTATALYEEELTGREHCSPHHTAIRQALVCWDELTKLIAWMSSNITSEQVRTIIVNHVNDTWGLKVRQSLWFHLSCLTFGQHTVQEFLVSFGVWIRTPAPYRPPNAPILSTLPEHTVIC

SEQ ID NO: 11078 - protein, 1301 aa, Artificial Sequence
  SARS-CoV-2/Hong Kong/case85_VM20002868/2020__EPI_ISL_414519 spike protein (1-1147)(I714C_Y1110C) WhcAg construct
MFVFLVLVPLVSSQCVNLTTRTQLPPAYTNSFTRGVYYPDKVFRSSVLHSTQDLFLPFFSNVTWFHAIHVSGTNGTKRFDNPVLPFNDGVYFASTEKSNIIRGWIFGTTLDSKTQSLLIVNNATNVVIKVCEFQFCNDPFLGVYYHKNNKSWMESEFRVYSSANNCTFEYVSQPFLMDLEGKQGNFKNLREFVFKNIDGYFKIYSKHTPINLVRDLPQGFSALEPLVDLPIGINITRFQTLLALHRSYLTPGDSSSGWTAGAAAYYVGYLQPRTFLLKYNENGTITDAVDCALDPLSETKCTLKSFTVEKGIYQTSNFRVQPTESIVRFPNITNLCPFGEVFNATRFASVYAWNRKRISNCVADYSVLYNSASFSTFKCYGVSPTKLNDLCFTNVYADSFVIRGDEVRQIAPGQTGKIADYNYKLPDDFTGCVIAWNSNNLDSKVGGNYNYLYRLFRKSNLKPFERDISTEIYQAGSTPCNGVEGFNCYFPLQSYGFQPTNGVGYQPYRVVVLSFELLHAPATVCGPKKSTNLVKNKCVNFNFNGLTGTGVLTESNKKFLPFQQFGRDIADTTDAVRDPQTLEILDITPCSFGGVSVITPGTNTSNQVAVLYQDVNCTEVPVAIHADQLTPTWRVYSTGSNVFQTRAGCLIGAEHVNNSYECDIPIGAGICASYQTQTNSPRRARSVASQSIIAYTMSLGAENSVAYSNNSIACPTNFTISVTTEILPVSMTKTSVDCTMYICGDSTECSNLLLQYGSFCTQLNRALTGIAVEQDKNTQEVFAQVKQIYKTPPIKDFGGFNFSQILPDPSKPSKRSFIEDLLFNKVTLADAGFIKQYGDCLGDIAARDLICAQKFNGLTVLPPLLTDEMIAQYTSALLAGTITSGWTFGAGAALQIPFAMQMAYRFNGIGVTQNVLYENQKLIANQFNSAIGKIQDSLSSTASALGKLQDVVNQNAQALNTLVKQLSSNFGAISSVLNDILSRLDKVEAEVQIDRLITGRLQSLQTYVTQQLIRAAEIRASANLAATKMSECVLGQSKRVDFCGKGYHLMSFPQSAPHGVVFLHVTYVPAQEKNFTTAPAICHDGKAHFPREGVFVSNGTHWFVTQRNFCEPQIITTDNTFVSGNCDVVIGIVNNTVYDPLQPELDSGGGGSDIDPYKEFGSSYQLLNFLPLDFFPDLNALVDTATALYEEELTGREHCSPHHTAIRQALVCWDELTKLIAWMSSNITSEQVRTIIVNHVNDTWGLKVRQSLWFHLSCLTFGQHTVQEFLVSFGVWIRTPAPYRPPNAPILSTLPEHTVIC

SEQ ID NO: 11079 - protein, 1301 aa, Artificial Sequence; identical to SEQ ID NO: 11069
  SARS-CoV-2/England/200990660/2020__EPI_ISL_414523 spike protein (1-1147)(I714C_Y1110C) WhcAg construct

SEQ ID NO: 11080 - protein, 1301 aa, Artificial Sequence
  SARS-CoV-2/Australia/NSW09/2020__EPI_ISL_413595 spike protein (1-1147)(I714C_Y1110C) WhcAg construct
MFVFLVLLPLVSSQCVNLTTRTQLPPAYTNSFTRGVYYPDKVFRSSVLHSTQDLFLPFFSNVTWFHAIHVSGTNGTKRFDNPVLPFNDGVYFASTEKSNIIRGWIFGTTLDSKTQSLLIVNNATNVVIKVCEFQFCNDPFLGVYYHKNNKSWMESEFRVYSSANNCTFEYVSQPFLMDLEGKQGNFKNLREFVFKNIDGYFKIYSKHTPINLVRDLPQGFSALEPLVDLPIGINITRFQTLLALHRSYLTPGDSSSGWTAGAAAYYVGYLQPRTFLLKYNENGTITDAVDCALDPLSETKCTLKSFTVEKGIYQTSNFRVQPTESIVRFPNITNLCPFGEVFNATRFASVYAWNRKRISNCVADYSVLYNSASFSTFKCYGVSPTKLNDLCFTNVYADSFVIRGDEVRQIAPGQTGKIADYNYKLPDDFTGCVIAWNSNNLDSKVGGNYNYLYRLFRKSNLKPFERDISTEIYQAGSTPCNGVEGFNCYFPLQSYGFQPTNGVGYQPYRVVVLSFELLHAPATVCGPKKSTNLVKNKCVNFNFNGLTGTGVLTESNKKFLPFQQFGRDIADTTDAVRDPQTLEILDITPCSFGGVSVITPGTNTSNQVAVLYQDVNCTEVPVAIHADQLTPTWRVYSTGSNVFQTRAGCLIGAEHVNNSYECDIPIGAGICASYQTQTNSPRRARSVASQSIIAYTMSLGAENSVAYSNNSIACPTNFTISVTTEILPVSMTKTSVDCTMYICGDSTECSNLLLQYGSFCTQLNRALTGIAVEQDKNTQEVFAQVKQIYKTPPIKDFGGFNFSQILPDPSKPSKRSFIEDLLFNKVTLADAGFIKQYGDCLGDIAARDLICAQKFNGLTVLPPLLTDEMIAQYTSALLAGTITSGWTFGAGAALQIPFAMQMAYRFNGIGVTQNVLYENQKLIANQFNSAIGKIQDSLSFTASALGKLQDVVNQNAQALNTLVKQLSSNFGAISSVLNDILSRLDKVEAEVQIDRLITGRLQSLQTYVTQQLIRAAEIRASANLAATKMSECVLGQSKRVDFCGKGYHLMSFPQSAPHGVVFLHVTYVPAQEKNFTTAPAICHDGKAHFPREGVFVSNGTHWFVTQRNFCEPQIITTDNTFVSGNCDVVIGIVNNTVYDPLQPELDSGGGGSDIDPYKEFGSSYQLLNFLPLDFFPDLNALVDTATALYEEELTGREHCSPHHTAIRQALVCWDELTKLIAWMSSNITSEQVRTIIVNHVNDTWGLKVRQSLWFHLSCLTFGQHTVQEFLVSFGVWIRTPAPYRPPNAPILSTLPEHTVIC

SEQ ID NO: 11081 - protein, 1301 aa, Artificial Sequence; identical to SEQ ID NO: 11061
  SARS-CoV-2/Australia/NSW10/2020__EPI_ISL_413596 spike protein (1-1147)(I714C_Y1110C) WhcAg construct

SEQ ID NO: 11082 - protein, 1301 aa, Artificial Sequence
  SARS-CoV-2/Switzerland/1000477797/2020__EPI_ISL_413023 spike protein (1-1147)(I714C_Y1110C) WhcAg construct
MFVFLVLLPLVSSQCVNLTTRTQLPPAYTNSFTRGVYYPDKVFRSSVLHSTQDLFLPFFSNVTWFHAIHVSGTNGTKRFDNPVLPFNDGVYFASTEKSNIIRGWIFGTTLDSKTQSLLIVNNATNVVIKVCEFQFCNDPFLGVYYHKNNKSWMESEFRVYSSANNCTFEYVSQPFLMDLEGKQGNFKNLREFVFKNIDGYFNIYSKHTPINLVRDLPQGFSALEPLVDLPIGINITRFQTLLALHRSYLTPGDSSSGWTAGAAAYYVGYLQPRTFLLKYNENGTITDAVDCALDPLSETKCTLKSFTVEKGIYQTSNFRVQPTESIVRFPNITNLCPFGEVFNATRFASVYAWNRKRISNCVADYSVLYNSASFSTFKCYGVSPTKLNDLCFTNVYADSFVIRGDEVRQIAPGQTGKIADYNYKLPDDFTGCVIAWNSNNLDSKVGGNYNYLYRLFRKSNLKPFERDISTEIYQAGSTPCNGVEGFNCYFPLQSYGFQPTNGVGYQPYRVVVLSFELLHAPATVCGPKKSTNLVKNKCVNFNFNGLTGTGVLTESNKKFLPFQQFGRDIADTTDAVRDPQTLEILDITPCSFGGVSVITPGTNTSNQVAVLYQGVNCTEVPVAIHADQLTPTWRVYSTGSNVFQTRAGCLIGAEHVNNSYECDIPIGAGICASYQTQTNSPRRARSVASQSIIAYTMSLGAENSVAYSNNSIACPTNFTISVTTEILPVSMTKTSVDCTMYICGDSTECSNLLLQYGSFCTQLNRALTGIAVEQDKNTQEVFAQVKQIYKTPPIKDFGGFNFSQILPDPSKPSKRSFIEDLLFNKVTLADAGFIKQYGDCLGDIAARDLICAQKFNGLTVLPPLLTDEMIAQYTSALLAGTITSGWTFGAGAALQIPFAMQMAYRFNGIGVTQNVLYENQKLIANQFNSAIGKIQDSLSSTASALGKLQDVVNQNAQALNTLVKQLSSNFGAISSVLNDILSRLDKVEAEVQIDRLITGRLQSLQTYVTQQLIRAAEIRASANLAATKMSECVLGQSKRVDFCGKGYHLMSFPQSAPHGVVFLHVTYVPAQEKNFTTAPAICHDGKAHFPREGVFVSNGTHWFVTQRNFCEPQIITTDNTFVSGNCDVVIGIVNNTVYDPLQPELDSGGGGSDIDPYKEFGSSYQLLNFLPLDFFPDLNALVDTATALYEEELTGREHCSPHHTAIRQALVCWDELTKLIAWMSSNITSEQVRTIIVNHVNDTWGLKVRQSLWFHLSCLTFGQHTVQEFLVSFGVWIRTPAPYRPPNAPILSTLPEHTVIC

SEQ ID NO: 11083 - protein, 1301 aa, Artificial Sequence
  SARS-CoV-2/Belgium/BA-02291/2020__EPI_ISL_415159 spike protein (1-1147)(I714C_Y1110C) WhcAg construct
MFVFLVLLPLVSSQCVNLTTRTQLPPAYTNSFTRGVYYPDKVFRSSVLHSTQDLFLPFFSNVTWFHAIHVSGTNGTKRFDNPVLPFNDGVYFASTEKSNIIRGWIFGTTLDSKTQSLLIVNNATNVVIKVCEFQFCNDPFLGVYYHKNNKSWMESEFRVYSSANNCTFEYVSQPFLMDLEGKQGNFKNLREFVFKNIDGYFKIYSKHTPINLVRDLPQGFSALEPLVDLPIGINITRFQTLLALHRSYLTPGDSSSGWTAGAAAYYVGYLQPRTFLLKYNENGTITDAVDCALDPLSETKCTLKSFTVEKGIYQTSNFRVQPTESIVRFPNITNLCPFGEVFNATRFASVYAWNRKRISNCVADYSVLYNSASFSTFKCYGVSPTKLNDLCFTNVYADSFVIRGDEVRQIAPGQTGKIADYNYKLPDDFTGCVIAWNSNNLDSKVGGNYNYLYRLFRRSNLKPFERDISTEIYQAGSTPCNGVEGFNCYFPLQSYGFQPTNGVGYQPYRVVVLSFELLPAPATVCGPKKSTNLVKNKCVNFNFNGLTGTGVLTESNKKFLPFQQFGRDIADTTDAVRDPQTLEILDITPCSFGGVSVITPGTNTSNQVAVLYQGVNCTEVPVAIHADQLTPTWRVYSTGSNVFQTRAGCLIGAEHVNNSYECDIPIGAGICASYQTQTNSPRRARSVASQSIIAYTMSLGAENSVAYSNNSIACPTNFTISVTTEILPVSMTKTSVDCTMYICGDSTECSNLLLQYGSFCTQLNRALTGIAVEQDKNTQEVFAQVKQIYKTPPIKDFGGFNFSQILPDPSKPSKRSFIEDLLFNKVTLADAGFIKQYGDCLGDIAARDLICAQKFNGLTVLPPLLTDEMIAQYTSALLAGTITSGWTFGAGAALQIPFAMQMAYRFNGIGVTQNVLYENQKLIANQFNSAIGKIQDSLSSAAPALGKLQDVVNQNAQALNTLVKQLSSNFGAISSVLNDILSRLDKVEAEVQIDRLITGRLQSLQTYVTQQLIRAAEIRASANLAATKMSECVLGQSKRVDFCGKGYHLMSFPQSAPHGVVFLHVTYVPAQEKNFTTAPAICHDGKAHFPREGVFVSNGTHWFVTQRNFCEPQIITTDNTFVSGNCDVVIGIVNNTVYDPLQPELDSGGGGSDIDPYKEFGSSYQLLNFLPLDFFPDLNALVDTATALYEEELTGREHCSPHHTAIRQALVCWDELTKLIAWMSSNITSEQVRTIIVNHVNDTWGLKVRQSLWFHLSCLTFGQHTVQEFLVSFGVWIRTPAPYRPPNAPILSTLPEHTVIC

SEQ ID NO: 11084 - protein, 1301 aa, Artificial Sequence
  SARS-CoV-2/USA/WA8-UW5/2020__EPI_ISL_413486 spike protein (1-1147)(I714C_Y1110C) WhcAg construct
MFVFLVLLPLVSSQCVNLTTRTQLPPAYTNSFTRGVYYPDKVFRSSVLHSTQDLFLPFFSNVTWFHAIHVSGTNGTKRFDNPVLPFNDGVYFASTEKSNIIRGWIFGTTLDSKTQSLLIVNNATNVVIKVCEFQFCNDPFLGVYYHKNNKSWMESEFRVYSSANNCTFEYVSQPFLMDLEGKQGNFKNLREFVFKNIDGYFKIYSKHTPINLVRDLPQGFSALEPLVDLPIGINITRFQTLLALHRSYLTPGDSSSGWTAGAAAYYVGYLQPRTFLLKYNENGTITDAVDCALDPLSETKCTLKSFTVEKGIYQTSNFRVQPTESIVRFPNITNLCPFGEVFNATRFASVYAWNRKRISNCVADYSVLYNSASFSTFKCYGVSPTKLNDLCFTNVYADSFVIRGDEVRQIAPGQTGKIADYNYKLPDDFTGCVIAWNSNNLDSKVGGNYNYLYRLFRKSNLKPFERDISTEIYQAGSTPCNGVEGFNCYFPLQSYGFQPTNGVGYQPYRVVVLSFELLHAPATVCGPKKSTNLVKNKCVNFNFNGLTGTGVLTESNKKFLPFQQFGRDIADTTDAVRDPQTLEILDITPCSFGGVSVITPGTNTSNQVAVLYQDVNCTEVPVAIHADQLTPTWRVYSTGSNVFQTRAGCLIGAEYVNNSYECDIPIGAGICASYQTQTNSPRRARSVASQSIIAYTMSLGAENSVAYSNNSIACPTNFTISVTTEILPVSMTKTSVDCTMYICGDSTECSNLLLQYGSFCTQLNRALTGIAVEQDKNTQEVFAQVKQIYKTPPIKDFGGFNFSQILPDPSKPSKRSFIEDLLFNKVTLADAGFIKQYGDCLGDIAARDLICAQKFNGLTVLPPLLTDEMIAQYTSALLAGTITSGWTFGAGAALQIPFAMQMAYRFNGIGVTQNVLYENQKLIANQFNSAIGKIQDSLSSTASALGKLQDVVNQNAQALNTLVKQLSSNFGAISSVLNDILSRLDKVEAEVQIDRLITGRLQSLQTYVTQQLIRAAEIRASANLAATKMSECVLGQSKRVDFCGKGYHLMSFPQSAPHGVVFLHVTYVPAQEKNFTTAPAICHDGKAHFPREGVFVSNGTHWFVTQRNFCEPQIITTDNTFVSGNCDVVIGIVNNTVYDPLQPELDSGGGGSDIDPYKEFGSSYQLLNFLPLDFFPDLNALVDTATALYEEELTGREHCSPHHTAIRQALVCWDELTKLIAWMSSNITSEQVRTIIVNHVNDTWGLKVRQSLWFHLSCLTFGQHTVQEFLVSFGVWIRTPAPYRPPNAPILSTLPEHTVIC

SEQ ID NO: 11085 - protein, 1301 aa, Artificial Sequence
  SARS-CoV-2/England/20102000506/2020__EPI_ISL_415147 spike protein (1-1147)(I714C_Y1110C) WhcAg construct
MFVFLVLLPLVSSQCVNLTTRTQLPPAYTNSFTRGVYYPDKVFRSSVLHSTQDLFLPFFSNVTWFHAIHVSGTNGTKRFDNPVLPFNDGVYFASTEKSNIIRGWIFGTTLDSKTQSLLIVNNATNVVIKVCEFQFCNDPFLGVYYHKNNKSWMESEFRVYSSANNCTFEYVSQPFLMDLEGKQGNFKNLREFVFKNIDGYFKIYSKHTPINLVRDLPQGFSALEPLVDLPIGINITRFQTLLALHRSYLTPGDSSSGWTAGAAAYYVGYLQPRTFLLKYNENGTITDAVDCALDPLSETKCTLKSFTVEKGIYQTSNFRVQPTESIVRFPNITNLCPFGEVFNATRFASVYAWNRKRISNCVADYSVLYNSASFSTFKCYGVSPTKLNDLCFTNVYADSFVIRGDEVRQIAPGQTGKIADYNYKLPDDFTGCVIAWNSNNLDSKVGGNYNYLYRLFRKSNLKPFERDISTEIYQAGSTPCNGVEGFNCYFPLQSYGFQPTNGVGYQPYRVVVLSFELLHAPATVCGPKKSTNLVKNKCVNFNFNGLTGTGVLTESNKKFLPFQQFGRDIADTTDAVRDPQTLEILDITPCSFGGVSVITPGTNTSNQVAVLYQGVNCTEVPVAIHADQLTPTWRVYSTGSNVFQTRAGCLIGAEHVNNSYECDIPIGAGICASYQTQTNSPRRARSVASQSIIAYTMSLGAENSVAYSNNSIACPTNFTISVTTEILPVSMTKTSVDCTMYICGDSTECSNLLLQYGSFCTQLNRALTGIAVEQDKNTQEVFAQVKQIYKTPPIKDFGGFNFSQILPDPSKPSKRSFIEDLLFNKVTLADAGFIKQYGYCLGDIAARDLICAQKFNGLTVLPPLLTDEMIAQYTSALLAGTITSGWTFGAGAALQIPFAMQMAYRFNGIGVTQNVLYENQKLIANQFNSAIGKIQDSLSSTASALGKLQDVVNQNAQALNTLVKQLSSNFGAISSVLNDILSRLDKVEAEVQIDRLITGRLQSLQTYVTQQLIRAAEIRASANLAATKMSECVLGQSKRVDFCGKGYHLMSFPQSAPHGVVFLHVTYVPAQEKNFTTAPAICHDGKAHFPREGVFVSNGTHWFVTQRNFCEPQIITTDNTFVSGNCDVVIGIVNNTVYDPLQPELDSGGGGSDIDPYKEFGSSYQLLNFLPLDFFPDLNALVDTATALYEEELTGREHCSPHHTAIRQALVCWDELTKLIAWMSSNITSEQVRTIIVNHVNDTWGLKVRQSLWFHLSCLTFGQHTVQEFLVSFGVWIRTPAPYRPPNAPILSTLPEHTVIC

SEQ ID NO: 11086 - protein, 1301 aa, Artificial Sequence
  SARS-CoV-2/Belgium/VAG-03013/2020__EPI_ISL_415155 spike protein (1-1147)(I714C_Y1110C) WhcAg construct
MFVFLVLLPLVSSQCVNLTTRTQLPPAYTNSFTRGVYYPDKVFRSSVLHSTQDLFLPFFSNVTWFHAIHVSGTNGTKRFDNPVLPFNDGVYFASTEKSNIIRGWIFGTTLDSKTQSLLIVNNATNVVIKVCEFQFCNDPFLGVYYHKNNKSWMESEFRVYSSANNCTFEYVSQPFLMDLEGKQGNFKNLREFVFKNIDGYFKIYSKHTPINLVRDLPQGFSALEPLVDLPIGINITRFQTLLALHRSYLTPGDSSSGWTAGAAAYYVGYLQPRTFLLKYNENGTITDAVDCALDPLSETKCTLKSFTVEKGIYQTSNFRVQPTESIVRFPNITNLCPFGEVFNATRFASVYAWNRKRISNCVADYSVLYNSASFSTFKCYGVSPTKLNDLCFTNVYADSFVIRGDEVRQIAPGQTGKIADYNYKLPDDFTGCVIAWNSNNLDSKVGGNYNYLYRLFRKSNLKPFERDISTEIYQAGSTPCNGVEGFNCYFPLQSYGFQPTNGVGYQPYRVVVLSFELLHAPATVCGPKKSTNLVKNKCVNFNFNGLTGTGVLTESNKKFLPFQQFGRDIADTTDAVRDPQTLEILDITPCSFGGVSVITPGTNTSNQVAVLYQGVNCTEVPVAIHADQLTPTWRVYSTGSNVFQTRAGCLIGAEHVNNSYECDIPIGAGICASYQTQTNSPRRARSVASQSIIAYTMSLGAENSVAYSNNSIACPTNFTISVTTEILPVSMTKTSVDCTMYICGDSTECSNLLLQYGSFCTQLNRALTGIAVEQDKNTQEVFAQVKQIYKTPPIKDFGGFNFSQILPDPSKPSKRSFIEDLLFNKVTLADAGFIKQYGDCLGDIAARDLICAQKFNGLTVLPPLLTDEMIAQYTSALLAGTITSGWTFGAGAALQIPFAMQMAYRFNGIGVTQNVLYENQKLIANQFNSAIGKIQDSLSSTATALGKLQDVVNQNAQALNTLVKQLSSNFGAISSVLNDILSRLDKVEAEVQIDRLITGRLQSLQTYVTQQLIRAAEIRASANLAATKMSECVLGQSKRVDFCGKGYHLMSFPQSAPHGVVFLHVTYVPAQEKNFTTAPAICHDGKAHFPREGVFVSNGTHWFVTQRNFCEPQIITTDNTFVSGNCDVVIGIVNNTVYDPLQPELDSGGGGSDIDPYKEFGSSYQLLNFLPLDFFPDLNALVDTATALYEEELTGREHCSPHHTAIRQALVCWDELTKLIAWMSSNITSEQVRTIIVNHVNDTWGLKVRQSLWFHLSCLTFGQHTVQEFLVSFGVWIRTPAPYRPPNAPILSTLPEHTVIC

SEQ ID NO: 11087 - protein, 1301 aa, Artificial Sequence
  SARS-CoV-2/Belgium/BC-03016/2020__EPI_ISL_415157 spike protein (1-1147)(I714C_Y1110C) WhcAg construct
MFVFLVLLPLVSSQCVNLTTRTQLPPAYTNSFTRGVYYPDKVFRSSVLHSTQDLFLPFFSNVTWFHAIHVSGTNGTKRFDNPVLPFNDGVYFASTEKSNIIRGWIFGTTLDSKTQSLLIVNNATNVVIKVCEFQFCNDPFLGVYYHKNNKSWMESEFRVYSSANNCTFEYVSQPFLMDLEGKQGNFKNLREFVFKNIDGYFKIYSKHTPINLVRDLPQGFSALEPLVDLPIGINITRFQTLLALHRSYLTPGDSSSGWTAGAAAYYVGYLQPRTFLLKYNENGTITDAVDCALDPLSETKCTLKSFTVEKGIYQTSNFRVQPTESIVRFPNITNLCPFGEVFNATRFASVYAWNRKRISNCVADYSVLYNSASFSTFKCYGVSPTKLNDLCFTNVYADSFVIRGDEVRQIAPGQTGKIADYNYKLPDDFTGCVIAWNSNNLDSKVGGNYNYLYRLFRKSNLKPFERDISTEIYQAGSTPCNGVEGFNCYFPLQSYGFQPTNGVGYQPYRVVVLSFELLHAPATVCGPKKSTNLVKNKCVNFNFNGLTGTGVLTESNKKFLPFQQFGRDIADTTDAVRDPQTLEILDITPCSFGGVSVITPGTNTSNQVAVLYQGVNCTEVPVAIHADQLTPTWRVYSTGSNVFQTRAGCLIGAEHVNNSYECDIPIGAGICASYQTQTNSPRRARSVASQSIIAYTMSLGAENSVAYSNNSIACPTNFTISVTTEILPVSMTKTSVDCTMYICGDSTECSNLLLQYGSFCTQLNRALTGIAVEQDKNTQEVFAQVKQIYKTPPIKDFGGFNFSQILPDPSKPSKRSFIEDLLFNKVTLADAGFIKQYGDCLGDIAARDLICAQKFNGLTVLPPLLTDEMIAQYTSALLAGTITSGWTFGAGAALQIPFAMQMAYRFNGIGVTQNVLYENQKLIANQFNSAIGKIQDSLSSTAPALGKLQDVVNQNAQALNTLVKQLSSNFGAISSVLNDILSRLDKVEAEVQIDRLITGRLQSLQTYVTQQLIRAAEIRASANLAATKMSECVLGQSKRVDFCGKGYHLMSFPQSAPHGVVFLHVTYVPAQEKNFTTAPAICHDGKAHFPREGVFVSNGTHWFVTQRNFCEPQIITTDNTFVSGNCDVVIGIVNNTVYDPLQPELDSGGGGSDIDPYKEFGSSYQLLNFLPLDFFPDLNALVDTATALYEEELTGREHCSPHHTAIRQALVCWDELTKLIAWMSSNITSEQVRTIIVNHVNDTWGLKVRQSLWFHLSCLTFGQHTVQEFLVSFGVWIRTPAPYRPPNAPILSTLPEHTVIC

SEQ ID NO: 11088 - protein, 1301 aa, Artificial Sequence
  SARS-CoV-2/Germany/BavPat3/2020__EPI_ISL_414521 spike protein (1-1147)(I714C_Y1110C) WhcAg construct
MFVFLVLLPLVSSQCVNLTTRTQLPPAYTNSFTRGVYYPDKVFRSSVLHSTQDLFLPFFSNVTWFHAIHVSGTNGTKRFDNPVLPFNDGVYFASTEKSNIIRGWIFGTTLDSKTQSLLIVNNATNVVIKVCEFQFCNDPFLGVYYHKNNKSWMESEFRVYSSANNCTFEYVSQPFLMDLEGKQGNFKNLREFVFKNIDGYFKIYSKHTPINLVRDLPQGFSALEPLVDLPIGINITRFQTLLALHRSYLTPGDSSSGWTAGAAAYYVGYLQPRTFLLKYNENGTITDAVDCALDPLSETKCTLKSFTVEKGIYQTSNFRVQPTESIVRFPNITNLCPFGEVFNATRFASVYAWNRKRISNCVADYSVLYNSASFSTFKCYGVSPTKLNDLCFTNVYADSFVIRGDEVRQIAPGQTGKIADYNYKLPDDFTGCVIAWNSNNLDSKVGGNYNYLYRLFRKSNLKPFERDISTEIYQAGSTPCNGVEGFNCYFPLQSYGFQPTNGVGYQPYRVVVLSFELLHAPATVCGPKKSTNLVKNKCVNFNFNGLTGTGVLTESNKKFLPFQQFGRDIADTTDAVRDPQTLEILDITPCSFGGVSVITPGTNTSNQVAVLYQDVNCTEVPVAIHADQLTPTWRVYSTGSNVFQTRAGCLIGAEHVNNSYECDIPIGAGICASYQTQTNSPRRARSVASQSIIAYTMSLGAENSVAYSNNSIACPTNFTISVTTEILPVSMTKTSVDCTMYICGDSTECSNLLLQYGSFCTQLNRALTGIAVEQDKNTQQVFAQVKQIYKTPPIKDFGGFNFSQILPDPSKPSKRSFIEDLLFNKVTLADAGFIKQYGDCLGDIAARDLICAQKFNGLTVLPPLLTDEMIAQYTSALLAGTITSGWTFGAGAALQIPFAMQMAYRFNGIGVTQNVLYENQKLIANQFNSAIGKIQDSLSSTASALGKLQDVVNQNAQALNTLVKQLSSNFGAISSVLNDILSRLDKVEAEVQIDRLITGRLQSLQTYVTQQLIRAAEIRASANLAATKMSECVLGQSKRVDFCGKGYHLMSFPQSAPHGVVFLHVTYVPAQEKNFTTAPAICHDGKAHFPREGVFVSNGTHWFVTQRNFCEPQIITTDNTFVSGNCDVVIGIVNNTVYDPLQPELDSGGGGSDIDPYKEFGSSYQLLNFLPLDFFPDLNALVDTATALYEEELTGREHCSPHHTAIRQALVCWDELTKLIAWMSSNITSEQVRTIIVNHVNDTWGLKVRQSLWFHLSCLTFGQHTVQEFLVSFGVWIRTPAPYRPPNAPILSTLPEHTVIC

SEQ ID NO: 11089 - protein, 1301 aa, Artificial Sequence
  SARS-CoV-2/France/HF1805/2020__EPI_ISL_414628 spike protein (1-1147)(I714C_Y1110C) WhcAg construct
MFVFLVLLPLVSSQCVNLTTRTQLPPAYTNSFTRGVYYPDKVFRSSVLHSTQDLFLPFFSNVTWFHAIHVSGTNGTKRFDNPVLPFNDGVYFASTEKSNIIRGWIFGTTLDSKTQSLLIVNNATNVVIKVCEFQFCNDPFLGVYYHKNNKSWMESEFRVYSSANNCTFEYVSQPFLMDLEGKQGNFKNLREFVFKNIDGYFKIYSKHTPINLVRDLPQGFSALEPLVDLPIGINITRFQTLLALHRSYLTPGDSSSGWTAGAAAYYVGYLQPRTFLLKYNENGTITDAVDCALDPLSETKCTLKSFTVEKGIYQTSNFRVQPTESIVRFPNITNLCPFGEVFNATRFASVYAWNRKRISNCVADYSVLYNSASFSTFKCYGVSPTKLNDLCFTNVYADSFVIRGDEVRQIAPGQTGKIADYNYKLPDDFTGCVIAWNSNNLDSKVGGNYNYLYRLFRKSNLKPFERDISTEIYQAGSTPCNGVEGFNCYFPLQSYGFQPTNGVGYQPYRVVVLSFELLHAPATVCGPKKSTNLVKNKCVNFNFNGLTGTGVLTESNKKFLPFQQFGRDIADTTDAVRDPQTLEILDITPCSFGGVSVITPGTNTSNQVAVLYQGVNCTEVPVAIHADQLTPTWRVYSTGSNVFQTRAGCLIGAEHVNNSYECDIPIGAGICASYQTQTNSPRRARSVASQSIIAYTMSLGAENSVAYSNNSIACPTNFTISVTTEILPVSMTKTSVDCTMYICGDSTECSNLLLQYGSFCTQLNRALTGIAVEQDKNTQEVFAQVKQIYKTPPIKDFGGFNFSQILPDPSKPSKRSFIEDLLFNKVTLADAGFIKQYGDCLGDIAARDLICAQKFNGLTVLPPLLTDEMIAQYTSALLAGTITSGWTFGAGAALQIPFAMQMAYRFNGIGVTQNVLYENQKLIANQFNSAIGKIQDSLSSTASALGKLQDVVNQNAQALNTLVKQLSSNFGAISSVLNDILSRLDKVEAEVQIDRLITGRLQSLQTYVTQQLIRAAEIRASANLAATKMSECVLGQSKRVDFCGKGYHLMSFPQSAPHGVVFLHVTYVPAQEKNFTTAPAICHDGKAHFPREGVFVSNGTHWFVTQRNFCEPQIITTDNTFVSGNCDVVIGVVNNTVYDPLQPELDSGGGGSDIDPYKEFGSSYQLLNFLPLDFFPDLNALVDTATALYEEELTGREHCSPHHTAIRQALVCWDELTKLIAWMSSNITSEQVRTIIVNHVNDTWGLKVRQSLWFHLSCLTFGQHTVQEFLVSFGVWIRTPAPYRPPNAPILSTLPEHTVIC

SEQ ID NO: 11090 - protein, 1301 aa, Artificial Sequence
  SARS-CoV-2/Netherlands/ZuidHolland_9/2020__EPI_ISL_414445 spike protein (1-1147)(I714C_Y1110C) WhcAg construct
MFVFLVLLPLVSSQCVNLTTRTQLPPAYTNSFTRGVYYPDKVFRSSVLHSTQDLFLPFFSNVTWFHAIHVSGTNGTKRFDNPVLPFNDGVYFASTEKSNIIRGWIFGTTLDSKTQSLLIVNNATNVVIKVCEFQFCNDPFLGVYYHKNNKSWMESEFRVYSSANNCTFEYVSQPFLMDLEGKQGNFKNLREFVFKNIDGYFKIYSKHTPINLVRDLPQGFSALEPLVDLPIGINITRFQTLLALHRSYLTPGDSSSGWTAGAAAYYVGYLQPRTFLLKYNENGTITDAVDCALDPLSETKCTLKSFTVEKGIYQTSNFRVQPTESIVRFPNITNLCPFGEVFNATRFASVYAWNRKRISNCVADYSVLYNSASFSTFKCYGVSPTKLNDLCFTNVYADSFVIRGDEVRQIAPGQTGKIADYNYKLPDDFTGCVIAWNSNNLDSKVGGNYNYLYRLFRKSNLKPFERDISTEIYQAGSTPCNGVEGFNCYFPLQSYGFQPTNGVGYQPYRVVVLSFELLHAPATVCGPKKSTNLVKNKCVNFNFNGLTGTGVLTESNKKFLPFQQFGRDIADTTDAVRDPQTLEILDITPCSFGGVSVITPGTNTSNQVAVLYQGVNCTEVPVAIHADQLTPTWRVYSTGSNVFQTRAGCLIGAEHVNNSYECDIPIGAGICASYQTQTNSPRRARSVASQSIIAYTMSLGAENSVAYSNNSIACPTNFTISVTTEILPVSMTKTSVDCTMYICGDSTECSNLLLQYGSFCTQLNRALTGIAVEQDKNTQEVFAQVKQIYKTPPIKDFGGFNFSQILPDPSKPSKRSFIEDLLFNKVTLADAGFIKQYGDCLGDIAARDLICVQKFNGLTVLPPLLTDEMIAQYTSALLAGTITSGWTFGAGAALQIPFAMQMAYRFNGIGVTQNVLYENQKLIANQFNSAIGKIQDSLSSTASALGKLQDVVNQNAQALNTLVKQLSSNFGAISSVLNDILSRLDKVEAEVQIDRLITGRLQSLQTYVTQQLIRAAEIRASANLAATKMSECVLGQSKRVDFCGKGYHLMSFPQSAPHGVVFLHVTYVPAQEKNFTTAPAICHDGKAHFPREGVFVSNGTHWFVTQRNFCEPQIITTDNTFVSGNCDVVIGIVNNTVYDPLQPELDSGGGGSDIDPYKEFGSSYQLLNFLPLDFFPDLNALVDTATALYEEELTGREHCSPHHTAIRQALVCWDELTKLIAWMSSNITSEQVRTIIVNHVNDTWGLKVRQSLWFHLSCLTFGQHTVQEFLVSFGVWIRTPAPYRPPNAPILSTLPEHTVIC

SEQ ID NO: 11091 - protein, 1301 aa, Artificial Sequence
  SARS-CoV-2/Finland/FIN03032020A/2020__EPI_ISL_413602 spike protein (1-1147)(I714C_Y1110C) WhcAg construct
MFVFLVLLPLVSSQCVNLTTRTQLPPAYTNSFTRGVYYPDKVFRSSVLHSTQDLFLPFFSNVTWFHAIHVSGTNGTKRFDNPVLPFNDGVYFASTEKSNIIRGWIFGTTLDSKTQSLLIVNNATNVVIKVCEFQFCNDPFLGVYYHKNNKSWMESEFRVYSSANNCTFEYVSQPFLMDLEGKQGNFKNLREFVFKNIDGYFKIYSKHTPINLVRDLPQGFSALEPLVDLPIGINITRFQTLLALHRSYLTPGDSSSGWTAGAAAYYVGYLQPRTFLLKYNENGTITDAVDCALDPLSETKCTLKSFTVEKGIYQTSNFRVQPTESIVRFPNITNLCPFGEVFNATRFASVYAWNRKRISNCVADYSVLYNSASFSTFKCYGVSPTKLNDLCFTNVYADSFVIRGDEVRQIAPGQTGKIADYNYKLPDDFTGCVISWNSNNLDSKVGGNYNYLYRLFRKSNLKPFERDISTEIYQAGSTPCNGVEGFNCYFPLQSYGFQPTNGVGYQPYRVVVLSFELLHAPATVCGPKKSTNLVKNKCVNFNFNGLTGTGVLTESNKKFLPFQQFGRDIADTTDAVRDPQTLEILDITPCSFGGVSVITPGTNTSNQVAVLYQGVNCTEVPVAIHADQLTPTWRVYSTGSNVFQTRAGCLIGAEHVNNSYECDIPIGAGICASYQTQTNSPRRARSVASQSIIAYTMSLGAENSVAYSNNSIACPTNFTISVTTEILPVSMTKTSVDCTMYICGDSTECSNLLLQYGSFCTQLNRALTGIAVEQDKNTQEVFAQVKQIYKTPPIKDFGGFNFSQILPDPSKPSKRSFIEDLLFNKVTLADAGFIKQYGDCLGDIAARDLICAQKFNGLTVLPPLLTDEMIAQYTSALLAGTITSGWTFGAGAALQIPFAMQMAYRFNGIGVTQNVLYENQKLIANQFNSAIGKIQDSLSSTASALGKLQDVVNQNAQALNTLVKQLSSNFGAISSVLNDILSRLDKVEAEVQIDRLITGRLQSLQTYVTQQLIRAAEIRASANLAATKMSECVLGQSKRVDFCGKGYHLMSFPQSAPHGVVFLHVTYVPAQEKNFTTAPAICHDGKAHFPREGVFVSNGTHWFVTQRNFCEPQIITTDNTFVSGNCDVVIGIVNNTVYDPLQPELDSGGGGSDIDPYKEFGSSYQLLNFLPLDFFPDLNALVDTATALYEEELTGREHCSPHHTAIRQALVCWDELTKLIAWMSSNITSEQVRTIIVNHVNDTWGLKVRQSLWFHLSCLTFGQHTVQEFLVSFGVWIRTPAPYRPPNAPILSTLPEHTVIC

SEQ ID NO: 11092 - protein, 1301 aa, Artificial Sequence
  SARS-CoV-2/France/GE1977/2020__EPI_ISL_414632 spike protein (1-1147)(I714C_Y1110C) WhcAg construct
MFVFLVLLPLVSSQCVNLTTRTQLPPAYTNSFTRGVYYPDKVFRSSVLHSTQDLFLPFFSNVTWFHAIHVSGTNGTKRFDNPVLPFNDGVYFASTEKSNIIRGWIFGTTLDSKTQSLLIVNNATNVVIKVCEFQFCNDPFLGVYYHKNNKSWMESEFRVYSSANNCTFEYVSQPFLMDLEGKQGNFKNLREFVFKNIDGYFKIYSKHTPINLVRDLPQGFSALEPLVDLPIGINITRFQTLLALHRSYLTPGDSSSGWTAGAAAYYVGYLQPRTFLLKYNENGTITDAVDCALDPLSETKCTLKSFTVEKGIYQTSNFRVQPTESIVRFPNITNLCPFGEVFNATRFASVYAWNRKRISNCVADYSVLYNSASFSTFKCYGVSPTKLNDLCFTNVYADSFVIRGDEVRQIAPGQTGKIADYNYKLPDDFTGCVIAWNSNNLDSKVGGNYNYLYRLFRKSNLKPFERDISTEIYQAGSTPCNGVEGFNCYFPLQSYGFQPTNGVGYQPYRVVVLSFELLHAPATVCGPKKSTNLVKNKCVNFNFNGLTGTGVLTESNKKFLPFQQFGRDIADTTDAVRDPQTLEILDITPCSFGGVSVITPGTNTSNQVAVLYQGVNCTEVPVAIHADQLTPTWRVYSTGSNVFQTRAGCLIGAEHVNNSYECDIPIGAGICASYQTQTNSPRRARSVASQSIIAYTMSLGAENSVAYSNNSIACPTNFTISVTTEILPVSMTKTSVDCTMYICGDSTECSNLLLQYGSFCTQLNRALTGIAVEQDKNTQEVFAQVKQIYKTPPIKDFGGFNFSQILPDPSKPSKRSFIEDLLFNKVTLADAGFIKQYGDCLGDIAARDLICAQKFNGLTVLPPLLTDEMIAQYTSALLAGTITSGWTFGAGAALQIPFAMQMAYRFNGIGVTQNVLYENQKLIANQFNSAIGKIQDSLFSTASALGKLQDVVNQNAQALNTLVKQLSSNFGAISSVLNDILSRLDKVEAEVQIDRLITGRLQSLQTYVTQQLIRAAEIRASANLAATKMSECVLGQSKRVDFCGKGYHLMSFPQSAPHGVVFLHVTYVPAQEKNFTTAPAICHDGKAHFPREGVFVSNGTHWFVTQRNFCEPQIITTDNTFVSGNCDVVIGIVNNTVYDPLQPELDSGGGGSDIDPYKEFGSSYQLLNFLPLDFFPDLNALVDTATALYEEELTGREHCSPHHTAIRQALVCWDELTKLIAWMSSNITSEQVRTIIVNHVNDTWGLKVRQSLWFHLSCLTFGQHTVQEFLVSFGVWIRTPAPYRPPNAPILSTLPEHTVIC

SEQ ID NO: 11093 - protein, 1301 aa, Artificial Sequence
  SARS-CoV-2/Finland/FIN-313/2020__EPI_ISL_414641 spike protein (1-1147)(I714C_Y1110C) WhcAg construct
MFVFLVLLPLVSSQCVNLTTRTQLPPAYTNSFTRGVYYPDKVFRSSVLHSTQDLFLPFFSNVTWFHAIHVSGTNGTKRFDNPVLPFNDGVYFASTEKSNIIRGWIFGTTLDSKTQSLLIVNNATNVVIKVCEFQFCNDPFLGVYYHKNNKSWMESEFRVYSSANNCTFEYVSQPFLMDLEGKQGNFKNLREFVFKNIDGYFKIYSKHTPINLVRDLPQGFSALEPLVDLPIGINITRFKTLLALHRSYLTPGDSSSGWTAGAAAYYVGYLQPRTFLLKYNENGTITDAVDCALDPLSETKCTLKSFTVEKGIYQTSNFRVQPTESIVRFPNITNLCPFGEVFNATRFASVYAWNRKRISNCVADYSVLYNSASFSTFKCYGVSPTKLNDLCFTNVYADSFVIRGDEVRQIAPGQTGKIADYNYKLPDDFTGCVIAWNSNNLDSKVGGNYNYLYRLFRKSNLKPFERDISTEIYQAGSTPCNGVEGFNCYFPLQSYGFQPTNGVGYQPYRVVVLSFELLHAPATVCGPKKSTNLVKNKCVNFNFNGLTGTGVLTESNKKFLPFQQFGRDIADTTDAVRDPQTLEILDITPCSFGGVSVITPGTNTSNQVAVLYQGVNCTEVPVAIHADQLTPTWRVYSTGSNVFQTRAGCLIGAEHVNNSYECDIPIGAGICASYQTQTNSPRRARSVASQSIIAYTMSLGAENSVAYSNNSIACPTNFTISVTTEILPVSMTKTSVDCTMYICGDSTECSNLLLQYGSFCTQLNRALTGIAVEQDKNTQEVFAQVKQIYKTPPIKDFGGFNFSQILPDPSKPSKRSFIEDLLFNKVTLADAGFIKQYGDCLGDIAARDLICAQKFNGLTVLPPLLTDEMIAQYTSALLAGTITSGWTFGAGAALQIPFAMQMAYRFNGIGVTQNVLYENQKLIANQFNSAIGKIQDSLSSTASALGKLQDVVNQNAQALNTLVKQLSSNFGAISSVLNDILSRLDKVEAEVQIDRLITGRLQSLQTYVTQQLIRAAEIRASANLAATKMSECVLGQSKRVDFCGKGYHLMSFPQSAPHGVVFLHVTYVPAQEKNFTTAPAICHDGKAHFPREGVFVSNGTHWFVTQRNFCEPQIITTDNTFVSGNCDVVIGIVNNTVYDPLQPELDSGGGGSDIDPYKEFGSSYQLLNFLPLDFFPDLNALVDTATALYEEELTGREHCSPHHTAIRQALVCWDELTKLIAWMSSNITSEQVRTIIVNHVNDTWGLKVRQSLWFHLSCLTFGQHTVQEFLVSFGVWIRTPAPYRPPNAPILSTLPEHTVIC

SEQ ID NO: 11094 - protein, 1301 aa, Artificial Sequence
  SARS-CoV-2/Netherlands/ZuidHolland_2/2020__EPI_ISL_414556 spike protein (1-1147)(I714C_Y1110C) WhcAg construct
MFVFLVLLPLVSSQCVNLTTRTQLPPAYTNSFTRGVYYPDKVFRSSVLHSTQDLFLPFFSNVTWFHAIHVSGTNGTKRFDNPVLPFNDGVYFASTEKSNIIRGWIFGTTLDSKTQSLLIVNNATNVVIKVCEFQFCNDPFLGVYYHKNNKSWMESEFRVYSSANNCTFEYVSQPFLMDLEGKQGNFKNLREFVFKNIDGYFKIYSKHTPINLVRDLPQGFSALEPLVDLPIGINITRFQTLLALHRSYLTPGDSSSGWTAGAAAYYVGYLQPRTFLLKYNENGTITDAVDCALDPLSETKCTLKSFTVEKGIYQTSNFRVQPTESIVRFPNITNLCPFGEVFNATRFASVYAWNRKRISNCVADYSVLYNSASFSTFKCYGVSPTKLNDLCFTNVYADSFVIRGDEVRQIAPGQTGKIADYNYKLPDDFTGCVIAWNSNNLDSKVGGNYNYLYRLFRKSNLKPFERDISTEIYQAGSTPCNGVEGFNCYFPLQSYGFQPTNGVGYQPYRVVVLSFELLHAPATVCGPKKSTNLVKNKCVNFNFNGLTGTGVLTESNKKFLPFQQFGRDIADTTDAVRDPQTLEILDITPCSFGGVSVITPGTNTSNQVAVLYQGVNCTEVPVAIHADQLTPTWRVYSTGSNVFQTRAGCLIGAEHVNNSYECDIPIGAGICASYQTQTNSPRRARSVASQSIIAYTMSLGAENSVAYSNNSIACPTNFTISVTTEILPVSMTKTSVDCTMYICGDSTECSNLLLQYGSFCTQLNRALTGIALEQDKNTQEVFAQVKQIYKTPPIKDFGGFNFSQILPDPSKPSKRSFIEDLLFNKVTLADAGFIKQYGDCLGDIAARDLICAQKFNGLTVLPPLLTDEMIAQYTSALLAGTITSGWTFGAGAALQIPFAMQMAYRFNGIGVTQNVLYENQKLIANQFNSAIGKIQDSLSSTASALGKLQDVVNQNAQALNTLVKQLSSNFGAISSVLNDILSRLDKVEAEVQIDRLITGRLQSLQTYVTQQLIRAAEIRASANLAATKMSECVLGQSKRVDFCGKGYHLMSFPQSAPHGVVFLHVTYVPAQEKNFTTAPAICHDGKAHFPREGVFVSNGTHWFVTQRNFCEPQIITTDNTFVSGNCDVVIGIVNNTVYDPLQPELDSGGGGSDIDPYKEFGSSYQLLNFLPLDFFPDLNALVDTATALYEEELTGREHCSPHHTAIRQALVCWDELTKLIAWMSSNITSEQVRTIIVNHVNDTWGLKVRQSLWFHLSCLTFGQHTVQEFLVSFGVWIRTPAPYRPPNAPILSTLPEHTVIC

SEQ ID NO: 11095 - protein, 1301 aa, Artificial Sequence
  SARS-CoV-2/USA/WA-UW31/2020__EPI_ISL_414618 spike protein (1-1147)(I714C_Y1110C) WhcAg construct
MFVFLVLLPLVSSQCVNLTTRTQLPPAYTNSFTRGVYYPDKVFRSSVLHSTQDLFLPFFSNVTWFHAIHVSGTNGTKRFDNPVLPFNDGVYFASTEKSNIIRGWIFGTTLDSKTQSLLIVNNATNVVIKVCEFQFCNDPFLGVYYHKNNKSWMESEFRVYSSANNCTFEYVSQPFLMDLEGKQGNFKNLREFVFKNIDGYFKIYSKHTPINLVRDLPQGFSALEPLVDLPIGINITRFQTLLALHRSYLTPGDSSSGWTAGAAAYYVGYLQPRTFLLKYNENGTITDAVDCALDPLSETKCTLKSFTVEKGIYQTSNFRVQPTESIVRFPNITNLCPFGEVFNATRFASVYAWNRKRISNCVADYSVLYNSASFSTFKCYGVSPTKLNDLCFTNVYADSFVIRGDEVRQIAPGQTGKIADYNYKLPDDFTGCVIAWNSNNLDSKVGGNYNYLYRLFRKSNLKPFERDISTEIYQAGSTPCNGAEGFNCYFPLQSYGFQPTNGVGYQPYRVVVLSFELLHAPATVCGPKKSTNLVKNKCVNFNFNGLTGTGVLTESNKKFLPFQQFGRDIADTTDAVRDPQTLEILDITPCSFGGVSVITPGTNTSNQVAVLYQDVNCTEVPVAIHADQLTPTWRVYSTGSNVFQTRAGCLIGAEHVNNSYECDIPIGAGICASYQTQTNSPRRARSVASQSIIAYTMSLGAENSVAYSNNSIACPTNFTISVTTEILPVSMTKTSVDCTMYICGDSTECSNLLLQYGSFCTQLNRALTGIAVEQDKNTQEVFAQVKQIYKTPPIKDFGGFNFSQILPDPSKPSKRSFIEDLLFNKVTLADAGFIKQYGDCLGDIAARDLICAQKFNGLTVLPPLLTDEMIAQYTSALLAGTITSGWTFGAGAALQIPFAMQMAYRFNGIGVTQNVLYENQKLIANQFNSAIGKIQDSLSSTASALGKLQDVVNQNAQALNTLVKQLSSNFGAISSVLNDILSRLDKVEAEVQIDRLITGRLQSLQTYVTQQLIRAAEIRASANLAATKMSECVLGQSKRVDFCGKGYHLMSFPQSAPHGVVFLHVTYVPAQEKNFTTAPAICHDGKAHFPREGVFVSNGTHWFVTQRNFCEPQIITTDNTFVSGNCDVVIGIVNNTVYDPLQPELDSGGGGSDIDPYKEFGSSYQLLNFLPLDFFPDLNALVDTATALYEEELTGREHCSPHHTAIRQALVCWDELTKLIAWMSSNITSEQVRTIIVNHVNDTWGLKVRQSLWFHLSCLTFGQHTVQEFLVSFGVWIRTPAPYRPPNAPILSTLPEHTVIC

SEQ ID NO: 11096 - protein, 1301 aa, Artificial Sequence
  SARS-CoV-2/South Korea/SNU01/2020__EPI_ISL_411929 spike protein (1-1147)(I714C_Y1110C) WhcAg construct
MFVFLVLLPLVSSQCVNLTTRTQLPPAYTNSFTRGVYYPDKVFRSSVLHSTQDLFLPFFSNVTWFHAIHVSGTNGTKRFDNPVLPFNDGVYFASTEKSNIIRGWIFGTTLDSKTQSLLIVNNATNVVIKVCEFQFCNDPFLGVYYHKNNKSWMESEFRVYSSANNCTFEYVSQPFLMDLEGKQGNFKNLREFVFKNIDGYFKIYSKHTPINLVRDLPQGFWALEPLVDLPIGINITRFQTLLALHRSYLTPGDSSSGWTAGAAAYYVGYLQPRTFLLKYNENGTITDAVDCALDPLSETKCTLKSFTVEKGIYQTSNFRVQPTESIVRFPNITNLCPFGEVFNATRFASVYAWNRKRISNCVADYSVLYNSASFSTFKCYGVSPTKLNDLCFTNVYADSFVIRGDEVRQIAPGQTGKIADYNYKLPDDFTGCVIAWNSNNLDSKVGGNYNYLYRLFRKSNLKPFERDISTEIYQAGSTPCNGVEGFNCYFPLQSYGFQPTNGVGYQPYRVVVLSFELLHAPATVCGPKKSTNLVKNKCVNFNFNGLTGTGVLTESNKKFLPFQQFGRDIADTTDAVRDPQTLEILDITPCSFGGVSVITPGTNTSNQVAVLYQDVNCTEVPVAIHADQLTPTWRVYSTGSNVFQTRAGCLIGAEHVNNSYECDIPIGAGICASYQTQTNSPRRARSVASQSIIAYTMSLGAENSVAYSNNSIACPTNFTISVTTEILPVSMTKTSVDCTMYICGDSTECSNLLLQYGSFCTQLNRALTGIAVEQDKNTQEVFAQVKQIYKTPPIKDFGGFNFSQILPDPSKPSKRSFIEDLLFNKVTLADAGFIKQYGDCLGDIAARDLICAQKFNGLTVLPPLLTDEMIAQYTSALLAGTITSGWTFGAGAALQIPFAMQMAYRFNGIGVTQNVLYENQKLIANQFNSAIGKIQDSLSSTASALGKLQDVVNQNAQALNTLVKQLSSNFGAISSVLNDILSRLDKVEAEVQIDRLITGRLQSLQTYVTQQLIRAAEIRASANLAATKMSECVLGQSKRVDFCGKGYHLMSFPQSAPHGVVFLHVTYVPAQEKNFTTAPAICHDGKAHFPREGVFVSNGTHWFVTQRNFCEPQIITTDNTFVSGNCDVVIGIVNNTVYDPLQPELDSGGGGSDIDPYKEFGSSYQLLNFLPLDFFPDLNALVDTATALYEEELTGREHCSPHHTAIRQALVCWDELTKLIAWMSSNITSEQVRTIIVNHVNDTWGLKVRQSLWFHLSCLTFGQHTVQEFLVSFGVWIRTPAPYRPPNAPILSTLPEHTVIC

SEQ ID NO: 11097 - protein, 1301 aa, Artificial Sequence
  SARS-CoV-2/China/WF0004/2020__EPI_ISL_413694 spike protein (1-1147)(I714C_Y1110C) WhcAg construct
MFVFLVLLPLVSSQCVNLTTRTQLPPAYTNSFTRGVYYPDKVFRSSVLHSTQDLFLPFFSNVTWFHAIHVSGTNGTKRFDNPVLPFNDGVYFASTEKSNIIRGWIFGTTLDSKTQSLLIVNNATNVVIKVCEFQFCNDPFLGVYYHKNNKSWTESEFRVYSSANNCTFEYVSQPFLMDLEGKQGNFKNLREFVFKNIDGYFKIYSKHTPINLVRDLPQGFSALEPLVDLPIGINITRFQTLLALHRSYLTPGDSSSGWTAGAAAYYVGYLQPRTFLLKYNENGTITDAVDCALDPLSETKCTLKSFTVEKGIYQTSNFRVQPTESIVRFPNITNLCPFGEVFNATRFASVYAWNRKRISNCVADYSVLYNSASFSTFKCYGVSPTKLNDLCFTNVYADSFVIRGDEVRQIAPGQTGKIADYNYKLPDDFTGCVIAWNSNNLDSKVGGNYNYLYRLFRKSNLKPFERDISTEIYQAGSTPCNGVEGFNCYFPLQSYGFQPTNGVGYQPYRVVVLSFELLHAPATVCGPKKSTNLVKNKCVNFNFNGLTGTGVLTESNKKFLPFQQFGRDIADTTDAVRDPQTLEILDITPCSFGGVSVITPGTNTSNQVAVLYQDVNCTEVPVAIHADQLTPTWRVYSTGSNVFQTRAGCLIGAEHVNNSYECDIPIGAGICASYQTQTNSPRRARSVASQSIIAYTMSLGAENSVAYSNNSIACPTNFTISVTTEILPVSMTKTSVDCTMYICGDSTECSNLLLQYGSFCTQLNRALTGIAVEQDKNTQEVFAQVKQIYKTPPIKDFGGFNFSQILPDPSKPSKRSFIEDLLFNKVTLADAGFIKQYGDCLGDIAARDLICAQKFNGLTVLPPLLTDEMIAQYTSALLAGTITSGWTFGAGAALQIPFAMQMAYRFNGIGVTQNVLYENQKLIANQFNSAIGKIQDSLSSTASALGKLQDVVNQNAQALNTLVKQLSSNFGAISSVLNDILSRLDKVEAEVQIDRLITGRLQSLQTYVTQQLIRAAEIRASANLAATKMSECVLGQSKRFDFCGKGYHLMSFPQSAPHGVVFLHVTYVPAQEKNFTTAPAICHDGKAHFPREGVFVSNGTHWFVTQRNFCEPQIITTDNTFVSGNCDVVIGIVNNTVYDPLQPELDSGGGGSDIDPYKEFGSSYQLLNFLPLDFFPDLNALVDTATALYEEELTGREHCSPHHTAIRQALVCWDELTKLIAWMSSNITSEQVRTIIVNHVNDTWGLKVRQSLWFHLSCLTFGQHTVQEFLVSFGVWIRTPAPYRPPNAPILSTLPEHTVIC

SEQ ID NO: 11098 - protein, 1301 aa, Artificial Sequence
  SARS-CoV-2/China/WF0028/2020__EPI_ISL_413791 spike protein (1-1147)(I714C_Y1110C) WhcAg construct
MFVFLVLLPLVSSQCVNLTTRTQLPPAYTNSFTRGVYYPDKVFRSSVLHSTQDLFLPFFSNVTWFHAIHVSGTNGTKRFDNPVLPFNDGVYFASTEKSNIIRGWIFGTTLDSKTQSLLIVNNATNVVIKVCEFQFCNDPFLGVYYHKNNKSWMESEFRVYSSANNCTFEYVSQPFLMDLEGKQGNFKNLREFVFKNIDGYFKIYSKHTPINLVRDLPQGFSALEPLVDLPIGINITRFQTLLALHRSYLTPGDSSSGWTAGAAAYYVGYLQPRTFLLKYNENGTITDAVDCALDPLSETKCTLKSFTVEKGIYQTSNFRVQPTESIVRFPNITNLCPFGEVFNATRFASVYAWNRKRISNCVADYSVLYNSASFSTFKCYGVSPTKLNDLCFTNVYADSFVIRGDEVRQIAPGQTGKIADYNYKLPDDFTGCVIAWNSNNLDSKVGGNYNYLYRLFRKSNLKPFERDISTEIYQAGSTPCNGVEGFNCYFPLQSYGFQPTNGVGYQPYRVVVLSFELLHAPATVCGPKKSTNLVKNKCVNFNFNGLTGTGVLTESNKKFLPFQQFGRDIADTTDAVRDPQTLEILDITPCSFGGVSVITPGTNTSNQVAVLYQDVNCTEVPVAIHADQLTPTWRVYSTGSNVFQTRAGCLIGAEHVNNSYECDIPIGAGICASYQTQTNSPRRARSVASQSIIAYTMSLGAENSVAYSNNSIACPTNFTISVTTEILPVSMTKTSVDCTMYICGDSTECSNLLLQYGSFCTQLNRALTGIAVEQDKNTQEVFAQVKQIYKTPPIKDFGGFNFSQILPDPSKPSKRSFIEDLLFNKVTLADAGFIKQYGDCLGDIAARDLICAQKFNGLTVLPPLLTDEMIAQYTSALLAGTITSGWTFGAGAALQIPFAMQMAYRFNGIGVTQNVLYENQKLIANQFNSAIGKIQDSLSSTASALGKLQDVVNQNAQALNTLVKQLSSNFGAISSVLNDILSRLDKVEAEVQIDRLITGRLQSLQTYVTQQLIRAAEIRASANLAATKMSECVLGQSKRVDFCGKGYHLMSFPQSAPHGVVFLHVTYVPAQEKNFTTAPAICHDGKAHFPREGVFVSNGTHWFVTQRNFCEPQIITTDNTFVSGNCDVVIGIVNNTVYDPLQPELESGGGGSDIDPYKEFGSSYQLLNFLPLDFFPDLNALVDTATALYEEELTGREHCSPHHTAIRQALVCWDELTKLIAWMSSNITSEQVRTIIVNHVNDTWGLKVRQSLWFHLSCLTFGQHTVQEFLVSFGVWIRTPAPYRPPNAPILSTLPEHTVIC

SEQ ID NO: 11099 - protein, 1301 aa, Artificial Sequence
  SARS-CoV-2/2019-nCoV/USA-CruiseA-18/2020__MT159716.1 spike protein (1-1147)(I714C_Y1110C) WhcAg construct
MFVFLVLLPLVSSQCVNLTTRTQLPPAYTNSFTRGVYYPDKVFRSSVLHSTQDLFLPFFSNVTWFHAIHVSGTNGTKRFDNPVLPFNDGVYFASTEKSNIIRGWIFGTTLDSKTQSLLIVNNATNVVIKVCEFQFCNDPFLGVYYHKNNKSWMESELRVYSSANNCTFEYVSQPFLMDLEGKQGNFKNLREFVFKNIDGYFKIYSKHTPINLVRDLPQGFSALEPLVDLPIGINITRFQTLLALHRSYLTPGDSSSGWTAGAAAYYVGYLQPRTFLLKYNENGTITDAVDCALDPLSETKCTLKSFTVEKGIYQTSNFRVQPTESIVRFPNITNLCPFGEVFNATRFASVYAWNRKRISNCVADYSVLYNSASFSTFKCYGVSPTKLNDLCFTNVYADSFVIRGDEVRQIAPGQTGKIADYNYKLPDDFTGCVIAWNSNNLDSKVGGNYNYLYRLFRKSNLKPFERDISTEIYQAGSTPCNGVEGFNCYFPLQSYGFQPTNGVGYQPYRVVVLSFELLHAPATVCGPKKSTNLVKNKCVNFNFNGLTGTGVLTESNKKFLPFQQFGRDIADTTDAVRDPQTLEILDITPCSFGGVSVITPGTNTSNQVAVLYQDVNCTEVPVAIHADQLTPTWRVYSTGSNVFQTRAGCLIGAEHVNNSYECDIPIGAGICASYQTQTNSPRRARSVASQSIIAYTMSLGAENSVAYSNNSIACPTNFTISVTTEILPVSMTKTSVDCTMYICGDSTECSNLLLQYGSFCTQLNRALTGIAVEQDKNTQEVFAQVKQIYKTPPIKDFGGFNFSQILPDPSKPSKRSFIEDLLFNKVTLADAGFIKQYGDCLGDIAARDLICAQKFNGLTVLPPLLTDEMIAQYTSALLAGTITSGWTFGAGAALQIPFAMQMAYRFNGIGVTQNVLYENQKLIANQFNSAIGKIQDSLSSTASALGKLQDVVNQNAQALNTLVKQLSSNFGAISSVLNDILSRLDKVEAEVQIDRLITGRLQSLQTYVTQQLIRAAEIRASANLAATKMSECVLGQSKRVDFCGKGYHLMSFPQSAPHGVVFLHVTYVPAQEKNFTTAPAICHDGKAHFPREGVFVSNGTHWFVTQRNFCEPQIITTDNTFVSGNCDVVIGIVNNTVYDPLQPELDSGGGGSDIDPYKEFGSSYQLLNFLPLDFFPDLNALVDTATALYEEELTGREHCSPHHTAIRQALVCWDELTKLIAWMSSNITSEQVRTIIVNHVNDTWGLKVRQSLWFHLSCLTFGQHTVQEFLVSFGVWIRTPAPYRPPNAPILSTLPEHTVIC

SEQ ID NO: 11100 - protein, 1301 aa, Artificial Sequence
  SARS-CoV-2/SARS-CoV-2/Yunnan-01/human/2020/CHN__MT049951.1 spike protein (1-1147)(I714C_Y1110C) WhcAg construct
MFVFLVLLPLVSSQCVNLTTRTQLPPANTNSFTRGVYYPDKVFRSSVLHSTQDLFLPFFSNVTWFHAIHVSGTNGTKRFDNPVLPFNDGVYFASTEKSNIIRGWIFGTTLDSKTQSLLIVNNATNVVIKVCEFQFCNDPFLGVYYHKNNKSWMESEFRVYSSANNCTFEYVSQPFLMDLEGKQGNFKNLREFVFKNIDGYFKIYSKHTPINLVRDLPQGFSALEPLVDLPIGINITRFQTLLALHRSYLTPGDSSSGWTAGAAAYYVGYLQPRTFLLKYNENGTITDAVDCALDPLSETKCTLKSFTVEKGIYQTSNFRVQPTESIVRFPNITNLCPFGEVFNATRFASVYAWNRKRISNCVADYSVLYNSASFSTFKCYGVSPTKLNDLCFTNVYADSFVIRGDEVRQIAPGQTGKIADYNYKLPDDFTGCVIAWNSNNLDSKVGGNYNYLYRLFRKSNLKPFERDISTEIYQAGSTPCNGVEGFNCYFPLQSYGFQPTNGVGYQPYRVVVLSFELLHAPATVCGPKKSTNLVKNKCVNFNFNGLTGTGVLTESNKKFLPFQQFGRDIADTTDAVRDPQTLEILDITPCSFGGVSVITPGTNTSNQVAVLYQDVNCTEVPVAIHADQLTPTWRVYSTGSNVFQTRAGCLIGAEHVNNSYECDIPIGAGICASYQTQTNSPRRARSVASQSIIAYTMSLGAENSVAYSNNSIACPTNFTISVTTEILPVSMTKTSVDCTMYICGDSTECSNLLLQYGSFCTQLNRALTGIAVEQDKNTQEVFAQVKQIYKTPPIKDFGGFNFSQILPDPSKPSKRSFIEDLLFNKVTLADAGFIKQYGDCLGDIAARDLICAQKFNGLTVLPPLLTDEMIAQYTSALLAGTITSGWTFGAGAALQIPFAMQMAYRFNGIGVTQNVLYENQKLIANQFNSAIGKIQDSLSSTASALGKLQDVVNQNAQALNTLVKQLSSNFGAISSVLNDILSRLDKVEAEVQIDRLITGRLQSLQTYVTQQLIRAAEIRASANLAATKMSECVLGQSKRVDFCGKGYHLMSFPQSAPHGVVFLHVTYVPAQEKNFTTAPAICHDGKAHFPREGVFVSNGTHWFVTQRNFCEPQIITTDNTFVSGNCDVVIGIVNNTVYDPLQPELDSGGGGSDIDPYKEFGSSYQLLNFLPLDFFPDLNALVDTATALYEEELTGREHCSPHHTAIRQALVCWDELTKLIAWMSSNITSEQVRTIIVNHVNDTWGLKVRQSLWFHLSCLTFGQHTVQEFLVSFGVWIRTPAPYRPPNAPILSTLPEHTVIC

SEQ ID NO: 11101 - protein, 1301 aa, Artificial Sequence
  SARS-CoV-2/USA/WA-UW292/2020__EPI_ISL_418077 spike protein (1-1147)(I714C_Y1110C) WhcAg construct
MFVFLVLLPLVSSQCVNLTTRTQLPPAYTNSFTRGVYYPDKVFRSSVLHSTQDLFLPFFSNVTWFHAIHVSGTNGTKRFDNPVLPFNDGVYFASTEKSNIIRGWIFGTTLDSKTQSLLIVNNATNVVIKVCEFQFCNDPFLGVYYHKNNKSWMESEFRVYSSANNCTFEYVSQPFLMDLEGKQGNFKNLREFVFKNIDGYFKIYSKHTPINLVRDLPQGFSALEPLVDLPIGINITRFQTLLALHRSYLTPGDSSSGWTAGAAAYYVGYLQPRTFLLKYNENGTITDAVDCALDPLSETKCTLKSFTVEKGIYQTSNFRVQPTESIVRFPNITNLCPFGEVFNATRFASVYAWNRKRISNCVADYSVLYNSASFSTFKCYGVSPTKLNDLCFTNVYADSFVIRGDEVRQIAPGQTGKIADYNYKLPDDFTGCVIAWNSNNLDSKVGGNYNYLYRLFRKSNLKPFERDISTEIYQASSTPCNGVEGFNCYFPLQSYGFQPTNGVGYQPYRVVVLSFELLHAPATVCGPKKSTNLVKNKCVNFNFNGLTGTGVLTESNKKFLPFQQFGRDIADTTDAVRDPQTLEILDITPCSFGGVSVITPGTNTSNQVAVLYQDVNCTEVPVAIHADQLTPTWRVYSTGSNVFQTRAGCLIGAEHVNNSYECDIPIGAGICASYQTQTNSPRRARSVASQSIIAYTMSLGAENSVAYSNNSIACPTNFTISVTTEILPVSMTKTSVDCTMYICGDSTECSNLLLQYGSFCTQLNRALTGIAVEQDKNTQEVFAQVKQIYKTPPIKDFGGFNFSQILPDPSKPSKRSFIEDLLFNKVTLADAGFIKQYGDCLGDIAARDLICAQKFNGLTVLPPLLTDEMIAQYTSALLAGTITSGWTFGAGAALQIPFAMQMAYRFNGIGVTQNVLYENQKLIANQFNSAIGKIQDSLSSTASALGKLQDVVNQNAQALNTLVKQLSSNFGAISSVLNDILSRLDKVEAEVQIDRLITGRLQSLQTYVTQQLIRAAEIRASANLAATKMSECVLGQSKRVDFCGKGYHLMSFPQSAPHGVVFLHVTYVPAQEKNFTTAPAICHDGKAHFPREGVFVSNGTHWFVTQRNFCEPQIITTDNTFVSGNCDVVIGIVNNTVYDPLQPELDSGGGGSDIDPYKEFGSSYQLLNFLPLDFFPDLNALVDTATALYEEELTGREHCSPHHTAIRQALVCWDELTKLIAWMSSNITSEQVRTIIVNHVNDTWGLKVRQSLWFHLSCLTFGQHTVQEFLVSFGVWIRTPAPYRPPNAPILSTLPEHTVIC

SEQ ID NO: 11102 - protein, 1301 aa, Artificial Sequence
  SARS-CoV-2/Iceland/192/2020__EPI_ISL_417819 spike protein (1-1147)(I714C_Y1110C) WhcAg construct
MFVFFVLLPLVSSQCVNLTTRTQLPPAYTNSFTRGVYYPDKVFRSSVLHSTQDLFLPFFSNVTWFHAIHVSGTNGTKRFDNPVLPFNDGVYFASTEKSNIIRGWIFGTTLDSKTQSLLIVNNATNVVIKVCEFQFCNDPFLGVYYHKNNKSWMESEFRVYSSANNCTFEYVSQPFLMDLEGKQGNFKNLREFVFKNIDGYFKIYSKHTPINLVRDLPQGFSALEPLVDLPIGINITRFQTLLALHRSYLTPGDSSSGWTAGAAAYYVGYLQPRTFLLKYNENGTITDAVDCALDPLSETKCTLKSFTVEKGIYQTSNFRVQPTESIVRFPNITNLCPFGEVFNATRFASVYAWNRKRISNCVADYSVLYNSASFSTFKCYGVSPTKLNDLCFTNVYADSFVIRGDEVRQIAPGQTGKIADYNYKLPDDFTGCVIAWNSNNLDSKVGGNYNYLYRLFRKSNLKPFERDISTEIYQAGSTPCNGVEGFNCYFPLQSYGFQPTNGVGYQPYRVVVLSFELLHAPATVCGPKKSTNLVKNKCVNFNFNGLTGTGVLTESNKKFLPFQQFGRDIADTTDAVRDPQTLEILDITPCSFGGVSVITPGTNTSNQVAVLYQGVNCTEVPVAIHADQLTPTWRVYSTGSNVFQTRAGCLIGAEHVNNSYECDIPIGAGICASYQTQTNSPRRARSVASQSIIAYTMSLGAENSVAYSNNSIACPTNFTISVTTEILPVSMTKTSVDCTMYICGDSTECSNLLLQYGSFCTQLNRALTGIAVEQDKNTQEVFAQVKQIYKTPPIKDFGGFNFSQILPDPSKPSKRSFIEDLLFNKVTLADAGFIKQYGDCLGDIAARDLICAQKFNGLTVLPPLLTDEMIAQYTSALLAGTITSGWTFGAGAALQIPFAMQMAYRFNGIGVTQNVLYENQKLIANQFNSAIGKIQDSLSSTASALGKLQDVVNQNAQALNTLVKQLSSNFGAISSVLNDILSRLDKVEAEVQIDRLITGRLQSLQTYVTQQLIRAAEIRASANLAATKMSECVLGQSKRVDFCGKGYHLMSFPQSAPHGVVFLHVTYVPAQEKNFTTAPAICHDGKAHFPREGVFVSNGTHWFVTQRNFCEPQIITTDNTFVSGNCDVVIGIVNNTVYDPLQPELDSGGGGSDIDPYKEFGSSYQLLNFLPLDFFPDLNALVDTATALYEEELTGREHCSPHHTAIRQALVCWDELTKLIAWMSSNITSEQVRTIIVNHVNDTWGLKVRQSLWFHLSCLTFGQHTVQEFLVSFGVWIRTPAPYRPPNAPILSTLPEHTVIC

SEQ ID NO: 11103 - protein, 1301 aa, Artificial Sequence
  SARS-CoV-2/Belgium/ULG-6939/2020__EPI_ISL_417020 spike protein (1-1147)(I714C_Y1110C) WhcAg construct
MFVFLVLLPLVSSQCVNLTTRTQLPPAYTNSFTRGVYYPDKVFRSSVLHSTQDLFLPFFSNVTWFHAIHVSGTNGTKRFDNPVLPFNDGVYFASTEKSNIIRGWIFGTTLDSKTQSLLIVNNATNVVIKVCEFQFCNDPFLGVYYHKNNKSWMESEFRVYSSANNCTFEYVSQPFLMDLEGKQGNFKNLREFVFKNIDGYFKIYSKHTPINLVRDLPQGFSALEPLVDLPIGINITRFQTLLALHRSYLTPGDSSSGWTAGAAAYYVGYLQPRTFLLKYNENGTITDAVDCALDPLSETKCTLKSFTVEKGIYQTSNFRVQPTESIVRFPNITNLCPFGEVFNATRFASVYAWNRKRISNCVADYSVLYNSASFSTFKCYGVSPTKLNDLCFTNVYADSFVIRGDEVRQIAPGQTGKIADYNYKLPDDFTGCVIAWNSNNLDSKVGGNYNYLYRLFRKSNLKPFERDISTEIYQAGSTPCNGVEGFNCYFPLQSYGFQPTNGVGYQPYRVVVLSFELLHAPATVCGPKKSTNLVKNKCVNFNFNGLTGTGVLTESNKKFLPFQQFGRDIADTTDAVRDPQTLEILDITPCSFGGVSVITPGTNTSNQVAVLYQGVNCTEVPVAIHADQLTPTWRVYSTGSNVFQTRAGCLIGAEHVNNSYECDIPIGAGICASYQTQTNSPRRARSVASQSIIAYTMSLGAENSVVYSNNSIACPTNFTISVTTEILPVSMTKTSVDCTMYICGDSTECSNLLLQYGSFCTQLNRALTGIAVEQDKNTQEVFAQVKQIYKTPPIKDFGGFNFSQILPDPSKPSKRSFIEDLLFNKVTLADAGFIKQYGDCLGDIAARDLICAQKFNGLTVLPPLLTDEMIAQYTSALLAGTITSGWTFGAGAALQIPFAMQMAYRFNGIGVTQNVLYENQKLIANQFNSAIGKIQDSLSSTASALGKLQDVVNQNAQALNTLVKQLSSNFGAISSVLNDILSRLDKVEAEVQIDRLITGRLQSLQTYVTQQLIRAAEIRASANLAATKMSECVLGQSKRVDFCGKGYHLMSFPQSAPHGVVFLHVTYVPAQEKNFTTAPAICHDGKAHFPREGVFVSNGTHWFVTQRNFCEPQIITTDNTFVSGNCDVVIGIVNNTVYDPLQPELDSGGGGSDIDPYKEFGSSYQLLNFLPLDFFPDLNALVDTATALYEEELTGREHCSPHHTAIRQALVCWDELTKLIAWMSSNITSEQVRTIIVNHVNDTWGLKVRQSLWFHLSCLTFGQHTVQEFLVSFGVWIRTPAPYRPPNAPILSTLPEHTVIC

SEQ ID NO: 11104 - protein, 1301 aa, Artificial Sequence
  SARS-CoV-2/France/HF2496/2020__EPI_ISL_418231 spike protein (1-1147)(I714C_Y1110C) WhcAg construct
MFVFLVLLPLVSSQCVNLTTRTQLPPAYTNSFTRGVYYPDKVFRSSVLHSTQDLFLPFFSNVTWFHAIHVSGTNGTKRFDNPVLPFNDGVYFASTEKSNIIRGWIFGTTLDSKTQSLLIVNNATNVVIKVCEFQFCNDPFLGVYYHKNNKSWMESEFRVYSSANNCTFEYVSQPFLMDLEGKQGNFKNLREFVFKNIDGYFKIYSKHTPINLVRDLPQGFSALEPLVDLPIGINITRFQTLLALHRSYLTPGDSSSGWTAGAAAYYVGYLQPRTFLLKYNENGTITDAVDCALDPLSETKCTLKSFTVEKGIYQTSNFRVQPTESIVRFPNITNLCPFGEVFNATRFASVYAWNRKRISNCVADYSVLYNSASFSTFKCYGVSPTKLNDLCFTNVYADSFVIRGDEVRQIAPGQTGKIADYNYKLPDDFTGCVIAWNSNNLDSKVGGNYNYLYRLFRKSNLKPFERDISTEIYQAGSTPCNGVEGFNCYFPLQSYGFQPTNGVGYQPYRVVVLSFELLHAPATVCGPKKSTNLVKNKCVNFNFNGLTGTGVLTESNKKFLPFQQFGRDIADTTDAVRDPQTLEILDITPCSFGGVSVITPGTNTSNQVAVLYQGVNCTEVPVAIHADQLTPTWRVYSTGSNVFQTRAGCLIGAEHVNNSYECDIPIGAGICASYQTQTNSPRRARSVASQSIIAYTMSLGAENSVAYSNNSIACPTNFTISVTTEILPVSMTKTSVDCTMYICGDSTECSNLLLQYGSFCTQLNRALTGIAVEQDKNTQEVFAQVKQIYKTPPIKDFGGFNFSQILPDPSKPSKRSFIEDLLFNKVTLADAGFIKQYGDCLGDIVARDLICAQKFNGLTVLPPLLTDEMIAQYTSALLAGTITSGWTFGAGAALQIPFAMQMAYRFNGIGVTQNVLYENQKLIANQFNSAIGKIQDSLSSTASALGKLQDVVNQNAQALNTLVKQLSSNFGAISSVLNDILSRLDKVEAEVQIDRLITGRLQSLQTYVTQQLIRAAEIRASANLAATKMSECVLGQSKRVDFCGKGYHLMSFPQSAPHGVVFLHVTYVPAQEKNFTTAPAICHDGKAHFPREGVFVSNGTHWFVTQRNFCEPQIITTDNTFVSGNCDVVIGIVNNTVYDPLQPELDSGGGGSDIDPYKEFGSSYQLLNFLPLDFFPDLNALVDTATALYEEELTGREHCSPHHTAIRQALVCWDELTKLIAWMSSNITSEQVRTIIVNHVNDTWGLKVRQSLWFHLSCLTFGQHTVQEFLVSFGVWIRTPAPYRPPNAPILSTLPEHTVIC

SEQ ID NO: 11105 - protein, 1301 aa, Artificial Sequence
  SARS-CoV-2/USA/WA-UW291/2020__EPI_ISL_418076 spike protein (1-1147)(I714C_Y1110C) WhcAg construct
MFVFLVLLPLVSSQCVNLTTRTQLPPAYTNSFTRGVYYPDKVFRSSVLHSTQDLFLPFFSNVTWFHAIHVSGTNGTKRFDNPVLPFNDGVYFASTEKSNIIRGWIFGTTLDSKTQSLLIVNNATNVVIKVCEFQFCNDPFLGVYYHKNNKSWMESEFRVYSSANNCTFEYVSQPFLMDLEGKQGNFKNLREFVFKNIDGYFKIYSKHTPINLVRDLPQGFSALEPLVDLPIGINITRFQTLLALHRSYLTPGDSSSGWTAGAAAYYVGYLQPRTFLLKYNENGTITDAVDCALDPLSETKCTLKSFTVEKGIYQTSNFRVQPTESIVRFPNITNLCPFGEVFNATRFASVYAWNRKRISNCVADYSVLYNSASFSTFKCYGVSPTKLNDLCFTNVYADSFVIRGDEVRQIAPGQTGKIADYNYKLPDDFTGCVIAWNSNNLDSKVGGNYNYLYRLFRKSNLKPFERDISTEIYQAGSTPCNGVEGFNCYFPLQSYGFQPTNGVGYQPYRVVVLSFELLHAPATVCGPKKSTNLVKNKCVNFNFNGLTGTGVLTESNKKFLPFQQFGRDIADTTDAVRDPQTLEILDITPCSFGGVSVITPGTNTSNQVAVLYQGVNCTEVPVAIHADQLTPTWRVYSTGSNVFQTRAGCLIGAEHVNNSYECDIPIGAGICASYQTQTNSPRRARSVASQSIIAYTMSLGAENSVAYSNNSIACPTNFTISVTTEILPVSMTKTSVDCTMYICGDSTECSNLLLQYGSFCTQLNRALTGIAVEQDKNTQEVFAQVKQIYKTPPIKDFGGFNFSQILPDPSKPSKRSFIEDLLFNKVTLADAGFIKQYGDCLGDIAARDLICAQKFNGLTVLPPLLTDEMIAQYTSALLAGTITSGWTFGAGAALQIPFAMQMAYRFNGIGVTQNVLYENQKLIANQFNSAIGKIQYSLSSTASALGKLQDVVNQNAQALNTLVKQLSSNFGAISSVLNDILSRLDKVEAEVQIDRLITGRLQSLQTYVTQQLIRAAEIRASANLAATKMSECVLGQSKRVDFCGKGYHLMSFPQSAPHGVVFLHVTYVPAQEKNFTTAPAICHDGKAHFPREGVFVSNGTHWFVTQRNFCEPQIITTDNTFVSGNCDVVIGIVNNTVYDPLQPELDSGGGGSDIDPYKEFGSSYQLLNFLPLDFFPDLNALVDTATALYEEELTGREHCSPHHTAIRQALVCWDELTKLIAWMSSNITSEQVRTIIVNHVNDTWGLKVRQSLWFHLSCLTFGQHTVQEFLVSFGVWIRTPAPYRPPNAPILSTLPEHTVIC

SEQ ID NO: 11106 - protein, 1301 aa, Artificial Sequence; identical to SEQ ID NO: 11069
  SARS-CoV-2/Portugal/PT0034/2020__EPI_ISL_418019 spike protein (1-1147)(I714C_Y1110C) WhcAg construct

SEQ ID NO: 11107 - protein, 1301 aa, Artificial Sequence; identical to SEQ ID NO: 11061
  SARS-CoV-2/Iceland/202/2020__EPI_ISL_417750 spike protein (1-1147)(I714C_Y1110C) WhcAg construct

SEQ ID NO: 11108 - protein, 1301 aa, Artificial Sequence
  SARS-CoV-2/USA/WA-UW261/2020__EPI_ISL_418046 spike protein (1-1147)(I714C_Y1110C) WhcAg construct
MFVFLVLLPLVSSQCVNLTTRTQLPPAYTNSFTRGVYYPDKVFRSSVLHSTQDLFLPFFSNVTWFHAIHVSGTNGTKRFDNPVLPFNDGVYFASTEKSNIIRGWIFGTTLDSKTQSLLIVNNATNVVIKVCEFQFCNDPFLGVYYHKNNKSWMESEFRVYSSANNCTFEYVSQPFLMDLEGKQGNFKNLREFVFKNIDGYFKIYSKHTPINLVRDLPQGFSALEPLVDLPIGINITRFQTLLALHRSYLTPGDSSSGWTAGAAAYYVGYLQPRTFLLKYNENGTITDAVDCALDPLSETKCTLKSFTVEKGIYQTSNFRVQPTESIVRFPNITNLCPFGEVFNATRFTSVYAWNRKRISNCVADYSVLYNSASFSTFKCYGVSPTKLNDLCFTNVYADSFVIRGDEVRQIAPGQTGKIADYNYKLPDDFTGCVIAWNSNNLDSKVGGNYNYLYRLFRKSNLKPFERDISTEIYQAGSTPCNGVEGFNCYFPLQSYGFQPTNGVGYQPYRVVVLSFELLHAPATVCGPKKSTNLVKNKCVNFNFNGLTGTGVLTESNKKFLPFQQFGRDIADTTDAVRDPQTLEILDITPCSFGGVSVITPGTNTSNQVAVLYQDVNCTEVPVAIHADQLTPTWRVYSTGSNVFQTRAGCLIGAEHVNNSYECDIPIGAGICASYQTQTNSPRRARSVASQSIIAYTMSLGAENSVAYSNNSIACPTNFTISVTTEILPVSMTKTSVDCTMYICGDSTECSNLLLQYGSFCTQLNRALTGIAVEQDKNTQEVFAQVKQIYKTPPIKDFGGFNFSQILPDPSKPSKRSFIEDLLFNKVTLADAGFIKQYGDCLGDIAARDLICAQKFNGLTVLPPLLTDEMIAQYTSALLAGTITSGWTFGAGAALQIPFAMQMAYRFNGIGVTQNVLYENQKLIANQFNSAIGKIQDSLSSTASALGKLQDVVNQNAQALNTLVKQLSSNFGAISSVLNDILSRLDKVEAEVQIDRLITGRLQSLQTYVTQQLIRAAEIRASANLAATKMSECVLGQSKRVDFCGKGYHLMSFPQSAPHGVVFLHVTYVPAQEKNFTTAPAICHDGKAHFPREGVFVSNGTHWFVTQRNFCEPQIITTDNTFVSGNCDVVIGIVNNTVYDPLQPELDSGGGGSDIDPYKEFGSSYQLLNFLPLDFFPDLNALVDTATALYEEELTGREHCSPHHTAIRQALVCWDELTKLIAWMSSNITSEQVRTIIVNHVNDTWGLKVRQSLWFHLSCLTFGQHTVQEFLVSFGVWIRTPAPYRPPNAPILSTLPEHTVIC

SEQ ID NO: 11109 - protein, 1301 aa, Artificial Sequence
  SARS-CoV-2/Portugal/PT0035/2020__EPI_ISL_418020 spike protein (1-1147)(I714C_Y1110C) WhcAg construct
MFVFLVLLPLVSSQCVNLTTRTQLPPAYTNSFTRGVYYPDKVFRSSVLHSTQDLFLPFFSNVTWFHAIHVSGTNGTKRFDNPVLPFNDGVYFASTEKSNIIRGWIFGTTLDSKTQSLLIVNNATNVVIKVCEFQFCNDPFLGVYYHKNNKSWMESEFRVYSSANNCTFEYVSQPFLMDLEGKQGNFKNLREFVFKNIDGYFKIYSKHTPINLVRDLPQGFSALEPLVDLPIGINITRFQTLLALHRSYLTPGDSSSGWTAGAAAYYVGYLQPRTFLLKYNENGTITDAVDCALDPLSETKCTLKSFTVEKGIYQTSNFRVQPTESIVRFPNITNLCPFGEVFNATRFASVYAWNRKRISNCVADYSVLYNSASFSTFKCYGVSPTKLNDLCFTNVYADSFVIRGDEVRQIAPGQTGKIADYNYKLPDDFTGCVIAWNSNNLDSKVGGNYNYLYRLFRKSNLKPFERDISTEIYQAGSTPCNGVEGFNCYFPLQSYGFQPTNGVGYQPYRVVVLSFELLHAPATVCGPKKSTNLVKNKCVNFNFNGLTGTGVLTESNKKFLPFQQFGRDIADTTDAVRDPQTLEILDITPCSFGGVSVITPGTNTSNQVAVLYQDVNCTEVPVAIHADQLTPTWRVYSTGSNVFQTRAGCLIGAEHVNNSYECDIPIGAGICASYQTQTNSPRRARSVASQSIIAYTMSLGAENSVAYSNNSIACPTNFTISVTTEILPVSMTKTSVDCTMYICGDSTECSNLLLQYGSFCTQLNRALTGIAVEQDKNTQEVFAQVKQIYKTPPIKDFGGFNFSQILPDPSKPSKRSFIEDLLFNKVTLADAGFIKQYGDCLGDISARDLICAQKFNGLTVLPPLLTDEMIAQYTSALLAGTITSGWTFGAGAALQIPFAMQMAYRFNGIGVTQNVLYENQKLIANQFNSAIGKIQDSLSSTASALGKLQDVVNQNAQALNTLVKQLSSNFGAISSVLNDILSRLDKVEAEVQIDRLITGRLQSLQTYVTQQLIRAAEIRASANLAATKMSECVLGQSKRVDFCGKGYHLMSFPQSAPHGVVFLHVTYVPAQEKNFTTAPAICHDGKAHFPREGVFVSNGTHWFVTQRNFCEPQIITTDNTFVSGNCDVVIGIVNNTVYDPLQPELDSGGGGSDIDPYKEFGSSYQLLNFLPLDFFPDLNALVDTATALYEEELTGREHCSPHHTAIRQALVCWDELTKLIAWMSSNITSEQVRTIIVNHVNDTWGLKVRQSLWFHLSCLTFGQHTVQEFLVSFGVWIRTPAPYRPPNAPILSTLPEHTVIC

SEQ ID NO: 11110 - protein, 1301 aa, Artificial Sequence
  SARS-CoV-2/USA/NY-NYUMC7/2020__EPI_ISL_418192 spike protein (1-1147)(I714C_Y1110C) WhcAg construct
MFVFLVLLPLVSSQCVNLTTRTQLPPAYTNSFTRGVYYPDKVFRSSVLHSTQDLFLPFFSNVTWFHAIHVSGTNGTKRFDNPVLPFNDGVYFASTEKSNIIRGWIFGTTLDSKTQSLLIVNNATNVVIKVCEFQFCNDPFLGVYHHKNNKSWMESEFRVYSSANNCTFEYVSQPFLMDLEGKQGNFKNLREFVFKNIDGYFKIYSKHTPINLVRDLPQGFSALEPLVDLPIGINITRFQTLLALHRSYLTPGDSSSGWTAGAAAYYVGYLQPRTFLLKYNENGTITDAVDCALDPLSETKCTLKSFTVEKGIYQTSNFRVQPTESIVRFPNITNLCPFGEVFNATRFASVYAWNRKRISNCVADYSVLYNSASFSTFKCYGVSPTKLNDLCFTNVYADSFVIRGDEVRQIAPGQTGKIADYNYKLPDDFTGCVIAWNSNNLDSKVGGNYNYLYRLFRKSNLKPFERDISTEIYQAGSTPCNGVEGFNCYFPLQSYGFQPTNGVGYQPYRVVVLSFELLHAPATVCGPKKSTNLVKNKCVNFNFNGLTGTGVLTESNKKFLPFQQFGRDIADTTDAVRDPQTLEILDITPCSFGGVSVITPGTNTSNQVAVLYQGVNCTEVPVAIHADQLTPTWRVYSTGSNVFQTRAGCLIGAEHVNNSYECDIPIGAGICASYQTQTNSPRRARSVASQSIIAYTMSLGAENSVAYSNNSIACPTNFTISVTTEILPVSMTKTSVDCTMYICGDSTECSNLLLQYGSFCTQLNRALTGIAVEQDKNTQEVFAQVKQIYKTPPIKDFGGFNFSQILPDPSKPSKRSFIEDLLFNKVTLADAGFIKQYGDCLGDIAARDLICAQKFNGLTVLPPLLTDEMIAQYTSALLAGTITSGWTFGAGAALQIPFAMQMAYRFNGIGVTQNVLYENQKLIANQFNSAIGKIQDSLSSTASALGKLQDVVNQNAQALNTLVKQLSSNFGAISSVLNDILSRLDKVEAEVQIDRLITGRLQSLQTYVTQQLIRAAEIRASANLAATKMSECVLGQSKRVDFCGKGYHLMSFPQSAPHGVVFLHVTYVPAQEKNFTTAPAICHDGKAHFPREGVFVSNGTHWFVTQRNFCEPQIITTDNTFVSGNCDVVIGIVNNTVYDPLQPELDSGGGGSDIDPYKEFGSSYQLLNFLPLDFFPDLNALVDTATALYEEELTGREHCSPHHTAIRQALVCWDELTKLIAWMSSNITSEQVRTIIVNHVNDTWGLKVRQSLWFHLSCLTFGQHTVQEFLVSFGVWIRTPAPYRPPNAPILSTLPEHTVIC

SEQ ID NO: 11111 - protein, 1301 aa, Artificial Sequence
  SARS-CoV-2/Iceland/189/2020__EPI_ISL_417709 spike protein (1-1147)(I714C_Y1110C) WhcAg construct
MFVFLVLLPLVSSQCVNLTTRTQLPPAYTNSFTRGVYYPDKVFRSSVLHSTQDLFLPFFSNVTWFHAIHVSGTNGTKRFDNPVLPFNDGVYFASTEKSNIIRGWIFGTTLDSKTQSLLIVNNATNVVIKVCEFQFCNDPFLGVYYHKNNKSWMESEFRVYSSANNCTFEYVSQPFLMDLEGKQGNFKNLREFVFKNIDGYFKIYSKHTPINLVRDLPQGFSALEPLVDLPIGINITRFQTLLALHRSYLTPGDSSSGWTAGAAAYYVGYLQPRTFLLKYNENGTITDAVDCALDPLSETKCTLKSFTVEKGIYQTSNFRVQPTESIVRFPNITNLCPFGEVFNATRFASVYAWNRKRISNCVADYSVLYNSASFSTFKCYGVSPTKLNDLCFTNVYADSFVIRGDEVRQIAPGQTGKIADYNYKLPDDFTGCVIAWNSNNLDSKVGGNYNYLYRLFRKSNLKPFERDISTEIYQAGSTPCNGVEGFNCYFPLQSYGFQPTNGVGYQPYRVVVLSFELLHAPATVCGPKKSTNLVKNKCVNFNFNGLTGTGVLTESNKKFLPFQQFGRDIADTTDAVRDPQTLEILDITPCSFGGVSVITPGTNTSNQVAVLYQGVNCTEVPVAIHADQLTPTWRVYSTGSNVFQTRAGCLIGAEHVNNSYECDIPIGAGICASYQTQTNSPRRARSVASQSIIAYTMSLGAENSVAYSNNSIACPTNFTISVTTEILPVSMTKTSVDCTMYICGDSTECSNLLLQYGSFCTQLNRALTGIAVEQDKNTQEVFAQVKQIYKTPPIKDFGGFNFSQILPDPSKPSKRSFIEDLLFNKVTLADAGFTKQYGDCLGDIAARDLICAQKFNGLTVLPPLLTDEMIAQYTSALLAGTITSGWTFGAGAALQIPFAMQMAYRFNGIGVTQNVLYENQKLIANQFNSAIGKIQDSLSSTASALGKLQDVVNQNAQALNTLVKQLSSNFGAISSVLNDILSRLDKVEAEVQIDRLITGRLQSLQTYVTQQLIRAAEIRASANLAATKMSECVLGQSKRVDFCGKGYHLMSFPQSAPHGVVFLHVTYVPAQEKNFTTAPAICHDGKAHFPREGVFVSNGTHWFVTQRNFCEPQIITTDNTFVSGNCDVVIGIVNNTVYDPLQPELDSGGGGSDIDPYKEFGSSYQLLNFLPLDFFPDLNALVDTATALYEEELTGREHCSPHHTAIRQALVCWDELTKLIAWMSSNITSEQVRTIIVNHVNDTWGLKVRQSLWFHLSCLTFGQHTVQEFLVSFGVWIRTPAPYRPPNAPILSTLPEHTVIC

SEQ ID NO: 11112 - protein, 1301 aa, Artificial Sequence
  SARS-CoV-2/Australia/NSW56/2020__EPI_ISL_417408 spike protein (1-1147)(I714C_Y1110C) WhcAg construct
MFVFLVLLPLVSSQCVNLTTRTQLPPAYTNSFTRGVYYPDKVFRSSVLHSTQDLFLPFFSNVTWFHAIHVSGTNGTKRFDNPVLPFNDGVYFASTEKSNIIRGWIFGTTLDSKTQSLLIVNNATNVVIKVCEFQFCNDPFLGVYYHKNNKSWMESEFRVYSSANNCTFEYVSQPFLMDLEGKQGNFKNLREFVFKNIDGYFKIYSKHTPINLVRDLPQGFSALEPLVDLPIGINITRFQTLLALHRSYLTPGDSSSGWTAGAAAYYVGYLQPRTFLLKYNENGTITDAVDCALDPLSETKCTLKSFTVEKGIYQTSNFRVQPTESIVRFPNITNLCPFGEVFNATRFASVYAWNRKRISNCVADYSVLYNSASFSTFKCYGVSPTKLNDLCFTNVYADSFVIRGDEVRQIAPGQTGKIADYNYKLPDDFTGCVIAWNSNNLDSKVGGNYNYLYRLFRKSNLKPFERDISTEIYQAGSTPCNGVEGFNCYFPLQSYGFQPTNGVGYQPYRVVVLSFELLHAPATVCGPKKSTNLVKNKCVNFNFNGLTGTGVLTESNKKFLPFQQFGRDIADTTDAVRDPQTLEILDITPCSFGGVSVITPGTNTSNQVAVLYQDVNCTEVPVAIHADQLTPTWRVYSTGSNVFQTRAGCLIGAEHVNNSYECDIPIGAGICASYQTQTNSPRRARSVASQSIIAYTMSLGAENSVAYSNNSIACPTNFTISVTTEILPVSMTKTSVDCTMYICGDSTECSNLLLQYGSFCTQLNRALTGIAVEQDKNTQEVFAQVKQIYKTPPIKDFGGFNFSQILPDSSKPSKRSFIEDLLFNKVTLADAGFIKQYGDCLGDIAARDLICAQKFNGLTVLPPLLTDEMIAQYTSALLAGTITSGWTFGAGAALQIPFAMQMAYRFNGIGVTQNVLYENQKLIANQFNSAIGKIQDSLSSTASALGKLQDVVNQNAQALNTLVKQLSSNFGAISSVLNDILSRLDKVEAEVQIDRLITGRLQSLQTYVTQQLIRAAEIRASANLAATKMSECVLGQSKRVDFCGKGYHLMSFPQSAPHGVVFLHVTYVPAQEKNFTTAPAICHDGKAHFPREGVFVSNGTHWFVTQRNFCEPQIITTDNTFVSGNCDVVIGIVNNTVYDPLQPELDSGGGGSDIDPYKEFGSSYQLLNFLPLDFFPDLNALVDTATALYEEELTGREHCSPHHTAIRQALVCWDELTKLIAWMSSNITSEQVRTIIVNHVNDTWGLKVRQSLWFHLSCLTFGQHTVQEFLVSFGVWIRTPAPYRPPNAPILSTLPEHTVIC

SEQ ID NO: 11113 - protein, 1301 aa, Artificial Sequence
  SARS-CoV-2/Iceland/280/2020__EPI_ISL_417608 spike protein (1-1147)(I714C_Y1110C) WhcAg construct
MFVFLVLLPLVSSQCVNLTTRTQLPPAYTNSFTRGVYYPDKVFRSSVLHSTQDLFLPFFSNVTWFHAIHVSGTNGTKRFDNPVLPFNDGVYFASTEKSNIIRGWIFGTTLDSKTQSLLIVNNATNVVIKVCEFQFCNDPFLGVYYHKNNKSWMESEFRVYSSANNCTFEYVSQPFLMDLEGKQGNFKNLREFVFKNIDGYFKIYSKHTPINLVRDLPQGFSALEPLVDLPIGINITRFQTLLALHRSYLTPGDSSSGWTAGAAAYYVGYLQPRTFLLKYNENGTITDAVDCALDPLSETKCTLKSFTVEKGIYQTSNFRVQPTESIVRFPNITNLCPFGEVFNATRFASVYAWNRKRISNCVADYSVLYNSASFSTFKCYGVSPTKLNDLCFTNVYADSFVIRGDEVRQIAPGQTGKIADYNYKLPDDFTGCVIAWNSNNLDSKVGGNYNYLYRLFRKSNLKPFERDISTEIYQAGSTPCNGVEGFNCYFPLQSYGFQPTNGVGYQPYRVVVLSFELLHAPATVCGPKKSTNLVKNKCVNFNFNGLTGTGVLTESNKKFLPFQQFGRDIADTTDAVRDPQTLEILDITPCSFGGVSVITPGTNTSNQVAVLYQGVNCTEVPVAIHADQLTPTWRVYSTGSNVFQTRAGCLIGAEHVNNSYECDIPIGAGICASYHTQTNSPRRARSVASQSIIAYTMSLGAENSVAYSNNSIACPTNFTISVTTEILPVSMTKTSVDCTMYICGDSTECSNLLLQYGSFCTQLNRALTGIAVEQDKNTQEVFAQVKQIYKTPPIKDFGGFNFSQILPDPSKPSKRSFIEDLLFNKVTLADAGFIKQYGDCLGDIAARDLICAQKFNGLTVLPPLLTDEMIAQYTSALLAGTITSGWTFGAGAALQIPFAMQMAYRFNGIGVTQNVLYENQKLIANQFNSAIGKIQDSLSSTASALGKLQDVVNQNAQALNTLVKQLSSNFGAISSVLNDILSRLDKVEAEVQIDRLITGRLQSLQTYVTQQLIRAAEIRASANLAATKMSECVLGQSKRVDFCGKGYHLMSFPQSAPHGVVFLHVTYVPAQEKNFTTAPAICHDGKAHFPREGVFVSNGTHWFVTQRNFCEPQIITTDNTFVSGNCDVVIGIVNNTVYDPLQPELDSGGGGSDIDPYKEFGSSYQLLNFLPLDFFPDLNALVDTATALYEEELTGREHCSPHHTAIRQALVCWDELTKLIAWMSSNITSEQVRTIIVNHVNDTWGLKVRQSLWFHLSCLTFGQHTVQEFLVSFGVWIRTPAPYRPPNAPILSTLPEHTVIC

SEQ ID NO: 11114 - protein, 1301 aa, Artificial Sequence; identical to SEQ ID NO: 11069
  SARS-CoV-2/Iceland/247/2020__EPI_ISL_417575 spike protein (1-1147)(I714C_Y1110C) WhcAg construct

SEQ ID NO: 11115 - protein, 1301 aa, Artificial Sequence
  SARS-CoV-2/Iceland/238/2020__EPI_ISL_417566 spike protein (1-1147)(I714C_Y1110C) WhcAg construct
MFVFLVLLPLVSSQCVNLTTRTQLPPAYTNSFTRGVYYPDKVFRSSVLHSTQDLFLPFFSNVTWFHAIHVSGTNGTKRFDNPVLPFNDGVYFASTEKSNIIRGWIFGTTLDSKTQSLLIVNNATNVVIKVCEFQFCNDPFLGVYYHKNNKSWMESEFRVYSSANNCTFEYVSQPFLMDLEGKQGNFKNLREFVFKNIDGYFKIYSKHTPINLVRDLPQGFSALEPLVDLPIGINITRFQTLLALHRSYLTPGDSSSGWTAGAAAYYVGYLQPRTFLLKYNENGTITDAVDCALDPLSETKCTLKSFTVEKGIYQTSNFRVQPTESIVRFPNITNLCPFGEVFNATRFASVYAWNRKRISNCVADYSVLYNSASFSTFKCYGVSPTKLNDLCFTNVYADSFVIRGDEVRQIAPGQTGKIADYNYKLPDDFTGCVIAWNSNNLDSKVGGNYNYLYRLFRKSNLKPFERDISTEIYQAGSTPCNGVEGFNCYFPLQSYGFQPTNGVGYQPYRVVVLSFELLHAPATVCGPKKSTNLVKNKCVNFNFNGLTGTGVLTESNKKFLPFQQFGRDIADTTDAVRDPQTLEILDITPCSFGGVSVITPGTNTSNQVAVLYQGVNCTEVPVAIHADQLTPTWRVYSTGSNVFQTRAGCLIGAEHVNNSYECDIPIGAGICASYQTQTNSPRRARSVASQSIIAYTMSLGAENSVAYSNNSIACPTNFTISVTTEILPVSMTKTSVDCTMYICGDSTECSNLLLQYGSFCTQLNRALTGIAVEQDKNTQEVFAQVKQIYKTPPIKDFGGFNFSQILPDPSKPSKRSFIEDLLFNKVTLADVGFIKQYGDCLGDIAARDLICAQKFNGLTVLPPLLTDEMIAQYTSALLAGTITSGWTFGAGAALQIPFAMQMAYRFNGIGVTQNVLYENQKLIANQFNSAIGKIQDSLSSTASALGKLQDVVNQNAQALNTLVKQLSSNFGAISSVLNDILSRLDKVEAEVQIDRLITGRLQSLQTYVTQQLIRAAEIRASANLAATKMSECVLGQSKRVDFCGKGYHLMSFPQSAPHGVVFLHVTYVPAQEKNFTTAPAICHDGKAHFPREGVFVSNGTHWFVTQRNFCEPQIITTDNTFVSGNCDVVIGIVNNTVYDPLQPELDSGGGGSDIDPYKEFGSSYQLLNFLPLDFFPDLNALVDTATALYEEELTGREHCSPHHTAIRQALVCWDELTKLIAWMSSNITSEQVRTIIVNHVNDTWGLKVRQSLWFHLSCLTFGQHTVQEFLVSFGVWIRTPAPYRPPNAPILSTLPEHTVIC

SEQ ID NO: 11116 - protein, 1301 aa, Artificial Sequence
  SARS-CoV-2/Greece/16/2020__EPI_ISL_418265 spike protein (1-1147)(I714C_Y1110C) WhcAg construct
MFVFLVLLPLVSSQCVNLTTRTQLPPAYTNSFTRGVYYPDKVFRSSVLHSTQDLFLPFFSNVTWFHAIHVSGTNGTKRFDNPVLPFNDGVYFASTEKSNIIRGWIFGTTLDSKTQSLLIVNNATNVVIKVCEFQFCNDPFLGVYYHKNNKSWMESEFRVYSSANNCTFEYVSQPFLMDLEGKQGNFKNLREFVFKNVDGYFKIYSKHTPINLVRDLPQGFSALEPLVDLPIGINITRFQTLLALHRSYLTPGDSSSGWTAGAAAYYVGYLQPRTFLLKYNENGTITDAVDCALDPLSETKCTLKSFTVEKGIYQTSNFRVQPTESIVRFPNITNLCPFGEVFNATRFASVYAWNRKRISNCVADYSVLYNSASFSTFKCYGVSPTKLNDLCFTNVYADSFVIRGDEVRQIAPGQTGKIADYNYKLPDDFTGCVIAWNSNNLDSKVGGNYNYLYRLFRKSNLKPFERDISTEIYQAGSTPCNGVEGFNCYFPLQSYGFQPTNGVGYQPYRVVVLSFELLHAPATVCGPKKSTNLVKNKCVNFNFNGLTGTGVLTESNKKFLPFQQFGRDIADTTDAVRDPQTLEILDITPCSFGGVSVITPGTNTSNQVAVLYQDVNCTEVPVAIHADQLTPTWRVYSTGSNVFQTRAGCLIGAEHVNNSYECDIPIGAGICASYQTQTNSPRRARSVASQSIIAYTMSLGAENSVAYSNNSIACPTNFTISVTTEILPVSMTKTSVDCTMYICGDSTECSNLLLQYGSFCTQLNRALTGIAVEQDKNTQEVFAQVKQIYKTPPIKDFGGFNFSQILPDPSKPSKRSFIEDLLFNKVTLADAGFIKQYGDCLGDIAARDLICAQKFNGLTVLPPLLTDEMIAQYTSALLAGTITSGWTFGAGAALQIPFAMQMAYRFNGIGVTQNVLYENQKLIANQFNSAIGKIQDSLSSTASALGKLQDVVNQNAQALNTLVKQLSSNFGAISSVLNDILSRLDKVEAEVQIDRLITGRLQSLQTYVTQQLIRAAEIRASANLAATKMSECVLGQSKRVDFCGKGYHLMSFPQSAPHGVVFLHVTYVPAQEKNFTTAPAICHDGKAHFPREGVFVSNGTHWFVTQRNFCEPQIITTDNTFVSGNCDVVIGIVNNTVYDPLQPELDSGGGGSDIDPYKEFGSSYQLLNFLPLDFFPDLNALVDTATALYEEELTGREHCSPHHTAIRQALVCWDELTKLIAWMSSNITSEQVRTIIVNHVNDTWGLKVRQSLWFHLSCLTFGQHTVQEFLVSFGVWIRTPAPYRPPNAPILSTLPEHTVIC

SEQ ID NO: 11117 - protein, 1301 aa, Artificial Sequence
  SARS-CoV-2/Iceland/319/2020__EPI_ISL_417648 spike protein (1-1147)(I714C_Y1110C) WhcAg construct
MFVFLVLLPLVSSQCVNLTTRTQLPPAYTNSFTRGVYYPDKVFRSSVLHSTQDLFLPFFSNVTWFHAIHVSGTNGTKRFDNPVLPFNDGVYFASTEKSNIIRGWIFGTTLDSKTQSLLIVNNATNVVIKVCEFQFCNDPFLGVYYHKNNKSWMESEFRVYSSANNCTFEYVSQPFLIDLEGKQGNFKNLREFVFKNIDGYFKIYSKHTPINLVRDLPQGFSALEPLVDLPIGINITRFQTLLALHRSYLTPGDSSSGWTAGAAAYYVGYLQPRTFLLKYNENGTITDAVDCALDPLSETKCTLKSFTVEKGIYQTSNFRVQPTESIVRFPNITNLCPFGEVFNATRFASVYAWNRKRISNCVADYSVLYNSASFSTFKCYGVSPTKLNDLCFTNVYADSFVIRGDEVRQIAPGQTGKIADYNYKLPDDFTGCVIAWNSNNLDSKVGGNYNYLYRLFRKSNLKPFERDISTEIYQAGSTPCNGVEGFNCYFPLQSYGFQPTNGVGYQPYRVVVLSFELLHAPATVCGPKKSTNLVKNKCVNFNFNGLTGTGVLTESNKKFLPFQQFGRDIADTTDAVRDPQTLEILDITPCSFGGVSVITPGTNTSNQVAVLYQGVNCTEVPVAIHADQLTPTWRVYSTGSNVFQTRAGCLIGAEHVNNSYECDIPIGAGICASYQTQTNSPRRARSVASQSIIAYTMSLGAENSVAYSNNSIACPTNFTISVTTEILPVSMTKTSVDCTMYICGDSTECSNLLLQYGSFCTQLNRALTGIAVEQDKNTQEVFAQVKQIYKTPPIKDFGGFNFSQILPDPSKPSKRSFIEDLLFNKVTLADAGFIKQYGDCLGDIAARDLICAQKFNGLTVLPPLLTDEMIAQYTSALLAGTITSGWTFGAGAALQIPFAMQMAYRFNGIGVTQNVLYENQKLIANQFNSAIGKIQDSLSSTASALGKLQDVVNQNAQALNTLVKQLSSNFGAISSVLNDILSRLDKVEAEVQIDRLITGRLQSLQTYVTQQLIRAAEIRASANLAATKMSECVLGQSKRVDFCGKGYHLMSFPQSAPHGVVFLHVTYVPAQEKNFTTAPAICHDGKAHFPREGVFVSNGTHWFVTQRNFCEPQIITTDNTFVSGNCDVVIGIVNNTVYDPLQPELDSGGGGSDIDPYKEFGSSYQLLNFLPLDFFPDLNALVDTATALYEEELTGREHCSPHHTAIRQALVCWDELTKLIAWMSSNITSEQVRTIIVNHVNDTWGLKVRQSLWFHLSCLTFGQHTVQEFLVSFGVWIRTPAPYRPPNAPILSTLPEHTVIC

SEQ ID NO: 11118 - protein, 1301 aa, Artificial Sequence
  SARS-CoV-2/Congo/94/2020__EPI_ISL_417947 spike protein (1-1147)(I714C_Y1110C) WhcAg construct
MFVFLVLLPLVSSQCVNLTTRTQLPPAYTNSFTRGVYYPDKVFRSSVLHSTQDLFLPFFSNVTWFHAIHVSGTNGTKRFDNPVLPFNDGVYFASTEKSNIIRGWIFGTTLDSKTQSLLIVNNATNVVIKVCEFQFCNDPFLGVYYHKNNKSWMESEFRVYSSANNCTFEYVSQPFLMDLEGKQGNFKNLREFVFKNIDGYFKIYSKHTPINLVRDLPQGFSALEPLVDLPIGINITRFQTLLALHRSYLTPGDSSSGWTAGAAAYYVGYLQPRTFLLKYNENGTITDAVDCALDPLSETKCTLKSFTVEKGIYQTSNFRVQPTESIVRFPNITNLCPFGEVFNATRFASVYAWNRKRISNCVADYSVLYNSASFSTFKCYGVSPTKLNDLCFTNVYADSFVIRGDEVRQIAPGQTGKIADYNYKLPDDFTGCVIAWNSNNLDSKVGGNYNYLYRLFRKSNLKPFERDISTEIYQAGSTPCNGVEGFNCYFPLQSYGFQPTNGVGYQPYRVVVLSFELLHAPATVCGPKKSTNLVKNKCVNFNFNGLTGTGVLTESNKKFLPFQQFGRDIADTTDAVRDPQTLEILDITPCSFGGVSVITPGTNTSNQVAVLYQGVNCTEVPVAIHADQLTPTWRVYSTGSNVFQTRAGCLIGAEHVNNSYECDIPIGAGICASYQTQTNSPRRARSVASQSIIAYTMSLGAENSVAYSNNSIACPTNFTISVTTEILPVSMTKTSVDCTMYICGDSTECSNLLLQYGSFCTQLNRALTGIAVEQDKNTQEVFAQVKQIYKTPPIKDFGGFNFSQILPDPSKPSKRSFIEDILFNKVTLADAGFIKQYGDCLGDIAARDLICAQKFNGLTVLPPLLTDEMIAQYTSALLAGTITSGWTFGAGAALQIPFAMQMAYRFNGIGVTQNVLYENQKLIANQFNSAIGKIQDSLSSTASALGKLQDVVNQNAQALNTLVKQLSSNFGAISSVLNDILSRLDKVEAEVQIDRLITGRLQSLQTYVTQQLIRAAEIRASANLAATKMSECVLGQSKRVDFCGKGYHLMSFPQSAPHGVVFLHVTYVPAQEKNFTTAPAICHDGKAHFPREGVFVSNGTHWFVTQRNFCEPQIITTDNTFVSGNCDVVIGIVNNTVYDPLQPELDSGGGGSDIDPYKEFGSSYQLLNFLPLDFFPDLNALVDTATALYEEELTGREHCSPHHTAIRQALVCWDELTKLIAWMSSNITSEQVRTIIVNHVNDTWGLKVRQSLWFHLSCLTFGQHTVQEFLVSFGVWIRTPAPYRPPNAPILSTLPEHTVIC

SEQ ID NO: 11119 - protein, 1301 aa, Artificial Sequence
  SARS-CoV-2/Congo/158/2020__EPI_ISL_417950 spike protein (1-1147)(I714C_Y1110C) WhcAg construct
MFVFLVLLPLVSSQCVNLTTRTQLPPAYTNSFTRGVYYPDKVFRSSVLHSTQDLFLPFFSNVTWFHAIHVSGTNGTKRFDNPVLPFNDGVYFASTEKSNIIRGWIFGTTLDSKTQSLLIVNNATNVVIKVCEFQFCNDPFLGVYYHKNNKSWMESEFRVYSSANNCTFEYVSQPFLMDLEGKQGNFKNLREFVFKNIDGYFKIYSKHTPINLVRDLPQGFSALEPLVDLPIGINITRFQTLLALHRSYLTPGDSSSGWTAGAAAYYVGYLQPRTFLLKYNENGTITDAVDCALDPLSETKCTLKSFTVEKGIYQTSNFRVQPTESIVRFPNITNLCPFGEVFNATRFASVYAWNRKRISNCVADYSVLYNSASFSTFKCYGVSPTKLNDLCFTNVYADSFVIRGDEVRQIAPGQTGKIADYNYKLPDDFTGCVIAWNSNNLDSKVGGNYNYLYRLFRKSNLKPFERDISTEIYQAGSTPCNGVEGFNCYFPLQSYGFQPTNGVGYQPYRVVVLSFELLHAPATVCGPKKSTNLVKNKCVNFNFNGLTGTGVLTESNKKFLPFQQFGRDIADTTDAVRDPQTLEILDITPCSFGGVSVITPGTNTSNQVAVLYQDVNCTEVPVAIHADQLTPTWRVYSTGSNVFQTRAGCLIGAEHVNNSYECDIPIGAGICASYQTQTNSPRRARSVASQSIIAYTMSLGAENSVAYSNNSIACPTNFTISVTTEILPVSMTKTSVDCTMYICGDSTECSNLLLQYGSFCTQLNRALTGIAVEQDKNTQEVFAQVKQIYKTPPIKDFGGFNFSQILPDPSKPSKRSFIEDLLFNKVTLADAGFIKQYGDCLGDIAARDLICAQKFNGLTVLPPLLTDEMIAQYTSALLAGTITSGWTFGAGAALQIPFAMQMAYRFNGIGVTQNVLYENQKLIANQFNSAIGKIQDSLSSTASALGKLQDVVNQNAQALNTLVKQLSSNFGAISSVLNDILSRLDKVEAEVQIDRLITGRLQSLQTYVTQQLIRAAEIRASANLAATKMSECVLGQSKRVDFCGKGYHLMSFPQSAPHGVVFLHVTYVPAQEKNFTTAPAICHDGKAHFPREGVFVSNGTHWFVTQRNFCEPQIITTDNTFLSGNCDVVIGIVNNTVYDPLQPELDSGGGGSDIDPYKEFGSSYQLLNFLPLDFFPDLNALVDTATALYEEELTGREHCSPHHTAIRQALVCWDELTKLIAWMSSNITSEQVRTIIVNHVNDTWGLKVRQSLWFHLSCLTFGQHTVQEFLVSFGVWIRTPAPYRPPNAPILSTLPEHTVIC

SEQ ID NO: 11120 - protein, 1301 aa, Artificial Sequence
  SARS-CoV-2/USA/UT-00034/2020__EPI_ISL_417977 spike protein (1-1147)(I714C_Y1110C) WhcAg construct
MFVFLVLLPLVSSQCVNLTTRTQLPPAYTNSFTRGVYYPDKVFRSSVLHSTQDLFLPFFSNVTWFHAIHVSGTNGTKRFDNPVLPFNDGVYFASTEKSNIIRGWIFGTTLDSKTQSLLIVNNATNVVIKVCEFQFCNDPFLGVYYYKNNKSWMESEFRVYSSANNCTFEYVSQPFLMDLEGKQGNFKNLREFVFKNIDGYFKIYSKHTPINLVRDLPQGFSALEPLVDLPIGINITRFQTLLALHRSYLTPGDSSSGWTAGAAAYYVGYLQPRTFLLKYNENGTITDAVDCALDPLSETKCTLKSFTVEKGIYQTSNFRVQPTESIVRFPNITNLCPFGEVFNATRFASVYAWNRKRISNCVADYSVLYNSASFSTFKCYGVSPTKLNDLCFTNVYADSFVIRGDEVRQIAPGQTGKIADYNYKLPDDFTGCVIAWNSNNLDSKVGGNYNYLYRLFRKSNLKPFERDISTEIYQAGSTPCNGVEGFNCYFPLQSYGFQPTNGVGYQPYRVVVLSFELLHAPATVCGPKKSTNLVKNKCVNFNFNGLTGTGVLTESNKKFLPFQQFGRDIADTTDAVRDPQTLEILDITPCSFGGVSVITPGTNTSNQVAVLYQGVNCTEVPVAIHADQLTPTWRVYSTGSNVFQTRAGCLIGAEHVNNSYECDIPIGAGICASYQTQTNSPRRARSVASQSIIAYTMSLGAENSVAYSNNSIACPTNFTISVTTEILPVSMTKTSVDCTMYICGDSTECSNLLLQYGSFCTQLNRALTGIAVEQDKNTQEVFAQVKQIYKTPPIKDFGGFNFSQILPDPSKPSKRSFIEDLLFNKVTLADAGFIKQYGDCLGDIAARDLICAQKFNGLTVLPPLLTDEMIAQYTSALLAGTITSGWTFGAGAALQIPFAMQMAYRFNGIGVTQNVLYENQKLIANQFNSAIGKIQDSLSSTASALGKLQDVVNQNAQALNTLVKQLSSNFGAISSVLNDILSRLDKVEAEVQIDRLITGRLQSLQTYVTQQLIRAAEIRASANLAATKMSECVLGQSKRVDFCGKGYHLMSFPQSAPHGVVFLHVTYVPAQEKNFTTAPAICHDGKAHFPREGVFVSNGTHWFVTQRNFCEPQIITTDNTFVSGNCDVVIGIVNNTVYDPLQPELDSGGGGSDIDPYKEFGSSYQLLNFLPLDFFPDLNALVDTATALYEEELTGREHCSPHHTAIRQALVCWDELTKLIAWMSSNITSEQVRTIIVNHVNDTWGLKVRQSLWFHLSCLTFGQHTVQEFLVSFGVWIRTPAPYRPPNAPILSTLPEHTVIC

SEQ ID NO: 11121 - protein, 1301 aa, Artificial Sequence
  SARS-CoV-2/USA/UT-00033/2020__EPI_ISL_417976 spike protein (1-1147)(I714C_Y1110C) WhcAg construct
MFVFLVLLPLVSSQCVNLTTRTQLPPAYTNSFTRGVYYPDKVFRSSVLHSTQDLFLPFFSNVTWFHAIHVSGTNGTKRFDNPVLPFNDGVYFASTEKSNIIRGWIFGTTLDSKTQSLLIVNNATNVVIKVCEFQFCNDPFLGVYYHKNNKSWMESEFRVYSSANNCTFEYVSQPFLMDLEGKQGNFKNLREFVFKNIDGYFKIYSKHTPINLVRDLPQGFSALEPLVDLPIGINITRFQTLLALHRSYLTPGDSSSGLTAGAAAYYVGYLQPRTFLLKYNENGTITDAVDCALDPLSETKCTLKSFTVEKGIYQTSNFRVQPTESIVRFPNITNLCPFGEVFNATRFASVYAWNRKRISNCVADYSVLYNSASFSTFKCYGVSPTKLNDLCFTNVYADSFVIRGDEVRQIAPGQTGKIADYNYKLPDDFTGCVIAWNSNNLDSKVGGNYNYLYRLFRKSNLKPFERDISTEIYQAGSTPCNGVEGFNCYFPLQSYGFQPTNGVGYQPYRVVVLSFELLHAPATVCGPKKSTNLVKNKCVNFNFNGLTGTGVLTESNKKFLPFQQFGRDIADTTDAVRDPQTLEILDITPCSFGGVSVITPGTNTSNQVAVLYQGVNCTEVPVAIHADQLTPTWRVYSTGSNVFQTRAGCLIGAEHVNNSYECDIPIGAGICASYQTQTNSPRRARSVASQSIIAYTMSLGAENSVAYSNNSIACPTNFTISVTTEILPVSMTKTSVDCTMYICGDSTECSNLLLQYGSFCTQLNRALTGIAVEQDKNTQEVFAQVKQIYKTPPIKDFGGFNFSQILPDPSKPSKRSFIEDLLFNKVTLADAGFIKQYGDCLGDIAARDLICAQKFNGLTVLPPLLTDEMIAQYTSALLAGTITSGWTFGAGAALQIPFAMQMAYRFNGIGVTQNVLYENQKLIANQFNSAIGKIQDSLSSTASALGKLQDVVNQNAQALNTLVKQLSSNFGAISSVLNDILSRLDKVEAEVQIDRLITGRLQSLQTYVTQQLIRAAEIRASANLAATKMSECVLGQSKRVDFCGKGYHLMSFPQSAPHGVVFLHVTYVPAQEKNFTTAPAICHDGKAHFPREGVFVSNGTHWFVTQRNFCEPQIITTDNTFVSGNCDVVIGIVNNTVYDPLQPELDSGGGGSDIDPYKEFGSSYQLLNFLPLDFFPDLNALVDTATALYEEELTGREHCSPHHTAIRQALVCWDELTKLIAWMSSNITSEQVRTIIVNHVNDTWGLKVRQSLWFHLSCLTFGQHTVQEFLVSFGVWIRTPAPYRPPNAPILSTLPEHTVIC

SEQ ID NO: 11122 - protein, 1301 aa, Artificial Sequence
  SARS-CoV-2/USA/WI-13/2020__EPI_ISL_417516 spike protein (1-1147)(I714C_Y1110C) WhcAg construct
MFVFLVLLPLVSSQCVNLTTRTQLPPAYTNSFTRGVYYPDKVFRSSVLHSTQDLFLPFFSNVTWFHAIHVSGTNGTKRFDNPVLPFNDGVYFASTEKSNIIRGWIFGTTLDSKTQSLLIVNNATNVVIKVCEFQFCNDPFLGVYYHKNNKSWMESEFRVYSSANNCTFEYVSQPFLMDLEGKQGNFKNLREFVFKNIDGYFKIYSKHTPINLVRDLPQGFSALEPLVDLPIGINITRFQTLLALHRSYLTPGDSSSGWTAGAAAYYVGYLQPRTFLLKYNENGTITDAVDCALDPLSETKCTLKSFTVEKGIYQTSNFRVLPTESIVRFPNITNLCPFGEVFNATRFASVYAWNRKRISNCVADYSVLYNSASFSTFKCYGVSPTKLNDLCFTNVYADSFVIRGDEVRQIAPGQTGKIADYNYKLPDDFTGCVIAWNSNNLDSKVGGNYNYLYRLFRKSNLKPFERDISTEIYQAGSTPCNGVEGFNCYFPLQSYGFQPTNGVGYQPYRVVVLSFELLHAPATVCGPKKSTNLVKNKCVNFNFNGLTGTGVLTESNKKFLPFQQFGRDIADTTDAVRDPQTLEILDITPCSFGGVSVITPGTNTSNQVAVLYQGVNCTEVPVAIHADQLTPTWRVYSTGSNVFQTRAGCLIGAEHVNNSYECDIPIGAGICASYQTQTNSPRRARSVASQSIIAYTMSLGAENSVAYSNNSIACPTNFTISVTTEILPVSMTKTSVDCTMYICGDSTECSNLLLQYGSFCTQLNRALTGIAVEQDKNTQEVFAQVKQIYKTPPIKDFGGFNFSQILPDPSKPSKRSFIEDLLFNKVTLADAGFIKQYGDCLGDIAARDLICAQKFNGLTVLPPLLTDEMIAQYTSALLAGTITSGWTFGAGAALQIPFAMQMAYRFNGIGVTQNVLYENQKLIANQFNSAIGKIQDSLSSTASALGKLQDVVNQNAQALNTLVKQLSSNFGAISSVLNDILSRLDKVEAEVQIDRLITGRLQSLQTYVTQQLIRAAEIRASANLAATKMSECVLGQSKRVDFCGKGYHLMSFPQSAPHGVVFLHVTYVPAQEKNFTTAPAICHDGKAHFPREGVFVSNGTHWFVTQRNFCEPQIITTDNTFVSGNCDVVIGIVNNTVYDPLQPELDSGGGGSDIDPYKEFGSSYQLLNFLPLDFFPDLNALVDTATALYEEELTGREHCSPHHTAIRQALVCWDELTKLIAWMSSNITSEQVRTIIVNHVNDTWGLKVRQSLWFHLSCLTFGQHTVQEFLVSFGVWIRTPAPYRPPNAPILSTLPEHTVIC

SEQ ID NO: 11123 - protein, 1300 aa, Artificial Sequence
  SARS-CoV-2/India/1-27/2020__EPI_ISL_413522 spike protein (1-1146)(I713C_Y1109C) WhcAg construct
MFVFLVLLPLVSSQCVNLTTRTQLPPAYTNSFTRGVYYPDKVFRSSVLHSTQDLFLPFFSNVTWFHAIHVSGTNGTKRFDNPVLPFNDGVYFASTEKSNIIRGWIFGTTLDSKTQSLLIVNNATNVVIKVCEFQFCNDPFLGVYHKNNKSWMESEFRVYSSANNCTFEYVSQPFLMDLEGKQGNFKNLREFVFKNIDGYFKIYSKHTPINLVRDLPQGFSALEPLVDLPIGINITRFQTLLALHRSYLTPGDSSSGWTAGAAAYYVGYLQPRTFLLKYNENGTITDAVDCALDPLSETKCTLKSFTVEKGIYQTSNFRVQPTESIVRFPNITNLCPFGEVFNATRFASVYAWNRKRISNCVADYSVLYNSASFSTFKCYGVSPTKLNDLCFTNVYADSFVIRGDEVIQIAPGQTGKIADYNYKLPDDFTGCVIAWNSNNLDSKVGGNYNYLYRLFRKSNLKPFERDISTEIYQAGSTPCNGVEGFNCYFPLQSYGFQPTNGVGYQPYRVVVLSFELLHAPATVCGPKKSTNLVKNKCVNFNFNGLTGTGVLTESNKKFLPFQQFGRDIADTTDAVRDPQTLEILDITPCSFGGVSVITPGTNTSNQVAVLYQDVNCTEVPVAIHADQLTPTWRVYSTGSNVFQTRAGCLIGAEHVNNSYECDIPIGAGICASYQTQTNSPRRARSVASQSIIAYTMSLGAENSVAYSNNSIACPTNFTISVTTEILPVSMTKTSVDCTMYICGDSTECSNLLLQYGSFCTQLNRALTGIAVEQDKNTQEVFAQVKQIYKTPPIKDFGGFNFSQILPDPSKPSKRSFIEDLLFNKVTLADAGFIKQYGDCLGDIAARDLICAQKFNGLTVLPPLLTDEMIAQYTSALLAGTITSGWTFGAGAALQIPFAMQMAYRFNGIGVTQNVLYENQKLIANQFNSAIGKIQDSLSSTASALGKLQDVVNQNAQALNTLVKQLSSNFGAISSVLNDILSRLDKVEAEVQIDRLITGRLQSLQTYVTQQLIRAAEIRASANLAATKMSECVLGQSKRVDFCGKGYHLMSFPQSAPHGVVFLHVTYVPAQEKNFTTAPAICHDGKAHFPREGVFVSNGTHWFVTQRNFCEPQIITTDNTFVSGNCDVVIGIVNNTVYDPLQPELDSGGGGSDIDPYKEFGSSYQLLNFLPLDFFPDLNALVDTATALYEEELTGREHCSPHHTAIRQALVCWDELTKLIAWMSSNITSEQVRTIIVNHVNDTWGLKVRQSLWFHLSCLTFGQHTVQEFLVSFGVWIRTPAPYRPPNAPILSTLPEHTVIC

SEQ ID NO: 11124 - protein, 1295 aa, Artificial Sequence
  SARS-CoV-2/pangolin/Guangxi/P4L/2017__EPI_ISL_410538 spike protein (1-1141)(I708C_Y1104C) WhcAg construct
MFVFLFVLPLVSSQCVNLTTRTGIPPGYTNSSTRGVYYPDKVFRSSILHLTQDLFLPFFSNVTWFNTINYQGGFKKFDNPVLPFNDGVYFASTEKSNIIRGWIFGTTLDARTQSLLIVNNATNVVIKVCEFQFCTDPFLGVYYHNNNKTWVENEFRVYSSANNCTFEYISQPFLMDLEGKQGNFKNLREFVFKNVDGYFKIYSKHTPIDLVRDLPRGFAALEPLVDLPIGINITRFQTLLALHRSYLTPGNLESGWTTGAAAYYVGYLQQRTFLLSYNQNGTITDAVDCSLDPLSETKCTLKSLTVEKGIYQTSNFRVQPTISIVRFPNITNLCPFGEVFNASKFASVYAWNRKRISNCVADYSVLYNSTSFSTFKCYGVSPTKLNDLCFTNVYADSFVVKGDEVRQIAPGQTGVIADYNYKLPDDFTGCVIAWNSVKQDALTGGNYGYLYRLFRKSKLKPFERDISTEIYQAGSTPCNGQVGLNCYYPLERYGFHPTTGVNYQPFRVVVLSFELLNGPATVCGPKLSTTLVKDKCVNFNFNGLTGTGVLTTSKKQFLPFQQFGRDISDTTDAVRDPQTLEILDITPCSFGGVSVITPGTNTSNQVAVLYQDVNCTEVPMAIHAEQLTPAWRVYSAGANVFQTRAGCLVGAEHVNNSYECDIPVGAGICASYHSMSSLRSVNQRSIIAYTMSLGAENSVAYSNNSIACPTNFTISVTTEILPVSMTKTSVDCTMYICGDSIECSNLLLQYGSFCTQLNRALTGIAVEQDKNTQEVFAQVKQIYKTPPIKDFGGFNFSQILPDPSKPSKRSFIEDLLFNKVTLADAGFIKQYGDCLGDIAARDLICAQKFNGLTVLPPLLTDEMIAQYTSALLAGTITSGWTFGAGAALQIPFAMQMAYRFNGIGVTQNVLYENQKLIANQFNSAIGKIQDSLSSTASALGKLQDVVNQNAQALNTLVKQLSSNFGAISSVLNDILSRLDKVEAEVQIDRLITGRLQSLQTYVTQQLIRAAEIRASANLAATKMSECVLGQSKRVDFCGKGYHLMSFPQSAPHGVVFLHVTYVPAQEKNFTTAPAICHEGKAHFPREGVFVSNGTHWFITQRNFCEPQIITTDNTFVSGSCDVVIGIVNNTVYDPLQPELDSGGGGSDIDPYKEFGSSYQLLNFLPLDFFPDLNALVDTATALYEEELTGREHCSPHHTAIRQALVCWDELTKLIAWMSSNITSEQVRTIIVNHVNDTWGLKVRQSLWFHLSCLTFGQHTVQEFLVSFGVWIRTPAPYRPPNAPILSTLPEHTVIC

SEQ ID NO: 11125 - protein, 1295 aa, Artificial Sequence
  SARS-CoV-2/pangolin/Guangxi/P5L/2017__EPI_ISL_410540 spike protein (1-1141)(I708C_Y1104C) WhcAg construct
MFVFLFVLPLVSSQCVNLTTRTGIPPGYTNSSTRGVYYPDKVFRSSILHLTQDLFLPFFSNVTWFNTINYQGGFKKFDNPVLPFNDGVYFASTEKSNIIRGWIFGTTLDARTQSLLIVNNATNVVIKVCEFQFCTDPFLGVYYHNNNKTWVENEFRVYSSANNCTFEYISQPFLMDLEGKQGNFKNLREFVFKNVDGYFKIYSKHTPIDLVRDLPRGFAALEPLVDLPIGINITRFQTLLALHRSYLTPGKLESGWTTGAAAYYVGYLQQRTFLLSYNQNGTITDAVDCSLDPLSETKCTLKSLTVEKGIYQTSNFRVQPTISIVRFPNITNLCPFGEVFNASKFASVYAWNRKRISNCVADYSVLYNSTSFSTFKCYGVSPTKLNDLCFTNVYADSFVVKGDEVRQIAPGQTGVIADYNYKLPDDFTGCVIAWNSVKQDALTGGNYGYLYRLFRKSKLKPFERDISTEIYQAGSTPCNGQVGLNCYYPLERYGFHPTTGVNYQPFRVVVLSFELLNGPATVCGPKLSTTLVKDKCVNFNFNGLTGTGVLTTSKKQFLPFQQFGRDISDTTDAVRDPQTLEILDITPCSFGGVSVITPGTNTSNQVAVLYQDVNCTEVPMAIHAEQLTPAWRVYSAGANVFQTRAGCLVGAEHVNNSYECDIPVGAGICASYHSMSSFRSVNQRSIIAYTMSLGAENSVAYSNNSIACPTNFTISVTTEILPVSMTKTSVDCTMYICGDSIECSNLLLQYGSFCTQLNRALTGIAVEQDKNTQEVFAQVKQIYKTPPIKDFGGFNFSQILPDPSKPSKRSFIEDLLFNKVTLADAGFIKQYGDCLGDIAARDLICAQKFNGLTVLPPLLTDEMIAQYTSALLAGTITSGWTFGAGAALQIPFAMQMAYRFNGIGVTQNVLYENQKLIANQFNSAIGKIQDSLSSTASALGKLQDVVNQNAQALNTLVKQLSSNFGAISSVLNDILSRLDKVEAEVQIDRLITGRLQSLQTYVTQQLIRAAEIRASANLAATKMSECVLGQSKRVDFCGKGYHLMSFPQSAPHGVVFLHVTYVPAQEKNFTTAPAICHEGKAHFPREGVFVSNGTHWFITQRNFCEPQIITTDNTFVSGSCDVVIGIVNNTVYDPLQPELDSGGGGSDIDPYKEFGSSYQLLNFLPLDFFPDLNALVDTATALYEEELTGREHCSPHHTAIRQALVCWDELTKLIAWMSSNITSEQVRTIIVNHVNDTWGLKVRQSLWFHLSCLTFGQHTVQEFLVSFGVWIRTPAPYRPPNAPILSTLPEHTVIC

SEQ ID NO: 11126 - protein, 1295 aa, Artificial Sequence
  SARS-CoV-2/pangolin/Guangxi/P5E/2017__EPI_ISL_410541 spike protein (1-1141)(I708C_Y1104C) WhcAg construct
MFVFLFVLPLVSSQCVNLTTRTGIPPGYTNSSTRGVYYPDKVFRSSILHLTQDLFLPFFSNVTWFNTITYQGGSKKFDNPVLPFNDGVYFASTEKSNIIRGWIFGTTLDARTQSLLIVNNATNVVIKVCEFQFCTDPFLGVYYHNNNKTWVENEFRVYSSANNCTFEYISQPFLMDLEGKQGNFKNLREFVFKNVDGYFKIYSKHTPIDLVRDLPRGFAALEPLVDLPIGINITRFQTLLALHRSYLTPGKLESGWTTGAAAYYVGYLQQRTFLLSYNQNGTITDAVDCSLDPLSETKCTLKSLTVEKGIYQTSNFRVQPTISIVRFPNITNLCPFGEVFNASKFASVYAWNRKRISNCVADYSVLYNSTSFSTFKCYGVSPTKLNDLCFTNVYADSFVVKGDEVRQIAPGQTGVIADYNYKLPDDFTGCVIAWNSVKQDALTGDNYGYLYRLFRKSKLKPFERDISTEIYQAGSTPCNGQVGLNCYYPLERYGFHPTTGVNYQPFRVVVLSFELLNGPATVCGPKLSTTLVKDKCVNFNFNGLTGTGVLTTSKKQFLPFQQFGRDISDTTDAVRDPQTLEILDITPCSFGGVSVITPGTNTSNQVAVLYQDVNCTEVPMAIHAEQLTPAWRVYSAGANVFQTRAGCLVGAEHVNNSYECDIPVGAGICASYHSMSSFRSVNQRSIIAYTMSLGAENSVAYSNNSIACPTNFTISVTTEILPVSMTKTSVDCTMYICGDSIECSNLLLQYGSFCTQLNRALTGIAVEQDKNTQEVFAQVKQIYKTPPIKDFGGFNFSQILPDPSKPSKRSFIEDLLFNKVTLADAGFIKQYGDCLGDIAARDLICAQKFNGLTVLPPLLTDEMIAQYTSALLAGTITSGWTFGAGAALQIPFAMQMAYRFNGIGVTQNVLYENQKLIANQFNSAIGKIQDSLSSTASALGKLQDVVNQNAQALNTLVKQLSSNFGAISSVLNDILSRLDKVEAEVQIDRLITGRLQSLQTYVTQQLIRAAEIRASANLAATKMSECVLGQSKRVDFCGKGYHLMSFPQSAPHGVVFLHVTYVPAQEKNFTTAPAICHEGKAHFPREGVFVSNGTHWFITQRNFCEPQIITTDNTFVSGSCDVVIGIVNNTVYDPLQPELDSGGGGSDIDPYKEFGSSYQLLNFLPLDFFPDLNALVDTATALYEEELTGREHCSPHHTAIRQALVCWDELTKLIAWMSSNITSEQVRTIIVNHVNDTWGLKVRQSLWFHLSCLTFGQHTVQEFLVSFGVWIRTPAPYRPPNAPILSTLPEHTVIC

SEQ ID NO: 11127 - protein, 1293 aa, Artificial Sequence
  SARS-CoV-2/pangolin/Guangxi/P1E/2017__EPI_ISL_410539 spike protein (1-1139)(I706C_Y1102C) WhcAg construct
MFVFLFVLPLVSSQCVNLTTRTGIQPGYTNSSTRGVYYPDKVFRSSILHLTQDLFLPFFSNVTWFNTINYQGGFKKFDNPVLPFNDGVYFASTEKSNIIRGWIFGTTLDARTQSLLIVNNATNVVIKVCEFQFCTDPFLGVYYHNNNKTWVENEFRVYSSANNCTFEYISQPFLMDLEGKQGNFKNLREFVFKNVDGYFKIYSKHTPIDLVRDLPRGFAALEPLVDLPIGINITRFQTLLALHRSYLTPGKLESGWTTGAAAYYVGYLQQRTFLLSYNQNGTITDAVDCSLDPLSETKCTLKSLTVEKGIYQTSNFRVQPTISIVRFPNITNLCPFGEVFNASKFASVYAWNRKRISNCVADYSVLYNSTSFSTFKCYGVSPTKLNDLCFTNVYADSFVVKGDEVRQIAPGQTGVIADYNYKLPDDFTGCVIAWNSVKQDALTGGNYLYRLFRKSKLKPFERDISTEIYQAGSTPCNGQVGLNCYYPLERYGFHPTTGVNYQPFRVVVLSFELLNGPATVCGPKLSTTLVKDKCVNFNFNGLTGTGVLTTSKKQFLPFQQFGRDISDTTDAVRDPQTLEILDITPCSFGGVSVITPGTNTSNQVAVLYQDVNCTEVPMAIHAEQLTPAWRVYSAGANVFQTRAGCLVGAEHVNNSYECDIPVGAGICASYHSMSSLRSVNQRSIIAYTMSLGAENSVAYSNNSIACPTNFTISVTTEILPVSMTKTSVDCTMYICGDSIECSNLLLQYGSFCTQLNRALTGIAVEQDKNTQEVFAQVKQIYKTPPIKDFGGFNFSQILPDPSKPSKRSFIEDLLFNKVTLADAGFIKQYGDCLGDIAARDLICAQKFNGLTVLPPLLTDEMIAQYTSALLAGTITSGWTFGAGAALQIPFAMQMAYRFNGIGVTQNVLYENQKLIANQFNSAIGKIQDSLSSTASALGKLQDVVNQNAQALNTLVKQLSSNFGAISSVLNDILSRLDKVEAEVQIDRLITGRLQSLQTYVTQQLIRAAEIRASANLAATKMSECVLGQSKRVDFCGKGYHLMSFPQSAPHGVVFLHVTYVPAQEKNFTTAPAICHEGKAHFPREGVFVSNGTHWFITQRNFCEPQIITTDNTFVSGSCDVVIGIVNNTVYDPLQPELDSGGGGSDIDPYKEFGSSYQLLNFLPLDFFPDLNALVDTATALYEEELTGREHCSPHHTAIRQALVCWDELTKLIAWMSSNITSEQVRTIIVNHVNDTWGLKVRQSLWFHLSCLTFGQHTVQEFLVSFGVWIRTPAPYRPPNAPILSTLPEHTVIC

SEQ ID NO: 11128 - protein, 1301 aa, Artificial Sequence
  SARS-CoV-2/Wuhan/WIV05/2019__EPI_ISL_402128 spike protein (1-1147)(P715C_P1069C) WhcAg construct
MFVFLVLLPLVSSQCVNLTTRTQLPPAYTNSFTRGVYYPDKVFRSSVLHSTQDLFLPFFSNVTWFHAIHVSGTNGTKRFDNPVLPFNDGVYFASTEKSNIIRGWIFGTTLDSKTQSLLIVNNATNVVIKVCEFQFCNDPFLGVYYHKNNKSWMESEFRVYSSANNCTFEYVSQPFLMDLEGKQGNFKNLREFVFKNIDGYFKIYSKHTPINLVRDLPQGFSALEPLVDLPIGINITRFQTLLALHRSYLTPGDSSSGWTAGAAAYYVGYLQPRTFLLKYNENGTITDAVDCALDPLSETKCTLKSFTVEKGIYQTSNFRVQPTESIVRFPNITNLCPFGEVFNATRFASVYAWNRKRISNCVADYSVLYNSASFSTFKCYGVSPTKLNDLCFTNVYADSFVIRGDEVRQIAPGQTGKIADYNYKLPDDFTGCVIAWNSNNLDSKVGGNYNYLYRLFRKSNLKPFERDISTEIYQAGSTPCNGVEGFNCYFPLQSYGFQPTNGVGYQPYRVVVLSFELLHAPATVCGPKKSTNLVKNKCVNFNFNGLTGTGVLTESNKKFLPFQQFGRDIADTTDAVRDPQTLEILDITPCSFGGVSVITPGTNTSNQVAVLYQDVNCTEVPVAIHADQLTPTWRVYSTGSNVFQTRAGCLIGAEHVNNSYECDIPIGAGICASYQTQTNSPRRARSVASQSIIAYTMSLGAENSVAYSNNSIAICTNFTISVTTEILPVSMTKTSVDCTMYICGDSTECSNLLLQYGSFCTQLNRALTGIAVEQDKNTQEVFAQVKQIYKTPPIKDFGGFNFSQILPDPSKPSKRSFIEDLLFNKVTLADAGFIKQYGDCLGDIAARDLICAQKFNGLTVLPPLLTDEMIAQYTSALLAGTITSGWTFGAGAALQIPFAMQMAYRFNGIGVTQNVLYENQKLIANQFNSAIGKIQDSLSSTASALGKLQDVVNQNAQALNTLVKQLSSNFGAISSVLNDILSRLDKVEAEVQIDRLITGRLQSLQTYVTQQLIRAAEIRASANLAATKMSECVLGQSKRVDFCGKGYHLMSFPQSAPHGVVFLHVTYVCAQEKNFTTAPAICHDGKAHFPREGVFVSNGTHWFVTQRNFYEPQIITTDNTFVSGNCDVVIGIVNNTVYDPLQPELDSGGGGSDIDPYKEFGSSYQLLNFLPLDFFPDLNALVDTATALYEEELTGREHCSPHHTAIRQALVCWDELTKLIAWMSSNITSEQVRTIIVNHVNDTWGLKVRQSLWFHLSCLTFGQHTVQEFLVSFGVWIRTPAPYRPPNAPILSTLPEHTVIC

SEQ ID NO: 11129 - protein, 1297 aa, Artificial Sequence
  SARS-CoV-2/bat/Yunnan/RaTG13/2013__EPI_ISL_402131 spike protein (1-1143)(P711C_P1065C) WhcAg construct
MFVFLVLLPLVSSQCVNLTTRTQLPPAYTNSSTRGVYYPDKVFRSSVLHLTQDLFLPFFSNVTWFHAIHVSGTNGIKRFDNPVLPFNDGVYFASTEKSNIIRGWIFGTTLDSKTQSLLIVNNATNVVIKVCEFQFCNDPFLGVYYHKNNKSWMESEFRVYSSANNCTFEYVSQPFLMDLEGKQGNFKNLREFVFKNIDGYFKIYSKHTPINLVRDLPPGFSALEPLVDLPIGINITRFQTLLALHRSYLTPGDSSSGWTAGAAAYYVGYLQPRTFLLKYNENGTITDAVDCALDPLSETKCTLKSFTVEKGIYQTSNFRVQPTDSIVRFPNITNLCPFGEVFNATTFASVYAWNRKRISNCVADYSVLYNSTSFSTFKCYGVSPTKLNDLCFTNVYADSFVITGDEVRQIAPGQTGKIADYNYKLPDDFTGCVIAWNSKHIDAKEGGNFNYLYRLFRKANLKPFERDISTEIYQAGSKPCNGQTGLNCYYPLYRYGFYPTDGVGHQPYRVVVLSFELLNAPATVCGPKKSTNLVKNKCVNFNFNGLTGTGVLTESNKKFLPFQQFGRDIADTTDAVRDPQTLEILDITPCSFGGVSVITPGTNASNQVAVLYQDVNCTEVPVAIHADQLTPTWRVYSTGSNVFQTRAGCLIGAEHVNNSYECDIPIGAGICASYQTQTNSRSVASQSIIAYTMSLGAENSVAYSNNSIAICTNFTISVTTEILPVSMTKTSVDCTMYICGDSTECSNLLLQYGSFCTQLNRALTGIAVEQDKNTQEVFAQVKQIYKTPPIKDFGGFNFSQILPDPSKPSKRSFIEDLLFNKVTLADAGFIKQYGDCLGDIAARDLICAQKFNGLTVLPPLLTDEMIAQYTSALLAGTITSGWTFGAGAALQIPFAMQMAYRFNGIGVTQNVLYENQKLIANQFNSAIGKIQDSLSSTASALGKLQDVVNQNAQALNTLVKQLSSNFGAISSVLNDILSRLDKVEAEVQIDRLITGRLQSLQTYVTQQLIRAAEIRASANLAATKMSECVLGQSKRVDFCGKGYHLMSFPQSAPHGVVFLHVTYVCAQEKNFTTAPAICHDGKAHFPREGVFVSNGTHWFVTQRNFYEPQIITTDNTFVSGSCDVVIGIVNNTVYDPLQPELDSGGGGSDIDPYKEFGSSYQLLNFLPLDFFPDLNALVDTATALYEEELTGREHCSPHHTAIRQALVCWDELTKLIAWMSSNITSEQVRTIIVNHVNDTWGLKVRQSLWFHLSCLTFGQHTVQEFLVSFGVWIRTPAPYRPPNAPILSTLPEHTVIC

SEQ ID NO: 11130 - protein, 1301 aa, Artificial Sequence
  SARS-CoV-2/Wuhan/HBCDC-HB-01/2019__EPI_ISL_402132 spike protein (1-1147)(P715C_P1069C) WhcAg construct
MFVFLVLLPLVSSQCVNLTTRTQLPPAYTNSITRGVYYPDKVFRSSVLHSTQDLFLPFFSNVTWFHAIHVSGTNGTKRFDNPVLPFNDGVYFASTEKSNIIRGWIFGTTLDSKTQSLLIVNNATNVVIKVCEFQFCNDPFLGVYYHKNNKSWMESEFRVYSSANNCTFEYVSQPFLMDLEGKQGNFKNLREFVFKNIDGYFKIYSKHTPINLVRDLPQGFSALEPLVDLPIGINITRFQTLLALHRSYLTPGDSSSGWTAGAAAYYVGYLQPRTFLLKYNENGTITDAVDCALDPLSETKCTLKSFTVEKGIYQTSNFRVQPTESIVRFPNITNLCPFGEVFNATRFASVYAWNRKRISNCVADYSVLYNSASFSTFKCYGVSPTKLNDLCFTNVYADSFVIRGDEVRQIAPGQTGKIADYNYKLPDDFTGCVIAWNSNNLDSKVGGNYNYLYRLFRKSNLKPFERDISTEIYQAGSTPCNGVEGFNCYFPLQSYGFQPTNGVGYQPYRVVVLSFELLHAPATVCGPKKSTNLVKNKCVNFNFNGLTGTGVLTESNKKFLPFQQFGRDIADTTDAVRDPQTLEILDITPCSFGGVSVITPGTNTSNQVAVLYQDVNCTEVPVAIHADQLTPTWRVYSTGSNVFQTRAGCLIGAEHVNNSYECDIPIGAGICASYQTQTNSPRRARSVASQSIIAYTMSLGAENSVAYSNNSIAICTNFTISVTTEILPVSMTKTSVDCTMYICGDSTECSNLLLQYGSFCTQLNRALTGIAVEQDKNTQEVFAQVKQIYKTPPIKDFGGFNFSQILPDPSKPSKRSFIEDLLFNKVTLADAGFIKQYGDCLGDIAARDLICAQKFNGLTVLPPLLTDEMIAQYTSALLAGTITSGWTFGAGAALQIPFAMQMAYRFNGIGVTQNVLYENQKLIANQFNSAIGKIQDSLSSTASALGKLQDVVNQNAQALNTLVKQLSSNFGAISSVLNDILSRLDKVEAEVQIDRLITGRLQSLQTYVTQQLIRAAEIRASANLAATKMSECVLGQSKRVDFCGKGYHLMSFPQSAPHGVVFLHVTYVCAQEKNFTTAPAICHDGKAHFPREGVFVSNGTHWFVTQRNFYEPQIITTDNTFVSGNCDVVIGIVNNTVYDPLQPELDSGGGGSDIDPYKEFGSSYQLLNFLPLDFFPDLNALVDTATALYEEELTGREHCSPHHTAIRQALVCWDELTKLIAWMSSNITSEQVRTIIVNHVNDTWGLKVRQSLWFHLSCLTFGQHTVQEFLVSFGVWIRTPAPYRPPNAPILSTLPEHTVIC

SEQ ID NO: 11131 - protein, 1301 aa, Artificial Sequence
  SARS-CoV-2/Guangdong/20SF028/2020__EPI_ISL_403936 spike protein (1-1147)(P715C_P1069C) WhcAg construct
MFVFLVLLPLVSSQCVNLTTRTQLPPAYTNSFTRGVYYPDKVFRSSVLYSTQDLFLPFFSNVTWFHAIHVSGTNGTKRFDNPVLPFNDGVYFASTEKSNIIRGWIFGTTLDSKTQSLLIVNNATNVVIKVCEFQFCNDPFLGVYYHKNNKSWMESEFRVYSSANNCTFEYVSQPFLMDLEGKQGNFKNLREFVFKNIDGYFKIYSKHTPINLVRDLPQGFSALEPLVDLPIGINITRFQTLLALHRSYLTPGDSSSGWTAGAAAYYVGYLQPRTFLLKYNENGTITDAVDCALDPLSETKCTLKSFTVEKGIYQTSNFRVQPTESIVRFPNITNLCPFGEVFNATRFASVYAWNRKRISNCVADYSVLYNSASFSTFKCYGVSPTKLNDLCFTNVYADSFVIRGDEVRQIAPGQTGKIADYNYKLPDDFTGCVIAWNSNNLDSKVGGNYNYLYRLFRKSNLKPFERDISTEIYQAGSTPCNGVEGFNCYFPLQSYGFQPTNGVGYQPYRVVVLSFELLHAPATVCGPKKSTNLVKNKCVNFNFNGLTGTGVLTESNKKFLPFQQFGRDIADTTDAVRDPQTLEILDITPCSFGGVSVITPGTNTSNQVAVLYQDVNCTEVPVAIHADQLTPTWRVYSTGSNVFQTRAGCLIGAEHVNNSYECDIPIGAGICASYQTQTNSPRRARSVASQSIIAYTMSLGAENSVAYSNNSIAICTNFTISVTTEILPVSMTKTSVDCTMYICGDSTECSNLLLQYGSFCTQLNRALTGIAVEQDKNTQEVFAQVKQIYKTPPIKDFGGFNFSQILPDPSKPSKRSFIEDLLFNKVTLADAGFIKQYGDCLGDIAARDLICAQKFNGLTVLPPLLTDEMIAQYTSALLAGTITSGWTFGAGAALQIPFAMQMAYRFNGIGVTQNVLYENQKLIANQFNSAIGKIQDSLSSTASALGKLQDVVNQNAQALNTLVKQLSSNFGAISSVLNDILSRLDKVEAEVQIDRLITGRLQSLQTYVTQQLIRAAEIRASANLAATKMSECVLGQSKRVDFCGKGYHLMSFPQSAPHGVVFLHVTYVCAQEKNFTTAPAICHDGKAHFPREGVFVSNGTHWFVTQRNFYEPQIITTDNTFVSGNCDVVIGIVNNTVYDPLQPELDSGGGGSDIDPYKEFGSSYQLLNFLPLDFFPDLNALVDTATALYEEELTGREHCSPHHTAIRQALVCWDELTKLIAWMSSNITSEQVRTIIVNHVNDTWGLKVRQSLWFHLSCLTFGQHTVQEFLVSFGVWIRTPAPYRPPNAPILSTLPEHTVIC

SEQ ID NO: 11132 - protein, 1301 aa, Artificial Sequence
  SARS-CoV-2/Shenzhen/SZTH-001/2020__EPI_ISL_406592 spike protein (1-1147)(P715C_P1069C) WhcAg construct
MFVFLVLLPLVSSQCVNLTTRTQLPPAYTNSFTRGVYYPDKVFRSSVLHSTQDLFLPFFSNVTWFHAIHVSGTNGTKRFDNPVLPFNDGVYFASTEKSNIIRGWIFGTTLDSKTQSLLIVNNATNVVIKVCEFQFCNDPFLGVYYHKNNKSWMESEFRVYSSANNCTFEYVSQPFLMDLEGKQGNFKNLREFVFKNIDGYFKIYSKHTPINLVRDLPQGFSALEPLVDLPIGINITRFQTLLALHRSYLTPGDSSSGWTAGAAAYYVGYLQPRTFLLKYNENGTITDAVDCALDPLSETKCTLKSFTVEKGIYQTSNFRVQPTESIVRFPNITNLCPFGEVFNATRFASVYAWNRKRISNCVADYSVLYNSASFSTFKCYGVSPTKLNDLCFTNVYADSFVIRGDEVRQIAPGQTGKIADYNYKLPDDFTGCVIAWNSNNLDSKVGGNYNYLYRLFRKSNLKPFERDISTEIYQAGSTPCNGVEGFNCYFPLQSYGFQPTNGVGYQPYRVVVLSFELLHAPATVCGPKKSTNLVKNKCVNFNFNGLTGTGVLTESNKKFLPFQQFGRDIADTTDAVRDPQTLEILDITPCSFGGVSVITPGTNTSNQVAVLYQDVNCTEVPVAIHADQLTPTWRVYSTGSNVFQTRAGCLIGAEHVNNSYECDIPIGAGICASYQTQTNSPRRARSVASQSIIAYTMSLGAENSVAYSNNSIAICTNFTISVTTEILPVSMTKTSVDCTMYICGDSTECSNLLLQYGSFCTQLNRALTGIAVEQDKNTQEVFAQVKQIYKTPPIKDFGGFNFSQILPDPSKPSKRSFIEDLLFNKVTLADAGFIKQYGDCLGDIAARDLICAQKFNGLTVLPPLLTDEMIAQYTSALLAGTITSGWTFGAGAALQIPFAMQMAYRFNGIGVTQNVLYENQKLIANQFNSAIGKIQDSLSSTASALGKLQDVVNQNAQALNTLVKQLSSNFGAISSVLNDILSRLDKVEAEVQIDRLITGRLQSLQTYVTQQLIRAAEIRASANLAATKMSECVLGQSKRVDFCGKGYHLMSFPQSAPHGVVFLHVTYVCAQEKNFTTAPAICHDGKAHFPREGVFVSNGTHWFVTQRNFYEPQIITTDNTFVSGNCDVLIGIVNNTVYDPLQPELDSGGGGSDIDPYKEFGSSYQLLNFLPLDFFPDLNALVDTATALYEEELTGREHCSPHHTAIRQALVCWDELTKLIAWMSSNITSEQVRTIIVNHVNDTWGLKVRQSLWFHLSCLTFGQHTVQEFLVSFGVWIRTPAPYRPPNAPILSTLPEHTVIC

SEQ ID NO: 11133 - protein, 1301 aa, Artificial Sequence
  SARS-CoV-2/Shenzhen/SZTH-004/2020__EPI_ISL_406595 spike protein (1-1147)(P715C_P1069C) WhcAg construct
MFVFLVLLPLVSSQCVNLTTRTQLPPAYTNSFTRGVYYPDKVFRSSVLHSTQDLFLPFFSNVTWFHAIHVSGTNGTKRFDNPVLPFNDGVYFASTEKSNIIRGWIFGTTLDSKTQSLLIVNNATNVVIKVCEFQFCNDPFLGVYYHKNNKSWMESEFRVYSSANNCTFEYVSQPFLMDLEGKQGNFKNLREFVFKNIDGYFKIYSKHTPINLVRDLPQGFSALEPLVDLPIGINITRFQTLLALHRSYLTPGDSSSGWTAGAAAYYVGYLQPRTFLLKYNENGTITDAVDCALDPLSETKCTLKSFTVEKGIYQTSNFRVQPTESIVRFPNITNLCPFGEVFNATRFASVYAWDRKRISNCVAYYSVLYNSASFSTFKCYGVSPTKLNDLCFTNVYADSFVIRGDEVRQIAPGQTGKIADYNYKLPDDFTGCVIAWNSNNLDSKVGGNYNYLYRLFRKSNLKPFERDISTEIYQAGSTPCNGVEGFNCYFPLQSYGFQPTNGVGYQPYRVVVLSFELLHAPATVCGPKKSTNLVKNKCVNFNFNGLTGTGVLTESNKKFLPFQQFGRDIADTTDAVRDPQTLEILDITPCSFGGVSVITPGTNTSNQVAVLYQDVNCTEVPVAIHADQLTPTWRVYSTGSNVFQTRAGCLIGAEHVNNSYECDIPIGAGICASYQTQTNSPRRARSVASQSIIAYTMSLGAENSVAYSNNSIAICTNFTISVTTEILPVSMTKTSVDCTMYICGDSTECSNLLLQYGSFCTQLNRALTGIAVEQDKNTQEVFAQVKQIYKTPPIKDFGGFNFSQILPDPSKPSKRSFIEDLLFNKVTLADAGFIKQYGDCLGDIAARDLICAQKFNGLTVLPPLLTDEMIAQYTSALLAGTITSGWTFGAGAALQIPFAMQMAYRFNGIGVTQNVLYENQKLIANQFNSAIGKIQDSLSSTASALGKLQDVVNQNAQALNTLVKQLSSNFGAISSVLNDILSRLDKVEAEVQIDRLITGRLQSLQTYVTQQLIRAAEIRASANLAATKMSECVLGQSKRVDFCGKGYHLMSFPQSAPHGVVFLHVTYVCAQEKNFTTAPAICHDGKAHFPREGVFVSNGTHWFVTQRNFYEPQIITTDNTFVSGNCDVVIGIVNNTVYDPLQPELDSGGGGSDIDPYKEFGSSYQLLNFLPLDFFPDLNALVDTATALYEEELTGREHCSPHHTAIRQALVCWDELTKLIAWMSSNITSEQVRTIIVNHVNDTWGLKVRQSLWFHLSCLTFGQHTVQEFLVSFGVWIRTPAPYRPPNAPILSTLPEHTVIC

SEQ ID NO: 11134 - protein, 1301 aa, Artificial Sequence
  SARS-CoV-2/France/IDF0372/2020__EPI_ISL_406596 spike protein (1-1147)(P715C_P1069C) WhcAg construct
MFVFLVLLPLVSSQCVNLTTRTQLPPAYTNSFTRGVYYPDKVFRSSVLHSTQDLFLPFFSNVTWFHAIHVSGTNGTKRFDNPVLPFNDGVYFASTEKSNIIRGWIFGTTLDSKTQSLLIVNNATNVVIKVCEFQFCNDPFLGVYYHKNNKSWMESEFRVYSSANNCTFEYVSQPFLMDLEGKQGNFKNLREFVFKNIDGYFKIYSKHTPINLVRDLPQGFSALEPLVDLPIGINITRFQTLLALHRSYLTPGDSSSGWTAGAAAYYVGYLQPRTFLLKYNENGTITDAVDCALDPLSETKCTLKSFTVEKGIYQTSNFRVQPTESIVRFPNITNLCPFGEVFNATRFASVYAWNRKRISNCVADYSFLYNSASFSTFKCYGVSPTKLNDLCFTNVYADSFVIRGDEVRQIAPGQTGKIADYNYKLPDDFTGCVIAWNSNNLDSKVGGNYNYLYRLFRKSNLKPFERDISTEIYQAGSTPCNGVEGFNCYFPLQSYGFQPTNGVGYQPYRVVVLSFELLHAPATVCGPKKSTNLVKNKCVNFNFNGLTGTGVLTESNKKFLPFQQFGRDIADTTDAVRDPQTLEILDITPCSFGGVSVITPGTNTSNQVAVLYQDVNCTEVPVAIHADQLTPTWRVYSTGSNVFQTRAGCLIGAEHVNNSYECDIPIGAGICASYQTQTNSPRRARSVASQSIIAYTMSLGAENSVAYSNNSIAICTNFTISVTTEILPVSMTKTSVDCTMYICGDSTECSNLLLQYGSFCTQLNRALTGIAVEQDKNTQEVFAQVKQIYKTPPIKDFGGFNFSQILPDPSKPSKRSFIEDLLFNKVTLADAGFIKQYGDCLGDIAARDLICAQKFNGLTVLPPLLTDEMIAQYTSALLAGTITSGWTFGAGAALQIPFAMQMAYRFNGIGVTQNVLYENQKLIANQFNSAIGKIQDSLSSTASALGKLQDVVNQNAQALNTLVKQLSSNFGAISSVLNDILSRLDKVEAEVQIDRLITGRLQSLQTYVTQQLIRAAEIRASANLAATKMSECVLGQSKRVDFCGKGYHLMSFPQSAPHGVVFLHVTYVCAQEKNFTTAPAICHDGKAHFPREGVFVSNGTHWFVTQRNFYEPQIITTDNTFVSGNCDVVIGIVNNTVYDPLQPELDSGGGGSDIDPYKEFGSSYQLLNFLPLDFFPDLNALVDTATALYEEELTGREHCSPHHTAIRQALVCWDELTKLIAWMSSNITSEQVRTIIVNHVNDTWGLKVRQSLWFHLSCLTFGQHTVQEFLVSFGVWIRTPAPYRPPNAPILSTLPEHTVIC

SEQ ID NO: 11135 - protein, 1301 aa, Artificial Sequence
  SARS-CoV-2/Australia/VIC01/2020__EPI_ISL_406844 spike protein (1-1147)(P715C_P1069C) WhcAg construct
MFVFLVLLPLVSSQCVNLTTRTQLPPAYTNSFTRGVYYPDKVFRSSVLHSTQDLFLPFFSNVTWFHAIHVSGTNGTKRFDNPVLPFNDGVYFASTEKSNIIRGWIFGTTLDSKTQSLLIVNNATNVVIKVCEFQFCNDPFLGVYYHKNNKSWMESEFRVYSSANNCTFEYVSQPFLMDLEGKQGNFKNLREFVFKNIDGYFKIYSKHTPINLVRDLPQGFSALEPLVDLPIGINITRFQTLLALHRRYLTPGDSSSGWTAGAAAYYVGYLQPRTFLLKYNENGTITDAVDCALDPLSETKCTLKSFTVEKGIYQTSNFRVQPTESIVRFPNITNLCPFGEVFNATRFASVYAWNRKRISNCVADYSVLYNSASFSTFKCYGVSPTKLNDLCFTNVYADSFVIRGDEVRQIAPGQTGKIADYNYKLPDDFTGCVIAWNSNNLDSKVGGNYNYLYRLFRKSNLKPFERDISTEIYQAGSTPCNGVEGFNCYFPLQSYGFQPTNGVGYQPYRVVVLSFELLHAPATVCGPKKSTNLVKNKCVNFNFNGLTGTGVLTESNKKFLPFQQFGRDIADTTDAVRDPQTLEILDITPCSFGGVSVITPGTNTSNQVAVLYQDVNCTEVPVAIHADQLTPTWRVYSTGSNVFQTRAGCLIGAEHVNNSYECDIPIGAGICASYQTQTNSPRRARSVASQSIIAYTMSLGAENSVAYSNNSIAICTNFTISVTTEILPVSMTKTSVDCTMYICGDSTECSNLLLQYGSFCTQLNRALTGIAVEQDKNTQEVFAQVKQIYKTPPIKDFGGFNFSQILPDPSKPSKRSFIEDLLFNKVTLADAGFIKQYGDCLGDIAARDLICAQKFNGLTVLPPLLTDEMIAQYTSALLAGTITSGWTFGAGAALQIPFAMQMAYRFNGIGVTQNVLYENQKLIANQFNSAIGKIQDSLSSTASALGKLQDVVNQNAQALNTLVKQLSSNFGAISSVLNDILSRLDKVEAEVQIDRLITGRLQSLQTYVTQQLIRAAEIRASANLAATKMSECVLGQSKRVDFCGKGYHLMSFPQSAPHGVVFLHVTYVCAQEKNFTTAPAICHDGKAHFPREGVFVSNGTHWFVTQRNFYEPQIITTDNTFVSGNCDVVIGIVNNTVYDPLQPELDSGGGGSDIDPYKEFGSSYQLLNFLPLDFFPDLNALVDTATALYEEELTGREHCSPHHTAIRQALVCWDELTKLIAWMSSNITSEQVRTIIVNHVNDTWGLKVRQSLWFHLSCLTFGQHTVQEFLVSFGVWIRTPAPYRPPNAPILSTLPEHTVIC

SEQ ID NO: 11136 - protein, 1301 aa, Artificial Sequence
  SARS-CoV-2/Germany/BavPat1/2020__EPI_ISL_406862 spike protein (1-1147)(P715C_P1069C) WhcAg construct
MFVFLVLLPLVSSQCVNLTTRTQLPPAYTNSFTRGVYYPDKVFRSSVLHSTQDLFLPFFSNVTWFHAIHVSGTNGTKRFDNPVLPFNDGVYFASTEKSNIIRGWIFGTTLDSKTQSLLIVNNATNVVIKVCEFQFCNDPFLGVYYHKNNKSWMESEFRVYSSANNCTFEYVSQPFLMDLEGKQGNFKNLREFVFKNIDGYFKIYSKHTPINLVRDLPQGFSALEPLVDLPIGINITRFQTLLALHRSYLTPGDSSSGWTAGAAAYYVGYLQPRTFLLKYNENGTITDAVDCALDPLSETKCTLKSFTVEKGIYQTSNFRVQPTESIVRFPNITNLCPFGEVFNATRFASVYAWNRKRISNCVADYSVLYNSASFSTFKCYGVSPTKLNDLCFTNVYADSFVIRGDEVRQIAPGQTGKIADYNYKLPDDFTGCVIAWNSNNLDSKVGGNYNYLYRLFRKSNLKPFERDISTEIYQAGSTPCNGVEGFNCYFPLQSYGFQPTNGVGYQPYRVVVLSFELLHAPATVCGPKKSTNLVKNKCVNFNFNGLTGTGVLTESNKKFLPFQQFGRDIADTTDAVRDPQTLEILDITPCSFGGVSVITPGTNTSNQVAVLYQGVNCTEVPVAIHADQLTPTWRVYSTGSNVFQTRAGCLIGAEHVNNSYECDIPIGAGICASYQTQTNSPRRARSVASQSIIAYTMSLGAENSVAYSNNSIAICTNFTISVTTEILPVSMTKTSVDCTMYICGDSTECSNLLLQYGSFCTQLNRALTGIAVEQDKNTQEVFAQVKQIYKTPPIKDFGGFNFSQILPDPSKPSKRSFIEDLLFNKVTLADAGFIKQYGDCLGDIAARDLICAQKFNGLTVLPPLLTDEMIAQYTSALLAGTITSGWTFGAGAALQIPFAMQMAYRFNGIGVTQNVLYENQKLIANQFNSAIGKIQDSLSSTASALGKLQDVVNQNAQALNTLVKQLSSNFGAISSVLNDILSRLDKVEAEVQIDRLITGRLQSLQTYVTQQLIRAAEIRASANLAATKMSECVLGQSKRVDFCGKGYHLMSFPQSAPHGVVFLHVTYVCAQEKNFTTAPAICHDGKAHFPREGVFVSNGTHWFVTQRNFYEPQIITTDNTFVSGNCDVVIGIVNNTVYDPLQPELDSGGGGSDIDPYKEFGSSYQLLNFLPLDFFPDLNALVDTATALYEEELTGREHCSPHHTAIRQALVCWDELTKLIAWMSSNITSEQVRTIIVNHVNDTWGLKVRQSLWFHLSCLTFGQHTVQEFLVSFGVWIRTPAPYRPPNAPILSTLPEHTVIC

SEQ ID NO: 11137 - protein, 1301 aa, Artificial Sequence
  SARS-CoV-2/Wuhan/HBCDC-HB-02/2020__EPI_ISL_412978 spike protein (1-1147)(P715C_P1069C) WhcAg construct
MFVFLVLLPLVSSQCVNLTTRTQLPPAYTNSFTRGVYYPDKVFRSSVLHSTQDLFLPFFSNVTWFHAIHVSGTNGTKRFDNPVLPFNDGVYFASTEKSNIIRGWIFGTTLDSKTQSLLIVNNATNVVIKVCEFQFCNDPFLGVYYHKNNKSWMESEFRVYSSANNCTFEYVSQPFLMDLEGKQGNFKNLREFVFKNIDGYFKIYSKHTPINLVRDLPQGFSALEPLVDLPIGINITRFQTLLALHRSYLTPGDSSSGWTAGAAAYYVGYLQPRTFLLKYNENGTITDAVDCALDPLSETKCTLKSFTVEKGIYQTSNFRVQPTESIVRFPNITNLCPFGEVFNATRFASVYAWNRKRISNCVADYSVLYNSASFSTFKCYGVSPTKLNDLCFTNVYADSFVIRGDEVRQIAPGQTGKIADYNYKLPDDFTGCVIAWNSNNLDSKVGGNYNYLYRLFRKSNLKPFERDISTEIYQAGSTPCNGVEGFNCYFPLQSYGFQPTNGVGYQPYRVVVLSFELLHAPATVCGPKKSTNLVKNKCVNFNFNGLTGTGVLTESNKKFLPFQQFGRDIADTTDAVRDPQTLEILDITPCSFGGVSVITPGTNTSNQVAVLYQDVNCTEVPVAIHADQLTPTWRVYSTGSNVFQTRAGCLIGAEHVNNSYECDIPIGAGICASYQTQTNSPRRARSVASQSIIAYTMSLGAENSVAYSNNSIAICTNFTISVTTEILPVSMTKTSVDCTMYICGDSTECSNFLLQYGSFCTQLNRALTGIAVEQDKNTQEVFAQVKQIYKTPPIKDFGGFNFSQILPDPSKPSKRSFIEDLLFNKVTLADAGFIKQYGDCLGDIAARDLICAQKFNGLTVLPPLLTDEMIAQYTSALLAGTITSGWTFGAGAALQIPFAMQMAYRFNGIGVTQNVLYENQKLIANQFNSAIGKIQDSLSSTASALGKLQDVVNQNAQALNTLVKQLSSNFGAISSVLNDILSRLDKVEAEVQIDRLITGRLQSLQTYVTQQLIRAAEIRASANLAATKMSECVLGQSKRVDFCGKGYHLMSFPQSAPHGVVFLHVTYVCAQEKNFTTAPAICHDGKAHFPREGVFVSNGTHWFVTQRNFYEPQIITTDNTFVSGNCDVVIGIVNNTVYDPLQPELDSGGGGSDIDPYKEFGSSYQLLNFLPLDFFPDLNALVDTATALYEEELTGREHCSPHHTAIRQALVCWDELTKLIAWMSSNITSEQVRTIIVNHVNDTWGLKVRQSLWFHLSCLTFGQHTVQEFLVSFGVWIRTPAPYRPPNAPILSTLPEHTVIC

SEQ ID NO: 11138 - protein, 1301 aa, Artificial Sequence
  SARS-CoV-2/Australia/QLD02/2020__EPI_ISL_407896 spike protein (1-1147)(P715C_P1069C) WhcAg construct
MFVFLVLLPLVSSQCVNLTTRTQLPPAYTNSFTRGVYYPDKVFRSSVLHSTQDLFLPFFSNVTWFHAIHVSGTNGTKRFDNPVLPFNDGVYFASTEKSNIIRGWIFGTTLDSKTQSLLIVNNATNVVIKVCEFQFCNDPFLGVYYHKNNKSWMESEFRVYSSANNCTFEYVSQPFLMDLEGKQGNFKNLREFVFKNIDGYFKIYSKHTPINLVRDLPQGFSALEPLVDLPIGINITRFQTLLALHRSYLTPGDSSSGWTAGAAAYYVGYLQPRTFLLKYNENGTITDAVDCALDPLSETKCTLKSFTVEKGIYQTSNFRVQPTESIVRFPNITNLCPFGEVFNATRFASVYAWNRKRISNCVADYSVLYNSASFSTFKCYGVSPTKLNDLCFTNVYADSFVIRGDEVRQIAPGQTGKIADYNYKLPDDFTGCVIAWNSNNLDSKVGGNYNYLYRLFRKSNLKPFERDISTEIYQAGSTPCNGVEGFNCYFPLQSYGFQPTNGVGYQPYRVVVLSFELLHAPATVCGPKKSTNLVKNKCVNFNFNGLTGTGVLTESNKKFLPFQQFGRDIADTTDAVRDPQTLEILDITPCSFGGVSVITPGTNTSNQVAVLYQDVNCTEVPVAIHADQLTPTWRVYSTGSNVFQTRAGCLIGAEHVNNSYECDIPIGAGICASYQTQTNSPRRARSVASQSIIAYTMSLGAENSVAYSNNSIAICTNFTISVTTEILPVSMTKTSVDCTMYICGDSTECSNLLLQYGSFCTQLNRALTGIAVEQDKNTQEVFAQVKQIYKTPPIKDFGGFNFSQILPDPSKPSKRSFIEDLLFNKVTLADAGFIKQYGDCLGDIAARDLICAQKFNGLTVLPPLLTDEMIAQYTSALLAGTITSGWTFGAGAALQIPFAMQMAYRFNGIGVTQNVLYENQKLIANQFNSAIGKIQDSLSSTASALGKLQDVVNQNAQALNTLVKQLSSNFGAISSVLNDILSRLDKVEAEVQIDRLITGRLQSLQTYVTQQLIRAAEIRASANLAATKMSECVLGQSKRVDFCGKGYHLMSFPQSAPHGVVFLHVTYVCAQEKNFTTAPAICHDGKAHFPREGVFVSNGTHWFVTQRNFYEPQIITTDNTFVSGNCDVVIGIVNNTVYDPLQLELDSGGGGSDIDPYKEFGSSYQLLNFLPLDFFPDLNALVDTATALYEEELTGREHCSPHHTAIRQALVCWDELTKLIAWMSSNITSEQVRTIIVNHVNDTWGLKVRQSLWFHLSCLTFGQHTVQEFLVSFGVWIRTPAPYRPPNAPILSTLPEHTVIC

SEQ ID NO: 11139 - protein, 1301 aa, Artificial Sequence
  SARS-CoV-2/India/1-31/2020__EPI_ISL_413523 spike protein (1-1147)(P715C_P1069C) WhcAg construct
MFVFLVLLPLVSSQCVNLTTRTQLPPAYTNSFTRGVYYPDKVFRSSVLHSTQDLFLPFFSNVTWFHAIHVSGTNGTKRFDNPVLPFNDGVYFASTEKSNIIRGWIFGTTLDSKTQSLLIVNNATNVVIKVCEFQFCNDPFLGVYYHKNNKSWMESEFRVYSSANNCTFEYVSQPFLMDLEGKQGNFKNLREFVFKNIDGYFKIYSKHTPINLVRDLPQGFSALEPLVDLPIGINITRFQTLLALHRSYLTPGDSSSGWTAGAAAYYVGYLQPRTFLLKYNENGTITDAVDCALDPLSETKCTLKSFTVEKGIYQTSNFRVQPTESIVRFPNITNLCPFGEVFNATRFASVYAWNRKRISNCVADYSVLYNSASFSTFKCYGVSPTKLNDLCFTNVYADSFVIRGDEVRQIAPGQTGKIADYNYKLPDDFTGCVIAWNSNNLDSKVGGNYNYLYRLFRKSNLKPFERDISTEIYQAGSTPCNGVEGFNCYFPLQSYGFQPTNGVGYQPYRVVVLSFELLHAPATVCGPKKSTNLVKNKCVNFNFNGLTGTGVLTESNKKFLPFQQFGRDIADTTDAVRDPQTLEILDITPCSFGGVSVITPGTNTSNQVAVLYQDVNCTEVPVAIHADQLTPTWRVYSTGSNVFQTRAGCLIGAEHVNNSYECDIPIGAGICASYQTQTNSPRRARSVASQSIIAYTMSLGAENSVAYSNNSIAICTNFTISVTTEILPVSMTKTSVDCTMYICGDSTECSNLLLQYGSFCTQLNRALTGIAVEQDKNTQEVFAQVKQIYKTPPIKDFGGFNFSQILPDPSKPSKRSFIEDLLFNKVTLADAGFIKQYGDCLGDIAARDLICAQKFNGLTVLPPLLTDEMIAQYTSALLAGTITSGWTFGAGAALQIPFAMQMAYRFNGIGVTQNVLYENQKLIANQFNSVIGKIQDSLSSTASALGKLQDVVNQNAQALNTLVKQLSSNFGAISSVLNDILSRLDKVEAEVQIDRLITGRLQSLQTYVTQQLIRAAEIRASANLAATKMSECVLGQSKRVDFCGKGYHLMSFPQSAPHGVVFLHVTYVCAQEKNFTTAPAICHDGKAHFPREGVFVSNGTHWFVTQRNFYEPQIITTDNTFVSGNCDVVIGIVNNTVYDPLQPELDSGGGGSDIDPYKEFGSSYQLLNFLPLDFFPDLNALVDTATALYEEELTGREHCSPHHTAIRQALVCWDELTKLIAWMSSNITSEQVRTIIVNHVNDTWGLKVRQSLWFHLSCLTFGQHTVQEFLVSFGVWIRTPAPYRPPNAPILSTLPEHTVIC

SEQ ID NO: 11140 - protein, 1301 aa, Artificial Sequence
  SARS-CoV-2/Guangdong/GD2020087-P0008/2020__EPI_ISL_413863 spike protein (1-1147)(P715C_P1069C) WhcAg construct
MFVFLVLLPLVSSQCVNLTTRTQLPPAYTNSFTRGVYYPDKVFRSSVLHSTQDLFLPFFSNVTWFHAIHVSGTNGTKRFDNPVLPFNDGVYFASTEKSNIIRGWIFGTTLDSKTQSLLIVNNATNVVIKVCEFQFCNDPFLGVYYHKNNKSWMESEFRVYSSANNCTFEYVSQPFLMDLEGKQGNFKNLREFVFKNIDGYFKIYSKHTPINLVRDLPQGFSALEPLVDLPIGINITRFQTLLALHRSYLTPGDSSSGWTAGAAAYYVGYLQPRTFLLKYNENGTITDAVDCALDPLSETKCTLKSFTVEKGIYQTSNFRVQPTESIVRFPNITNLCPFGEVFNATRFASVYAWNRKRISNCVADYSVLYNSASFSTFKCYGVSPTKLNDLCFTNVYADSFVIRGDEVREIAPGQTGKIADYNYKLPDDFTGCVIAWNSNNLDSKVGGNYNYLYRLFRKSNLKPFERDISTEIYQAGSTPCNGVEGFNCYFPLQSYGFQPTNGVGYQPYRVVVLSFELLHAPATVCGPKKSTNLVKNKCVNFNFNGLTGTGVLTESNKKFLPFQQFGRDIADTTDAVRDPQTLEILDITPCSFGGVSVITPGTNTSNQVAVLYQDVNCTEVPVAIHADQLTPTWRVYSTGSNVFQTRAGCLIGAEHVNNSYECDIPIGAGICASYQTQTNSPRRARSVASQSIIAYTMSLGAENSVAYSNNSIAICTNFTISVTTEILPVSMTKTSVDCTMYICGDSTECSNLLLQYGSFCTQLNRALTGIAVEQDKNTQEVFAQVKQIYKTPPIKDFGGFNFSQILPDPSKPSKRSFIEDLLFNKVTLADAGFIKQYGDCLGDIAARDLICAQKFNGLTVLPPLLTDEMIAQYTSALLAGTITSGWTFGAGAALQIPFAMQMAYRFNGIGVTQNVLYENQKLIANQFNSAIGKIQDSLSSTASALGKLQDVVNQNAQALNTLVKQLSSNFGAISSVLNDILSRLDKVEAEVQIDRLITGRLQSLQTYVTQQLIRAAEIRASANLAATKMSECVLGQSKRVDFCGKGYHLMSFPQSAPHGVVFLHVTYVCAQEKNFTTAPAICHDGKAHFPREGVFVSNGTHWFVTQRNFYEPQIITTDNTFVSGNCDVVIGIVNNTVYDPLQPELDSGGGGSDIDPYKEFGSSYQLLNFLPLDFFPDLNALVDTATALYEEELTGREHCSPHHTAIRQALVCWDELTKLIAWMSSNITSEQVRTIIVNHVNDTWGLKVRQSLWFHLSCLTFGQHTVQEFLVSFGVWIRTPAPYRPPNAPILSTLPEHTVIC

SEQ ID NO: 11141 - protein, 1301 aa, Artificial Sequence
  SARS-CoV-2/Sweden/01/2020__EPI_ISL_411951 spike protein (1-1147)(P715C_P1069C) WhcAg construct
MFVFLVLLPLVSSQCVNLTTRTQLPPAYTNSFTRGVYYPDKVFRSSVLHSTQDLFLPFFSNVTWFHAIHVSGTNGTKRFDNPVLPFNDGVYFASTEKSNIIRGWIFGTTLDSKTQSLLIVNNATNVVIKVCEFQFCNDPFLGVYYHKNNKSWMESEFRVYSSANNCTFEYVSQPFLMDLEGKQGNFKNLREFVFKNIDGYFKIYSKHTPINLVRDLPQGFSALEPLVDLPIGINITRFQTLLALHRSYLTPGDSSSGWTAGAAAYYVGYLQPRTFLLKYNENGTITDAVDCALDPLSETKCTLKSFTVEKGIYQTSNFRVQPTESIVRFPNITNLCPFGEVFNATRFASVYAWNRKRISNCVADYSVLYNSASFSTFKCYGVSPTKLNDLCFTNVYADSFVIRGDEVRQIAPGQTGKIADYNYKLPDDFTGCVIAWNSNNLDSKVGGNYNYLYRLFRKSNLKPFERDISTEIYQAGSTPCNGVEGFNCYFPLQSYGFQPTNGVGYQPYRVVVLSFELLHAPATVCGPKKSTNLVKNKCVNFNFNGLTGTGVLTESNKKFLPFQQFGRDIADTTDAVRDPQTLEILDITPCSFGGVSVITPGTNTSNQVAVLYQDVNCTEVPVAIHADQLTPTWRVYSTGSNVFQTRAGCLIGAEHVNNSYECDIPIGAGICASYQTQTNSPRRARSVASQSIIAYTMSLGAENSVAYSNNSIAICTNFTISVTTEILPVSMTKTSVDCTMYICGDSTECSNLLLQYGSFCTQLNRALTGIAVEQDKNTQEVFAQVKQIYKTPPIKDCGGFNFSQILPDPSKPSKRSFIEDLLFNKVTLADAGFIKQYGDCLGDIAARDLICAQKFNGLTVLPPLLTDEMIAQYTSALLAGTITSGWTFGAGAALQIPFAMQMAYRFNGIGVTQNVLYENQKLIANQFNSAIGKIQDSLSSTASALGKLQDVVNQNAQALNTLVKQLSSNFGAISSVLNDILSRLDKVEAEVQIDRLITGRLQSLQTYVTQQLIRAAEIRASANLAATKMSECVLGQSKRVDFCGKGYHLMSFPQSAPHGVVFLHVTYVCAQEKNFTTAPAICHDGKAHFPREGVFVSNGTHWFVTQRNFYEPQIITTDNTFVSGNCDVVIGIVNNTVYDPLQPELDSGGGGSDIDPYKEFGSSYQLLNFLPLDFFPDLNALVDTATALYEEELTGREHCSPHHTAIRQALVCWDELTKLIAWMSSNITSEQVRTIIVNHVNDTWGLKVRQSLWFHLSCLTFGQHTVQEFLVSFGVWIRTPAPYRPPNAPILSTLPEHTVIC

SEQ ID NO: 11142 - protein, 1301 aa, Artificial Sequence
  SARS-CoV-2/Tianmen/HBCDC-HB-07/2020__EPI_ISL_412983 spike protein (1-1147)(P715C_P1069C) WhcAg construct
MFVFLVLLPLVSSQCVNLTTRTQLPPAYTNSFTRGVYYPDKVFRSSVLHSTQDLFLPFFSNVTWFHAIHVSGTNGTKRFDNPVLPFNDGVYFASTEKSNIIRGWIFGTTLDSKTQSLLIVNNATNVVIKVCEFQFCNDPFLGVYYHKNNKSWMESEFRVYSSANNCTFEYVSQPFLMDLEGKQGNFKNLREFVFKNIDGYFKIYSKHTPINLVRDLPQGFSALEPLVDLPIGINITRFQTLLALHRSYLTPGDSSSGWTAGAAAYYVGYLQPRTFLLKYNENGTITDAVDCALDPLSETKCTLKSFTVEKGIYQTSNFRVQPTESIVRFPNITNLCPFGEVFNATRFASVYAWNRKRISNCVADYSVLYNSASFSTFKCYGVSPTKLNDLCFTNVYADSFVIRGDEVRQIAPGQTGKIADYNYKLPDDFTGCVIAWNSNNLDSKVGGNYNYLYRLFRKSNLKPFERDISTEIYQAGSTPCNGVEGFNCYFPLQSYGFQPTNGVGYQPYRVVVLSFELLHAPATVCGPKKSTNLVKNKCVNFNFNGLTGTGVLTESNKKFLPFQQFGRDIADTTDAVRDPQTLEILDITPCSFGGVSVITPGTNTSNQVAVLYQDLNCTEVPVAIHADQLTPTWRVYSTGSNVFQTRAGCLIGAEHVNNSYECDIPIGAGICASYQTQTNSPRRARSVASQSIIAYTMSLGAENSVAYSNNSIAICTNFTISVTTEILPVSMTKTSVDCTMYICGDSTECSNLLLQYGSFCTQLNRALTGIAVEQDKNTQEVFAQVKQIYKTPPIKDFGGFNFSQILPDPSKPSKRSFIEDLLFNKVTLADAGFIKQYGDCLGDIAARDLICAQKFNGLTVLPPLLTDEMIAQYTSALLAGTITSGWTFGAGAALQIPFAMQMAYRFNGIGVTQNVLYENQKLIANQFNSAIGKIQDSLSSTASALGKLQDVVNQNAQALNTLVKQLSSNFGAISSVLNDILSRLDKVEAEVQIDRLITGRLQSLQTYVTQQLIRAAEIRASANLAATKMSECVLGQSKRVDFCGKGYHLMSFPQSAPHGVVFLHVTYVCAQEKNFTTAPAICHDGKAHFPREGVFVSNGTHWFVTQRNFYEPQIITTDNTFVSGNCDVVIGIVNNTVYDPLQPELDSGGGGSDIDPYKEFGSSYQLLNFLPLDFFPDLNALVDTATALYEEELTGREHCSPHHTAIRQALVCWDELTKLIAWMSSNITSEQVRTIIVNHVNDTWGLKVRQSLWFHLSCLTFGQHTVQEFLVSFGVWIRTPAPYRPPNAPILSTLPEHTVIC

SEQ ID NO: 11143 - protein, 1301 aa, Artificial Sequence
  SARS-CoV-2/Hong Kong/case42_VM20002493/2020__EPI_ISL_414527 spike protein (1-1147)(P715C_P1069C) WhcAg construct
MFVFLVLLPLVSSQCVNLTTRTQLPPAYTNSFTRGVYYPDKVFRSSVLHSTQDLFLPFFSNVTWFHAIHVSGTNGTKRFDNPVLPFNDGVYFASTEKSNIIRGWIFGTTLDSKTQSLLIVNNATNVVIKVCEFQFCNDPFLGVYYHKNNKSWMESEFRVYSSANNCTFEYVSQPFLMDLEGKQGNFKNLREFVFKNIDGYFKIYSKHTPINLVRDLPQGFSALEPLVDLPIGINITRFQTLLALHRSYLTPGDSSSGWTAGAAAYYVGYLQPRTFLLKYNENGTITDAVDCALDPLSETKCTLKSFTVEKGIYQTSNFRVQPTESIVRFPNITNLCPFGEVFNATRFASVYAWNRKRISNCVADYSVLYNSASFSTFKCYGVSPTKLNDLCFTNVYADSFVIRGDEVRQIAPGQTGKIADYNYKLPDDFTGCVIAWNSNNLDSKVGGNYNYLYRLFRKSNLKPFERDISTEIYQAGSTPCNGVEGFNCYFPLQSYGFQPTNGVGYQPYRVVVLSFELLHAPATVCGPKKSTNLVKNKCVNFNFNGLTGTGVLTESNKKFLPFQQFGRDIADTTDAVRDPQTLEILDITPCSFGGVSVITPGTNTSNQVAVLYQDVNCTEVPVAIHADQLTPTWRVYSTGSNVFQTRAGCLIGAEHVNNSYECDIPIGAGICASYQTQTNSPRRARSVASQSIIAYTMSLGAENSVAYSNNSIAICTNFAISVTTEILPVSMTKTSVDCTMYICGDSTECSNLLLQYGSFCTQLNRALTGIAVEQDKNTQEVFAQVKQIYKTPPIKDFGGFNFSQILPDPSKPSKRSFIEDLLFNKVTLADAGFIKQYGDCLGDIAARDLICAQKFNGLTVLPPLLTDEMIAQYTSALLAGTITSGWTFGAGAALQIPFAMQMAYRFNGIGVTQNVLYENQKLIANQFNSAIGKIQDSLSSTASALGKLQDVVNQNAQALNTLVKQLSSNFGAISSVLNDILSRLDKVEAEVQIDRLITGRLQSLQTYVTQQLIRAAEIRASANLAATKMSECVLGQSKRVDFCGKGYHLMSFPQSAPHGVVFLHVTYVCAQEKNFTTAPAICHDGKAHFPREGVFVSNGTHWFVTQRNFYEPQIITTDNTFVSGNCDVVIGIVNNTVYDPLQPELDSGGGGSDIDPYKEFGSSYQLLNFLPLDFFPDLNALVDTATALYEEELTGREHCSPHHTAIRQALVCWDELTKLIAWMSSNITSEQVRTIIVNHVNDTWGLKVRQSLWFHLSCLTFGQHTVQEFLVSFGVWIRTPAPYRPPNAPILSTLPEHTVIC

SEQ ID NO: 11144 - protein, 1301 aa, Artificial Sequence
  SARS-CoV-2/USA/CruiseA-23/2020__EPI_ISL_414482 spike protein (1-1147)(P715C_P1069C) WhcAg construct
MFVFLVLLPLVSSQCVNLTTRTQLPPAYTNSFTRGVYYPDKVFRSSVLHSTQDLFLPFFSNVTWFHAIHVSGTNGTKRFDNPVLPFNDGVYFASTEKSNIIRGWIFGTTLDSKTQSLLIVNNATNVVIKVCEFQFCNDPFLGVYYHKNNKSWMESEFRVYSSANNCTFEYVSQPFLMDLEVKQGNFKNLREFVFKNIDGYFKIYSKHTPINLVRDLPQGFSALEPLVDLPIGINITRFQTLLALHRSYLTPGDSSSGWTAGAAAYYVGYLQPRTFLLKYNENGTITDAVDCALDPLSETKCTLKSFTVEKGIYQTSNFRVQPTESIVRFPNITNLCPFGEVFNATRFASVYAWNRKRISNCVADYSVLYNSASFSTFKCYGVSPTKLNDLCFTNVYADSFVIRGDEVRQIAPGQTGKIADYNYKLPDDFTGCVIAWNSNNLDSKVGGNYNYLYRLFRKSNLKPFERDISTEIYQAGSTPCNGVEGFNCYFPLQSYGFQPTNGVGYQPYRVVVLSFELLHAPATVCGPKKSTNLVKNKCVNFNFNGLTGTGVLTESNKKFLPFQQFGRDIADTTDAVRDPQTLEILDITPCSFGGVSVITPGTNTSNQVAVLYQDVNCTEVPVAIHADQLTPTWRVYSTGSNVFQTRAGCLIGAEHVNNSYECDIPIGAGICASYQTQTNSPRRARSVASQSIIAYTMSLGAENSVAYSNNSIAICTNFTISVTTEILPVSMTKTSVDCTMYICGDSTECSNLLLQYGSFCTQLNRALTGIAVEQDKNTQEVFAQVKQIYKTPPIKDFGGFNFSQILPDPSKPSKRSFIEDLLFNKVTLADAGFIKQYGDCLGDIAARDLICAQKFNGLTVLPPLLTDEMIAQYTSALLAGTITSGWTFGAGAALQIPFAMQMAYRFNGIGVTQNVLYENQKLIANQFNSAIGKIQDSLSSTASALGKLQDVVNQNAQALNTLVKQLSSNFGAISSVLNDILSRLDKVEAEVQIDRLITGRLQSLQTYVTQQLIRAAEIRASANLAATKMSECVLGQSKRVDFCGKGYHLMSFPQSAPHGVVFLHVTYVCAQEKNFTTAPAICHDGKAHFPREGVFVSNGTHWFVTQRNFYEPQIITTDNTFVSGNCDVVIGIVNNTVYDPLQPELDSGGGGSDIDPYKEFGSSYQLLNFLPLDFFPDLNALVDTATALYEEELTGREHCSPHHTAIRQALVCWDELTKLIAWMSSNITSEQVRTIIVNHVNDTWGLKVRQSLWFHLSCLTFGQHTVQEFLVSFGVWIRTPAPYRPPNAPILSTLPEHTVIC

SEQ ID NO: 11145 - protein, 1301 aa, Artificial Sequence
  SARS-CoV-2/Hong Kong/case85_VM20002868/2020__EPI_ISL_414519 spike protein (1-1147)(P715C_P1069C) WhcAg construct
MFVFLVLVPLVSSQCVNLTTRTQLPPAYTNSFTRGVYYPDKVFRSSVLHSTQDLFLPFFSNVTWFHAIHVSGTNGTKRFDNPVLPFNDGVYFASTEKSNIIRGWIFGTTLDSKTQSLLIVNNATNVVIKVCEFQFCNDPFLGVYYHKNNKSWMESEFRVYSSANNCTFEYVSQPFLMDLEGKQGNFKNLREFVFKNIDGYFKIYSKHTPINLVRDLPQGFSALEPLVDLPIGINITRFQTLLALHRSYLTPGDSSSGWTAGAAAYYVGYLQPRTFLLKYNENGTITDAVDCALDPLSETKCTLKSFTVEKGIYQTSNFRVQPTESIVRFPNITNLCPFGEVFNATRFASVYAWNRKRISNCVADYSVLYNSASFSTFKCYGVSPTKLNDLCFTNVYADSFVIRGDEVRQIAPGQTGKIADYNYKLPDDFTGCVIAWNSNNLDSKVGGNYNYLYRLFRKSNLKPFERDISTEIYQAGSTPCNGVEGFNCYFPLQSYGFQPTNGVGYQPYRVVVLSFELLHAPATVCGPKKSTNLVKNKCVNFNFNGLTGTGVLTESNKKFLPFQQFGRDIADTTDAVRDPQTLEILDITPCSFGGVSVITPGTNTSNQVAVLYQDVNCTEVPVAIHADQLTPTWRVYSTGSNVFQTRAGCLIGAEHVNNSYECDIPIGAGICASYQTQTNSPRRARSVASQSIIAYTMSLGAENSVAYSNNSIAICTNFTISVTTEILPVSMTKTSVDCTMYICGDSTECSNLLLQYGSFCTQLNRALTGIAVEQDKNTQEVFAQVKQIYKTPPIKDFGGFNFSQILPDPSKPSKRSFIEDLLFNKVTLADAGFIKQYGDCLGDIAARDLICAQKFNGLTVLPPLLTDEMIAQYTSALLAGTITSGWTFGAGAALQIPFAMQMAYRFNGIGVTQNVLYENQKLIANQFNSAIGKIQDSLSSTASALGKLQDVVNQNAQALNTLVKQLSSNFGAISSVLNDILSRLDKVEAEVQIDRLITGRLQSLQTYVTQQLIRAAEIRASANLAATKMSECVLGQSKRVDFCGKGYHLMSFPQSAPHGVVFLHVTYVCAQEKNFTTAPAICHDGKAHFPREGVFVSNGTHWFVTQRNFYEPQIITTDNTFVSGNCDVVIGIVNNTVYDPLQPELDSGGGGSDIDPYKEFGSSYQLLNFLPLDFFPDLNALVDTATALYEEELTGREHCSPHHTAIRQALVCWDELTKLIAWMSSNITSEQVRTIIVNHVNDTWGLKVRQSLWFHLSCLTFGQHTVQEFLVSFGVWIRTPAPYRPPNAPILSTLPEHTVIC

SEQ ID NO: 11146 - protein, 1301 aa, Artificial Sequence; identical to SEQ ID NO: 11136
  SARS-CoV-2/England/200990660/2020__EPI_ISL_414523 spike protein (1-1147)(P715C_P1069C) WhcAg construct

SEQ ID NO: 11147 - protein, 1301 aa, Artificial Sequence
  SARS-CoV-2/Australia/NSW09/2020__EPI_ISL_413595 spike protein (1-1147)(P715C_P1069C) WhcAg construct
MFVFLVLLPLVSSQCVNLTTRTQLPPAYTNSFTRGVYYPDKVFRSSVLHSTQDLFLPFFSNVTWFHAIHVSGTNGTKRFDNPVLPFNDGVYFASTEKSNIIRGWIFGTTLDSKTQSLLIVNNATNVVIKVCEFQFCNDPFLGVYYHKNNKSWMESEFRVYSSANNCTFEYVSQPFLMDLEGKQGNFKNLREFVFKNIDGYFKIYSKHTPINLVRDLPQGFSALEPLVDLPIGINITRFQTLLALHRSYLTPGDSSSGWTAGAAAYYVGYLQPRTFLLKYNENGTITDAVDCALDPLSETKCTLKSFTVEKGIYQTSNFRVQPTESIVRFPNITNLCPFGEVFNATRFASVYAWNRKRISNCVADYSVLYNSASFSTFKCYGVSPTKLNDLCFTNVYADSFVIRGDEVRQIAPGQTGKIADYNYKLPDDFTGCVIAWNSNNLDSKVGGNYNYLYRLFRKSNLKPFERDISTEIYQAGSTPCNGVEGFNCYFPLQSYGFQPTNGVGYQPYRVVVLSFELLHAPATVCGPKKSTNLVKNKCVNFNFNGLTGTGVLTESNKKFLPFQQFGRDIADTTDAVRDPQTLEILDITPCSFGGVSVITPGTNTSNQVAVLYQDVNCTEVPVAIHADQLTPTWRVYSTGSNVFQTRAGCLIGAEHVNNSYECDIPIGAGICASYQTQTNSPRRARSVASQSIIAYTMSLGAENSVAYSNNSIAICTNFTISVTTEILPVSMTKTSVDCTMYICGDSTECSNLLLQYGSFCTQLNRALTGIAVEQDKNTQEVFAQVKQIYKTPPIKDFGGFNFSQILPDPSKPSKRSFIEDLLFNKVTLADAGFIKQYGDCLGDIAARDLICAQKFNGLTVLPPLLTDEMIAQYTSALLAGTITSGWTFGAGAALQIPFAMQMAYRFNGIGVTQNVLYENQKLIANQFNSAIGKIQDSLSFTASALGKLQDVVNQNAQALNTLVKQLSSNFGAISSVLNDILSRLDKVEAEVQIDRLITGRLQSLQTYVTQQLIRAAEIRASANLAATKMSECVLGQSKRVDFCGKGYHLMSFPQSAPHGVVFLHVTYVCAQEKNFTTAPAICHDGKAHFPREGVFVSNGTHWFVTQRNFYEPQIITTDNTFVSGNCDVVIGIVNNTVYDPLQPELDSGGGGSDIDPYKEFGSSYQLLNFLPLDFFPDLNALVDTATALYEEELTGREHCSPHHTAIRQALVCWDELTKLIAWMSSNITSEQVRTIIVNHVNDTWGLKVRQSLWFHLSCLTFGQHTVQEFLVSFGVWIRTPAPYRPPNAPILSTLPEHTVIC

SEQ ID NO: 11148 - protein, 1301 aa, Artificial Sequence; identical to SEQ ID NO: 11128
  SARS-CoV-2/Australia/NSW10/2020__EPI_ISL_413596 spike protein (1-1147)(P715C_P1069C) WhcAg construct

SEQ ID NO: 11149 - protein, 1301 aa, Artificial Sequence
  SARS-CoV-2/Switzerland/1000477797/2020__EPI_ISL_413023 spike protein (1-1147)(P715C_P1069C) WhcAg construct
MFVFLVLLPLVSSQCVNLTTRTQLPPAYTNSFTRGVYYPDKVFRSSVLHSTQDLFLPFFSNVTWFHAIHVSGTNGTKRFDNPVLPFNDGVYFASTEKSNIIRGWIFGTTLDSKTQSLLIVNNATNVVIKVCEFQFCNDPFLGVYYHKNNKSWMESEFRVYSSANNCTFEYVSQPFLMDLEGKQGNFKNLREFVFKNIDGYFNIYSKHTPINLVRDLPQGFSALEPLVDLPIGINITRFQTLLALHRSYLTPGDSSSGWTAGAAAYYVGYLQPRTFLLKYNENGTITDAVDCALDPLSETKCTLKSFTVEKGIYQTSNFRVQPTESIVRFPNITNLCPFGEVFNATRFASVYAWNRKRISNCVADYSVLYNSASFSTFKCYGVSPTKLNDLCFTNVYADSFVIRGDEVRQIAPGQTGKIADYNYKLPDDFTGCVIAWNSNNLDSKVGGNYNYLYRLFRKSNLKPFERDISTEIYQAGSTPCNGVEGFNCYFPLQSYGFQPTNGVGYQPYRVVVLSFELLHAPATVCGPKKSTNLVKNKCVNFNFNGLTGTGVLTESNKKFLPFQQFGRDIADTTDAVRDPQTLEILDITPCSFGGVSVITPGTNTSNQVAVLYQGVNCTEVPVAIHADQLTPTWRVYSTGSNVFQTRAGCLIGAEHVNNSYECDIPIGAGICASYQTQTNSPRRARSVASQSIIAYTMSLGAENSVAYSNNSIAICTNFTISVTTEILPVSMTKTSVDCTMYICGDSTECSNLLLQYGSFCTQLNRALTGIAVEQDKNTQEVFAQVKQIYKTPPIKDFGGFNFSQILPDPSKPSKRSFIEDLLFNKVTLADAGFIKQYGDCLGDIAARDLICAQKFNGLTVLPPLLTDEMIAQYTSALLAGTITSGWTFGAGAALQIPFAMQMAYRFNGIGVTQNVLYENQKLIANQFNSAIGKIQDSLSSTASALGKLQDVVNQNAQALNTLVKQLSSNFGAISSVLNDILSRLDKVEAEVQIDRLITGRLQSLQTYVTQQLIRAAEIRASANLAATKMSECVLGQSKRVDFCGKGYHLMSFPQSAPHGVVFLHVTYVCAQEKNFTTAPAICHDGKAHFPREGVFVSNGTHWFVTQRNFYEPQIITTDNTFVSGNCDVVIGIVNNTVYDPLQPELDSGGGGSDIDPYKEFGSSYQLLNFLPLDFFPDLNALVDTATALYEEELTGREHCSPHHTAIRQALVCWDELTKLIAWMSSNITSEQVRTIIVNHVNDTWGLKVRQSLWFHLSCLTFGQHTVQEFLVSFGVWIRTPAPYRPPNAPILSTLPEHTVIC

SEQ ID NO: 11150 - protein, 1301 aa, Artificial Sequence
  SARS-CoV-2/Belgium/BA-02291/2020__EPI_ISL_415159 spike protein (1-1147)(P715C_P1069C) WhcAg construct
MFVFLVLLPLVSSQCVNLTTRTQLPPAYTNSFTRGVYYPDKVFRSSVLHSTQDLFLPFFSNVTWFHAIHVSGTNGTKRFDNPVLPFNDGVYFASTEKSNIIRGWIFGTTLDSKTQSLLIVNNATNVVIKVCEFQFCNDPFLGVYYHKNNKSWMESEFRVYSSANNCTFEYVSQPFLMDLEGKQGNFKNLREFVFKNIDGYFKIYSKHTPINLVRDLPQGFSALEPLVDLPIGINITRFQTLLALHRSYLTPGDSSSGWTAGAAAYYVGYLQPRTFLLKYNENGTITDAVDCALDPLSETKCTLKSFTVEKGIYQTSNFRVQPTESIVRFPNITNLCPFGEVFNATRFASVYAWNRKRISNCVADYSVLYNSASFSTFKCYGVSPTKLNDLCFTNVYADSFVIRGDEVRQIAPGQTGKIADYNYKLPDDFTGCVIAWNSNNLDSKVGGNYNYLYRLFRRSNLKPFERDISTEIYQAGSTPCNGVEGFNCYFPLQSYGFQPTNGVGYQPYRVVVLSFELLPAPATVCGPKKSTNLVKNKCVNFNFNGLTGTGVLTESNKKFLPFQQFGRDIADTTDAVRDPQTLEILDITPCSFGGVSVITPGTNTSNQVAVLYQGVNCTEVPVAIHADQLTPTWRVYSTGSNVFQTRAGCLIGAEHVNNSYECDIPIGAGICASYQTQTNSPRRARSVASQSIIAYTMSLGAENSVAYSNNSIAICTNFTISVTTEILPVSMTKTSVDCTMYICGDSTECSNLLLQYGSFCTQLNRALTGIAVEQDKNTQEVFAQVKQIYKTPPIKDFGGFNFSQILPDPSKPSKRSFIEDLLFNKVTLADAGFIKQYGDCLGDIAARDLICAQKFNGLTVLPPLLTDEMIAQYTSALLAGTITSGWTFGAGAALQIPFAMQMAYRFNGIGVTQNVLYENQKLIANQFNSAIGKIQDSLSSAAPALGKLQDVVNQNAQALNTLVKQLSSNFGAISSVLNDILSRLDKVEAEVQIDRLITGRLQSLQTYVTQQLIRAAEIRASANLAATKMSECVLGQSKRVDFCGKGYHLMSFPQSAPHGVVFLHVTYVCAQEKNFTTAPAICHDGKAHFPREGVFVSNGTHWFVTQRNFYEPQIITTDNTFVSGNCDVVIGIVNNTVYDPLQPELDSGGGGSDIDPYKEFGSSYQLLNFLPLDFFPDLNALVDTATALYEEELTGREHCSPHHTAIRQALVCWDELTKLIAWMSSNITSEQVRTIIVNHVNDTWGLKVRQSLWFHLSCLTFGQHTVQEFLVSFGVWIRTPAPYRPPNAPILSTLPEHTVIC

SEQ ID NO: 11151 - protein, 1301 aa, Artificial Sequence
  SARS-CoV-2/USA/WA8-UW5/2020__EPI_ISL_413486 spike protein (1-1147)(P715C_P1069C) WhcAg construct
MFVFLVLLPLVSSQCVNLTTRTQLPPAYTNSFTRGVYYPDKVFRSSVLHSTQDLFLPFFSNVTWFHAIHVSGTNGTKRFDNPVLPFNDGVYFASTEKSNIIRGWIFGTTLDSKTQSLLIVNNATNVVIKVCEFQFCNDPFLGVYYHKNNKSWMESEFRVYSSANNCTFEYVSQPFLMDLEGKQGNFKNLREFVFKNIDGYFKIYSKHTPINLVRDLPQGFSALEPLVDLPIGINITRFQTLLALHRSYLTPGDSSSGWTAGAAAYYVGYLQPRTFLLKYNENGTITDAVDCALDPLSETKCTLKSFTVEKGIYQTSNFRVQPTESIVRFPNITNLCPFGEVFNATRFASVYAWNRKRISNCVADYSVLYNSASFSTFKCYGVSPTKLNDLCFTNVYADSFVIRGDEVRQIAPGQTGKIADYNYKLPDDFTGCVIAWNSNNLDSKVGGNYNYLYRLFRKSNLKPFERDISTEIYQAGSTPCNGVEGFNCYFPLQSYGFQPTNGVGYQPYRVVVLSFELLHAPATVCGPKKSTNLVKNKCVNFNFNGLTGTGVLTESNKKFLPFQQFGRDIADTTDAVRDPQTLEILDITPCSFGGVSVITPGTNTSNQVAVLYQDVNCTEVPVAIHADQLTPTWRVYSTGSNVFQTRAGCLIGAEYVNNSYECDIPIGAGICASYQTQTNSPRRARSVASQSIIAYTMSLGAENSVAYSNNSIAICTNFTISVTTEILPVSMTKTSVDCTMYICGDSTECSNLLLQYGSFCTQLNRALTGIAVEQDKNTQEVFAQVKQIYKTPPIKDFGGFNFSQILPDPSKPSKRSFIEDLLFNKVTLADAGFIKQYGDCLGDIAARDLICAQKFNGLTVLPPLLTDEMIAQYTSALLAGTITSGWTFGAGAALQIPFAMQMAYRFNGIGVTQNVLYENQKLIANQFNSAIGKIQDSLSSTASALGKLQDVVNQNAQALNTLVKQLSSNFGAISSVLNDILSRLDKVEAEVQIDRLITGRLQSLQTYVTQQLIRAAEIRASANLAATKMSECVLGQSKRVDFCGKGYHLMSFPQSAPHGVVFLHVTYVCAQEKNFTTAPAICHDGKAHFPREGVFVSNGTHWFVTQRNFYEPQIITTDNTFVSGNCDVVIGIVNNTVYDPLQPELDSGGGGSDIDPYKEFGSSYQLLNFLPLDFFPDLNALVDTATALYEEELTGREHCSPHHTAIRQALVCWDELTKLIAWMSSNITSEQVRTIIVNHVNDTWGLKVRQSLWFHLSCLTFGQHTVQEFLVSFGVWIRTPAPYRPPNAPILSTLPEHTVIC

SEQ ID NO: 11152 - protein, 1301 aa, Artificial Sequence
  SARS-CoV-2/England/20102000506/2020__EPI_ISL_415147 spike protein (1-1147)(P715C_P1069C) WhcAg construct
MFVFLVLLPLVSSQCVNLTTRTQLPPAYTNSFTRGVYYPDKVFRSSVLHSTQDLFLPFFSNVTWFHAIHVSGTNGTKRFDNPVLPFNDGVYFASTEKSNIIRGWIFGTTLDSKTQSLLIVNNATNVVIKVCEFQFCNDPFLGVYYHKNNKSWMESEFRVYSSANNCTFEYVSQPFLMDLEGKQGNFKNLREFVFKNIDGYFKIYSKHTPINLVRDLPQGFSALEPLVDLPIGINITRFQTLLALHRSYLTPGDSSSGWTAGAAAYYVGYLQPRTFLLKYNENGTITDAVDCALDPLSETKCTLKSFTVEKGIYQTSNFRVQPTESIVRFPNITNLCPFGEVFNATRFASVYAWNRKRISNCVADYSVLYNSASFSTFKCYGVSPTKLNDLCFTNVYADSFVIRGDEVRQIAPGQTGKIADYNYKLPDDFTGCVIAWNSNNLDSKVGGNYNYLYRLFRKSNLKPFERDISTEIYQAGSTPCNGVEGFNCYFPLQSYGFQPTNGVGYQPYRVVVLSFELLHAPATVCGPKKSTNLVKNKCVNFNFNGLTGTGVLTESNKKFLPFQQFGRDIADTTDAVRDPQTLEILDITPCSFGGVSVITPGTNTSNQVAVLYQGVNCTEVPVAIHADQLTPTWRVYSTGSNVFQTRAGCLIGAEHVNNSYECDIPIGAGICASYQTQTNSPRRARSVASQSIIAYTMSLGAENSVAYSNNSIAICTNFTISVTTEILPVSMTKTSVDCTMYICGDSTECSNLLLQYGSFCTQLNRALTGIAVEQDKNTQEVFAQVKQIYKTPPIKDFGGFNFSQILPDPSKPSKRSFIEDLLFNKVTLADAGFIKQYGYCLGDIAARDLICAQKFNGLTVLPPLLTDEMIAQYTSALLAGTITSGWTFGAGAALQIPFAMQMAYRFNGIGVTQNVLYENQKLIANQFNSAIGKIQDSLSSTASALGKLQDVVNQNAQALNTLVKQLSSNFGAISSVLNDILSRLDKVEAEVQIDRLITGRLQSLQTYVTQQLIRAAEIRASANLAATKMSECVLGQSKRVDFCGKGYHLMSFPQSAPHGVVFLHVTYVCAQEKNFTTAPAICHDGKAHFPREGVFVSNGTHWFVTQRNFYEPQIITTDNTFVSGNCDVVIGIVNNTVYDPLQPELDSGGGGSDIDPYKEFGSSYQLLNFLPLDFFPDLNALVDTATALYEEELTGREHCSPHHTAIRQALVCWDELTKLIAWMSSNITSEQVRTIIVNHVNDTWGLKVRQSLWFHLSCLTFGQHTVQEFLVSFGVWIRTPAPYRPPNAPILSTLPEHTVIC

SEQ ID NO: 11153 - protein, 1301 aa, Artificial Sequence
  SARS-CoV-2/Belgium/VAG-03013/2020__EPI_ISL_415155 spike protein (1-1147)(P715C_P1069C) WhcAg construct
MFVFLVLLPLVSSQCVNLTTRTQLPPAYTNSFTRGVYYPDKVFRSSVLHSTQDLFLPFFSNVTWFHAIHVSGTNGTKRFDNPVLPFNDGVYFASTEKSNIIRGWIFGTTLDSKTQSLLIVNNATNVVIKVCEFQFCNDPFLGVYYHKNNKSWMESEFRVYSSANNCTFEYVSQPFLMDLEGKQGNFKNLREFVFKNIDGYFKIYSKHTPINLVRDLPQGFSALEPLVDLPIGINITRFQTLLALHRSYLTPGDSSSGWTAGAAAYYVGYLQPRTFLLKYNENGTITDAVDCALDPLSETKCTLKSFTVEKGIYQTSNFRVQPTESIVRFPNITNLCPFGEVFNATRFASVYAWNRKRISNCVADYSVLYNSASFSTFKCYGVSPTKLNDLCFTNVYADSFVIRGDEVRQIAPGQTGKIADYNYKLPDDFTGCVIAWNSNNLDSKVGGNYNYLYRLFRKSNLKPFERDISTEIYQAGSTPCNGVEGFNCYFPLQSYGFQPTNGVGYQPYRVVVLSFELLHAPATVCGPKKSTNLVKNKCVNFNFNGLTGTGVLTESNKKFLPFQQFGRDIADTTDAVRDPQTLEILDITPCSFGGVSVITPGTNTSNQVAVLYQGVNCTEVPVAIHADQLTPTWRVYSTGSNVFQTRAGCLIGAEHVNNSYECDIPIGAGICASYQTQTNSPRRARSVASQSIIAYTMSLGAENSVAYSNNSIAICTNFTISVTTEILPVSMTKTSVDCTMYICGDSTECSNLLLQYGSFCTQLNRALTGIAVEQDKNTQEVFAQVKQIYKTPPIKDFGGFNFSQILPDPSKPSKRSFIEDLLFNKVTLADAGFIKQYGDCLGDIAARDLICAQKFNGLTVLPPLLTDEMIAQYTSALLAGTITSGWTFGAGAALQIPFAMQMAYRFNGIGVTQNVLYENQKLIANQFNSAIGKIQDSLSSTATALGKLQDVVNQNAQALNTLVKQLSSNFGAISSVLNDILSRLDKVEAEVQIDRLITGRLQSLQTYVTQQLIRAAEIRASANLAATKMSECVLGQSKRVDFCGKGYHLMSFPQSAPHGVVFLHVTYVCAQEKNFTTAPAICHDGKAHFPREGVFVSNGTHWFVTQRNFYEPQIITTDNTFVSGNCDVVIGIVNNTVYDPLQPELDSGGGGSDIDPYKEFGSSYQLLNFLPLDFFPDLNALVDTATALYEEELTGREHCSPHHTAIRQALVCWDELTKLIAWMSSNITSEQVRTIIVNHVNDTWGLKVRQSLWFHLSCLTFGQHTVQEFLVSFGVWIRTPAPYRPPNAPILSTLPEHTVIC

SEQ ID NO: 11154 - protein, 1301 aa, Artificial Sequence
  SARS-CoV-2/Belgium/BC-03016/2020__EPI_ISL_415157 spike protein (1-1147)(P715C_P1069C) WhcAg construct
MFVFLVLLPLVSSQCVNLTTRTQLPPAYTNSFTRGVYYPDKVFRSSVLHSTQDLFLPFFSNVTWFHAIHVSGTNGTKRFDNPVLPFNDGVYFASTEKSNIIRGWIFGTTLDSKTQSLLIVNNATNVVIKVCEFQFCNDPFLGVYYHKNNKSWMESEFRVYSSANNCTFEYVSQPFLMDLEGKQGNFKNLREFVFKNIDGYFKIYSKHTPINLVRDLPQGFSALEPLVDLPIGINITRFQTLLALHRSYLTPGDSSSGWTAGAAAYYVGYLQPRTFLLKYNENGTITDAVDCALDPLSETKCTLKSFTVEKGIYQTSNFRVQPTESIVRFPNITNLCPFGEVFNATRFASVYAWNRKRISNCVADYSVLYNSASFSTFKCYGVSPTKLNDLCFTNVYADSFVIRGDEVRQIAPGQTGKIADYNYKLPDDFTGCVIAWNSNNLDSKVGGNYNYLYRLFRKSNLKPFERDISTEIYQAGSTPCNGVEGFNCYFPLQSYGFQPTNGVGYQPYRVVVLSFELLHAPATVCGPKKSTNLVKNKCVNFNFNGLTGTGVLTESNKKFLPFQQFGRDIADTTDAVRDPQTLEILDITPCSFGGVSVITPGTNTSNQVAVLYQGVNCTEVPVAIHADQLTPTWRVYSTGSNVFQTRAGCLIGAEHVNNSYECDIPIGAGICASYQTQTNSPRRARSVASQSIIAYTMSLGAENSVAYSNNSIAICTNFTISVTTEILPVSMTKTSVDCTMYICGDSTECSNLLLQYGSFCTQLNRALTGIAVEQDKNTQEVFAQVKQIYKTPPIKDFGGFNFSQILPDPSKPSKRSFIEDLLFNKVTLADAGFIKQYGDCLGDIAARDLICAQKFNGLTVLPPLLTDEMIAQYTSALLAGTITSGWTFGAGAALQIPFAMQMAYRFNGIGVTQNVLYENQKLIANQFNSAIGKIQDSLSSTAPALGKLQDVVNQNAQALNTLVKQLSSNFGAISSVLNDILSRLDKVEAEVQIDRLITGRLQSLQTYVTQQLIRAAEIRASANLAATKMSECVLGQSKRVDFCGKGYHLMSFPQSAPHGVVFLHVTYVCAQEKNFTTAPAICHDGKAHFPREGVFVSNGTHWFVTQRNFYEPQIITTDNTFVSGNCDVVIGIVNNTVYDPLQPELDSGGGGSDIDPYKEFGSSYQLLNFLPLDFFPDLNALVDTATALYEEELTGREHCSPHHTAIRQALVCWDELTKLIAWMSSNITSEQVRTIIVNHVNDTWGLKVRQSLWFHLSCLTFGQHTVQEFLVSFGVWIRTPAPYRPPNAPILSTLPEHTVIC

SEQ ID NO: 11155 - protein, 1301 aa, Artificial Sequence
  SARS-CoV-2/Germany/BavPat3/2020__EPI_ISL_414521 spike protein (1-1147)(P715C_P1069C) WhcAg construct
MFVFLVLLPLVSSQCVNLTTRTQLPPAYTNSFTRGVYYPDKVFRSSVLHSTQDLFLPFFSNVTWFHAIHVSGTNGTKRFDNPVLPFNDGVYFASTEKSNIIRGWIFGTTLDSKTQSLLIVNNATNVVIKVCEFQFCNDPFLGVYYHKNNKSWMESEFRVYSSANNCTFEYVSQPFLMDLEGKQGNFKNLREFVFKNIDGYFKIYSKHTPINLVRDLPQGFSALEPLVDLPIGINITRFQTLLALHRSYLTPGDSSSGWTAGAAAYYVGYLQPRTFLLKYNENGTITDAVDCALDPLSETKCTLKSFTVEKGIYQTSNFRVQPTESIVRFPNITNLCPFGEVFNATRFASVYAWNRKRISNCVADYSVLYNSASFSTFKCYGVSPTKLNDLCFTNVYADSFVIRGDEVRQIAPGQTGKIADYNYKLPDDFTGCVIAWNSNNLDSKVGGNYNYLYRLFRKSNLKPFERDISTEIYQAGSTPCNGVEGFNCYFPLQSYGFQPTNGVGYQPYRVVVLSFELLHAPATVCGPKKSTNLVKNKCVNFNFNGLTGTGVLTESNKKFLPFQQFGRDIADTTDAVRDPQTLEILDITPCSFGGVSVITPGTNTSNQVAVLYQDVNCTEVPVAIHADQLTPTWRVYSTGSNVFQTRAGCLIGAEHVNNSYECDIPIGAGICASYQTQTNSPRRARSVASQSIIAYTMSLGAENSVAYSNNSIAICTNFTISVTTEILPVSMTKTSVDCTMYICGDSTECSNLLLQYGSFCTQLNRALTGIAVEQDKNTQQVFAQVKQIYKTPPIKDFGGFNFSQILPDPSKPSKRSFIEDLLFNKVTLADAGFIKQYGDCLGDIAARDLICAQKFNGLTVLPPLLTDEMIAQYTSALLAGTITSGWTFGAGAALQIPFAMQMAYRFNGIGVTQNVLYENQKLIANQFNSAIGKIQDSLSSTASALGKLQDVVNQNAQALNTLVKQLSSNFGAISSVLNDILSRLDKVEAEVQIDRLITGRLQSLQTYVTQQLIRAAEIRASANLAATKMSECVLGQSKRVDFCGKGYHLMSFPQSAPHGVVFLHVTYVCAQEKNFTTAPAICHDGKAHFPREGVFVSNGTHWFVTQRNFYEPQIITTDNTFVSGNCDVVIGIVNNTVYDPLQPELDSGGGGSDIDPYKEFGSSYQLLNFLPLDFFPDLNALVDTATALYEEELTGREHCSPHHTAIRQALVCWDELTKLIAWMSSNITSEQVRTIIVNHVNDTWGLKVRQSLWFHLSCLTFGQHTVQEFLVSFGVWIRTPAPYRPPNAPILSTLPEHTVIC

SEQ ID NO: 11156 - protein, 1301 aa, Artificial Sequence
  SARS-CoV-2/France/HF1805/2020__EPI_ISL_414628 spike protein (1-1147)(P715C_P1069C) WhcAg construct
MFVFLVLLPLVSSQCVNLTTRTQLPPAYTNSFTRGVYYPDKVFRSSVLHSTQDLFLPFFSNVTWFHAIHVSGTNGTKRFDNPVLPFNDGVYFASTEKSNIIRGWIFGTTLDSKTQSLLIVNNATNVVIKVCEFQFCNDPFLGVYYHKNNKSWMESEFRVYSSANNCTFEYVSQPFLMDLEGKQGNFKNLREFVFKNIDGYFKIYSKHTPINLVRDLPQGFSALEPLVDLPIGINITRFQTLLALHRSYLTPGDSSSGWTAGAAAYYVGYLQPRTFLLKYNENGTITDAVDCALDPLSETKCTLKSFTVEKGIYQTSNFRVQPTESIVRFPNITNLCPFGEVFNATRFASVYAWNRKRISNCVADYSVLYNSASFSTFKCYGVSPTKLNDLCFTNVYADSFVIRGDEVRQIAPGQTGKIADYNYKLPDDFTGCVIAWNSNNLDSKVGGNYNYLYRLFRKSNLKPFERDISTEIYQAGSTPCNGVEGFNCYFPLQSYGFQPTNGVGYQPYRVVVLSFELLHAPATVCGPKKSTNLVKNKCVNFNFNGLTGTGVLTESNKKFLPFQQFGRDIADTTDAVRDPQTLEILDITPCSFGGVSVITPGTNTSNQVAVLYQGVNCTEVPVAIHADQLTPTWRVYSTGSNVFQTRAGCLIGAEHVNNSYECDIPIGAGICASYQTQTNSPRRARSVASQSIIAYTMSLGAENSVAYSNNSIAICTNFTISVTTEILPVSMTKTSVDCTMYICGDSTECSNLLLQYGSFCTQLNRALTGIAVEQDKNTQEVFAQVKQIYKTPPIKDFGGFNFSQILPDPSKPSKRSFIEDLLFNKVTLADAGFIKQYGDCLGDIAARDLICAQKFNGLTVLPPLLTDEMIAQYTSALLAGTITSGWTFGAGAALQIPFAMQMAYRFNGIGVTQNVLYENQKLIANQFNSAIGKIQDSLSSTASALGKLQDVVNQNAQALNTLVKQLSSNFGAISSVLNDILSRLDKVEAEVQIDRLITGRLQSLQTYVTQQLIRAAEIRASANLAATKMSECVLGQSKRVDFCGKGYHLMSFPQSAPHGVVFLHVTYVCAQEKNFTTAPAICHDGKAHFPREGVFVSNGTHWFVTQRNFYEPQIITTDNTFVSGNCDVVIGVVNNTVYDPLQPELDSGGGGSDIDPYKEFGSSYQLLNFLPLDFFPDLNALVDTATALYEEELTGREHCSPHHTAIRQALVCWDELTKLIAWMSSNITSEQVRTIIVNHVNDTWGLKVRQSLWFHLSCLTFGQHTVQEFLVSFGVWIRTPAPYRPPNAPILSTLPEHTVIC

SEQ ID NO: 11157 - protein, 1301 aa, Artificial Sequence
  SARS-CoV-2/Netherlands/ZuidHolland_9/2020__EPI_ISL_414445 spike protein (1-1147)(P715C_P1069C) WhcAg construct
MFVFLVLLPLVSSQCVNLTTRTQLPPAYTNSFTRGVYYPDKVFRSSVLHSTQDLFLPFFSNVTWFHAIHVSGTNGTKRFDNPVLPFNDGVYFASTEKSNIIRGWIFGTTLDSKTQSLLIVNNATNVVIKVCEFQFCNDPFLGVYYHKNNKSWMESEFRVYSSANNCTFEYVSQPFLMDLEGKQGNFKNLREFVFKNIDGYFKIYSKHTPINLVRDLPQGFSALEPLVDLPIGINITRFQTLLALHRSYLTPGDSSSGWTAGAAAYYVGYLQPRTFLLKYNENGTITDAVDCALDPLSETKCTLKSFTVEKGIYQTSNFRVQPTESIVRFPNITNLCPFGEVFNATRFASVYAWNRKRISNCVADYSVLYNSASFSTFKCYGVSPTKLNDLCFTNVYADSFVIRGDEVRQIAPGQTGKIADYNYKLPDDFTGCVIAWNSNNLDSKVGGNYNYLYRLFRKSNLKPFERDISTEIYQAGSTPCNGVEGFNCYFPLQSYGFQPTNGVGYQPYRVVVLSFELLHAPATVCGPKKSTNLVKNKCVNFNFNGLTGTGVLTESNKKFLPFQQFGRDIADTTDAVRDPQTLEILDITPCSFGGVSVITPGTNTSNQVAVLYQGVNCTEVPVAIHADQLTPTWRVYSTGSNVFQTRAGCLIGAEHVNNSYECDIPIGAGICASYQTQTNSPRRARSVASQSIIAYTMSLGAENSVAYSNNSIAICTNFTISVTTEILPVSMTKTSVDCTMYICGDSTECSNLLLQYGSFCTQLNRALTGIAVEQDKNTQEVFAQVKQIYKTPPIKDFGGFNFSQILPDPSKPSKRSFIEDLLFNKVTLADAGFIKQYGDCLGDIAARDLICVQKFNGLTVLPPLLTDEMIAQYTSALLAGTITSGWTFGAGAALQIPFAMQMAYRFNGIGVTQNVLYENQKLIANQFNSAIGKIQDSLSSTASALGKLQDVVNQNAQALNTLVKQLSSNFGAISSVLNDILSRLDKVEAEVQIDRLITGRLQSLQTYVTQQLIRAAEIRASANLAATKMSECVLGQSKRVDFCGKGYHLMSFPQSAPHGVVFLHVTYVCAQEKNFTTAPAICHDGKAHFPREGVFVSNGTHWFVTQRNFYEPQIITTDNTFVSGNCDVVIGIVNNTVYDPLQPELDSGGGGSDIDPYKEFGSSYQLLNFLPLDFFPDLNALVDTATALYEEELTGREHCSPHHTAIRQALVCWDELTKLIAWMSSNITSEQVRTIIVNHVNDTWGLKVRQSLWFHLSCLTFGQHTVQEFLVSFGVWIRTPAPYRPPNAPILSTLPEHTVIC

SEQ ID NO: 11158 - protein, 1301 aa, Artificial Sequence
  SARS-CoV-2/Finland/FIN03032020A/2020__EPI_ISL_413602 spike protein (1-1147)(P715C_P1069C) WhcAg construct
MFVFLVLLPLVSSQCVNLTTRTQLPPAYTNSFTRGVYYPDKVFRSSVLHSTQDLFLPFFSNVTWFHAIHVSGTNGTKRFDNPVLPFNDGVYFASTEKSNIIRGWIFGTTLDSKTQSLLIVNNATNVVIKVCEFQFCNDPFLGVYYHKNNKSWMESEFRVYSSANNCTFEYVSQPFLMDLEGKQGNFKNLREFVFKNIDGYFKIYSKHTPINLVRDLPQGFSALEPLVDLPIGINITRFQTLLALHRSYLTPGDSSSGWTAGAAAYYVGYLQPRTFLLKYNENGTITDAVDCALDPLSETKCTLKSFTVEKGIYQTSNFRVQPTESIVRFPNITNLCPFGEVFNATRFASVYAWNRKRISNCVADYSVLYNSASFSTFKCYGVSPTKLNDLCFTNVYADSFVIRGDEVRQIAPGQTGKIADYNYKLPDDFTGCVISWNSNNLDSKVGGNYNYLYRLFRKSNLKPFERDISTEIYQAGSTPCNGVEGFNCYFPLQSYGFQPTNGVGYQPYRVVVLSFELLHAPATVCGPKKSTNLVKNKCVNFNFNGLTGTGVLTESNKKFLPFQQFGRDIADTTDAVRDPQTLEILDITPCSFGGVSVITPGTNTSNQVAVLYQGVNCTEVPVAIHADQLTPTWRVYSTGSNVFQTRAGCLIGAEHVNNSYECDIPIGAGICASYQTQTNSPRRARSVASQSIIAYTMSLGAENSVAYSNNSIAICTNFTISVTTEILPVSMTKTSVDCTMYICGDSTECSNLLLQYGSFCTQLNRALTGIAVEQDKNTQEVFAQVKQIYKTPPIKDFGGFNFSQILPDPSKPSKRSFIEDLLFNKVTLADAGFIKQYGDCLGDIAARDLICAQKFNGLTVLPPLLTDEMIAQYTSALLAGTITSGWTFGAGAALQIPFAMQMAYRFNGIGVTQNVLYENQKLIANQFNSAIGKIQDSLSSTASALGKLQDVVNQNAQALNTLVKQLSSNFGAISSVLNDILSRLDKVEAEVQIDRLITGRLQSLQTYVTQQLIRAAEIRASANLAATKMSECVLGQSKRVDFCGKGYHLMSFPQSAPHGVVFLHVTYVCAQEKNFTTAPAICHDGKAHFPREGVFVSNGTHWFVTQRNFYEPQIITTDNTFVSGNCDVVIGIVNNTVYDPLQPELDSGGGGSDIDPYKEFGSSYQLLNFLPLDFFPDLNALVDTATALYEEELTGREHCSPHHTAIRQALVCWDELTKLIAWMSSNITSEQVRTIIVNHVNDTWGLKVRQSLWFHLSCLTFGQHTVQEFLVSFGVWIRTPAPYRPPNAPILSTLPEHTVIC

SEQ ID NO: 11159 - protein, 1301 aa, Artificial Sequence
  SARS-CoV-2/France/GE1977/2020__EPI_ISL_414632 spike protein (1-1147)(P715C_P1069C) WhcAg construct
MFVFLVLLPLVSSQCVNLTTRTQLPPAYTNSFTRGVYYPDKVFRSSVLHSTQDLFLPFFSNVTWFHAIHVSGTNGTKRFDNPVLPFNDGVYFASTEKSNIIRGWIFGTTLDSKTQSLLIVNNATNVVIKVCEFQFCNDPFLGVYYHKNNKSWMESEFRVYSSANNCTFEYVSQPFLMDLEGKQGNFKNLREFVFKNIDGYFKIYSKHTPINLVRDLPQGFSALEPLVDLPIGINITRFQTLLALHRSYLTPGDSSSGWTAGAAAYYVGYLQPRTFLLKYNENGTITDAVDCALDPLSETKCTLKSFTVEKGIYQTSNFRVQPTESIVRFPNITNLCPFGEVFNATRFASVYAWNRKRISNCVADYSVLYNSASFSTFKCYGVSPTKLNDLCFTNVYADSFVIRGDEVRQIAPGQTGKIADYNYKLPDDFTGCVIAWNSNNLDSKVGGNYNYLYRLFRKSNLKPFERDISTEIYQAGSTPCNGVEGFNCYFPLQSYGFQPTNGVGYQPYRVVVLSFELLHAPATVCGPKKSTNLVKNKCVNFNFNGLTGTGVLTESNKKFLPFQQFGRDIADTTDAVRDPQTLEILDITPCSFGGVSVITPGTNTSNQVAVLYQGVNCTEVPVAIHADQLTPTWRVYSTGSNVFQTRAGCLIGAEHVNNSYECDIPIGAGICASYQTQTNSPRRARSVASQSIIAYTMSLGAENSVAYSNNSIAICTNFTISVTTEILPVSMTKTSVDCTMYICGDSTECSNLLLQYGSFCTQLNRALTGIAVEQDKNTQEVFAQVKQIYKTPPIKDFGGFNFSQILPDPSKPSKRSFIEDLLFNKVTLADAGFIKQYGDCLGDIAARDLICAQKFNGLTVLPPLLTDEMIAQYTSALLAGTITSGWTFGAGAALQIPFAMQMAYRFNGIGVTQNVLYENQKLIANQFNSAIGKIQDSLFSTASALGKLQDVVNQNAQALNTLVKQLSSNFGAISSVLNDILSRLDKVEAEVQIDRLITGRLQSLQTYVTQQLIRAAEIRASANLAATKMSECVLGQSKRVDFCGKGYHLMSFPQSAPHGVVFLHVTYVCAQEKNFTTAPAICHDGKAHFPREGVFVSNGTHWFVTQRNFYEPQIITTDNTFVSGNCDVVIGIVNNTVYDPLQPELDSGGGGSDIDPYKEFGSSYQLLNFLPLDFFPDLNALVDTATALYEEELTGREHCSPHHTAIRQALVCWDELTKLIAWMSSNITSEQVRTIIVNHVNDTWGLKVRQSLWFHLSCLTFGQHTVQEFLVSFGVWIRTPAPYRPPNAPILSTLPEHTVIC

SEQ ID NO: 11160 - protein, 1301 aa, Artificial Sequence
  SARS-CoV-2/Finland/FIN-313/2020__EPI_ISL_414641 spike protein (1-1147)(P715C_P1069C) WhcAg construct
MFVFLVLLPLVSSQCVNLTTRTQLPPAYTNSFTRGVYYPDKVFRSSVLHSTQDLFLPFFSNVTWFHAIHVSGTNGTKRFDNPVLPFNDGVYFASTEKSNIIRGWIFGTTLDSKTQSLLIVNNATNVVIKVCEFQFCNDPFLGVYYHKNNKSWMESEFRVYSSANNCTFEYVSQPFLMDLEGKQGNFKNLREFVFKNIDGYFKIYSKHTPINLVRDLPQGFSALEPLVDLPIGINITRFKTLLALHRSYLTPGDSSSGWTAGAAAYYVGYLQPRTFLLKYNENGTITDAVDCALDPLSETKCTLKSFTVEKGIYQTSNFRVQPTESIVRFPNITNLCPFGEVFNATRFASVYAWNRKRISNCVADYSVLYNSASFSTFKCYGVSPTKLNDLCFTNVYADSFVIRGDEVRQIAPGQTGKIADYNYKLPDDFTGCVIAWNSNNLDSKVGGNYNYLYRLFRKSNLKPFERDISTEIYQAGSTPCNGVEGFNCYFPLQSYGFQPTNGVGYQPYRVVVLSFELLHAPATVCGPKKSTNLVKNKCVNFNFNGLTGTGVLTESNKKFLPFQQFGRDIADTTDAVRDPQTLEILDITPCSFGGVSVITPGTNTSNQVAVLYQGVNCTEVPVAIHADQLTPTWRVYSTGSNVFQTRAGCLIGAEHVNNSYECDIPIGAGICASYQTQTNSPRRARSVASQSIIAYTMSLGAENSVAYSNNSIAICTNFTISVTTEILPVSMTKTSVDCTMYICGDSTECSNLLLQYGSFCTQLNRALTGIAVEQDKNTQEVFAQVKQIYKTPPIKDFGGFNFSQILPDPSKPSKRSFIEDLLFNKVTLADAGFIKQYGDCLGDIAARDLICAQKFNGLTVLPPLLTDEMIAQYTSALLAGTITSGWTFGAGAALQIPFAMQMAYRFNGIGVTQNVLYENQKLIANQFNSAIGKIQDSLSSTASALGKLQDVVNQNAQALNTLVKQLSSNFGAISSVLNDILSRLDKVEAEVQIDRLITGRLQSLQTYVTQQLIRAAEIRASANLAATKMSECVLGQSKRVDFCGKGYHLMSFPQSAPHGVVFLHVTYVCAQEKNFTTAPAICHDGKAHFPREGVFVSNGTHWFVTQRNFYEPQIITTDNTFVSGNCDVVIGIVNNTVYDPLQPELDSGGGGSDIDPYKEFGSSYQLLNFLPLDFFPDLNALVDTATALYEEELTGREHCSPHHTAIRQALVCWDELTKLIAWMSSNITSEQVRTIIVNHVNDTWGLKVRQSLWFHLSCLTFGQHTVQEFLVSFGVWIRTPAPYRPPNAPILSTLPEHTVIC

SEQ ID NO: 11161 - protein, 1301 aa, Artificial Sequence
  SARS-CoV-2/Netherlands/ZuidHolland_2/2020__EPI_ISL_414556 spike protein (1-1147)(P715C_P1069C) WhcAg construct
MFVFLVLLPLVSSQCVNLTTRTQLPPAYTNSFTRGVYYPDKVFRSSVLHSTQDLFLPFFSNVTWFHAIHVSGTNGTKRFDNPVLPFNDGVYFASTEKSNIIRGWIFGTTLDSKTQSLLIVNNATNVVIKVCEFQFCNDPFLGVYYHKNNKSWMESEFRVYSSANNCTFEYVSQPFLMDLEGKQGNFKNLREFVFKNIDGYFKIYSKHTPINLVRDLPQGFSALEPLVDLPIGINITRFQTLLALHRSYLTPGDSSSGWTAGAAAYYVGYLQPRTFLLKYNENGTITDAVDCALDPLSETKCTLKSFTVEKGIYQTSNFRVQPTESIVRFPNITNLCPFGEVFNATRFASVYAWNRKRISNCVADYSVLYNSASFSTFKCYGVSPTKLNDLCFTNVYADSFVIRGDEVRQIAPGQTGKIADYNYKLPDDFTGCVIAWNSNNLDSKVGGNYNYLYRLFRKSNLKPFERDISTEIYQAGSTPCNGVEGFNCYFPLQSYGFQPTNGVGYQPYRVVVLSFELLHAPATVCGPKKSTNLVKNKCVNFNFNGLTGTGVLTESNKKFLPFQQFGRDIADTTDAVRDPQTLEILDITPCSFGGVSVITPGTNTSNQVAVLYQGVNCTEVPVAIHADQLTPTWRVYSTGSNVFQTRAGCLIGAEHVNNSYECDIPIGAGICASYQTQTNSPRRARSVASQSIIAYTMSLGAENSVAYSNNSIAICTNFTISVTTEILPVSMTKTSVDCTMYICGDSTECSNLLLQYGSFCTQLNRALTGIALEQDKNTQEVFAQVKQIYKTPPIKDFGGFNFSQILPDPSKPSKRSFIEDLLFNKVTLADAGFIKQYGDCLGDIAARDLICAQKFNGLTVLPPLLTDEMIAQYTSALLAGTITSGWTFGAGAALQIPFAMQMAYRFNGIGVTQNVLYENQKLIANQFNSAIGKIQDSLSSTASALGKLQDVVNQNAQALNTLVKQLSSNFGAISSVLNDILSRLDKVEAEVQIDRLITGRLQSLQTYVTQQLIRAAEIRASANLAATKMSECVLGQSKRVDFCGKGYHLMSFPQSAPHGVVFLHVTYVCAQEKNFTTAPAICHDGKAHFPREGVFVSNGTHWFVTQRNFYEPQIITTDNTFVSGNCDVVIGIVNNTVYDPLQPELDSGGGGSDIDPYKEFGSSYQLLNFLPLDFFPDLNALVDTATALYEEELTGREHCSPHHTAIRQALVCWDELTKLIAWMSSNITSEQVRTIIVNHVNDTWGLKVRQSLWFHLSCLTFGQHTVQEFLVSFGVWIRTPAPYRPPNAPILSTLPEHTVIC

SEQ ID NO: 11162 - protein, 1301 aa, Artificial Sequence
  SARS-CoV-2/USA/WA-UW31/2020__EPI_ISL_414618 spike protein (1-1147)(P715C_P1069C) WhcAg construct
MFVFLVLLPLVSSQCVNLTTRTQLPPAYTNSFTRGVYYPDKVFRSSVLHSTQDLFLPFFSNVTWFHAIHVSGTNGTKRFDNPVLPFNDGVYFASTEKSNIIRGWIFGTTLDSKTQSLLIVNNATNVVIKVCEFQFCNDPFLGVYYHKNNKSWMESEFRVYSSANNCTFEYVSQPFLMDLEGKQGNFKNLREFVFKNIDGYFKIYSKHTPINLVRDLPQGFSALEPLVDLPIGINITRFQTLLALHRSYLTPGDSSSGWTAGAAAYYVGYLQPRTFLLKYNENGTITDAVDCALDPLSETKCTLKSFTVEKGIYQTSNFRVQPTESIVRFPNITNLCPFGEVFNATRFASVYAWNRKRISNCVADYSVLYNSASFSTFKCYGVSPTKLNDLCFTNVYADSFVIRGDEVRQIAPGQTGKIADYNYKLPDDFTGCVIAWNSNNLDSKVGGNYNYLYRLFRKSNLKPFERDISTEIYQAGSTPCNGAEGFNCYFPLQSYGFQPTNGVGYQPYRVVVLSFELLHAPATVCGPKKSTNLVKNKCVNFNFNGLTGTGVLTESNKKFLPFQQFGRDIADTTDAVRDPQTLEILDITPCSFGGVSVITPGTNTSNQVAVLYQDVNCTEVPVAIHADQLTPTWRVYSTGSNVFQTRAGCLIGAEHVNNSYECDIPIGAGICASYQTQTNSPRRARSVASQSIIAYTMSLGAENSVAYSNNSIAICTNFTISVTTEILPVSMTKTSVDCTMYICGDSTECSNLLLQYGSFCTQLNRALTGIAVEQDKNTQEVFAQVKQIYKTPPIKDFGGFNFSQILPDPSKPSKRSFIEDLLFNKVTLADAGFIKQYGDCLGDIAARDLICAQKFNGLTVLPPLLTDEMIAQYTSALLAGTITSGWTFGAGAALQIPFAMQMAYRFNGIGVTQNVLYENQKLIANQFNSAIGKIQDSLSSTASALGKLQDVVNQNAQALNTLVKQLSSNFGAISSVLNDILSRLDKVEAEVQIDRLITGRLQSLQTYVTQQLIRAAEIRASANLAATKMSECVLGQSKRVDFCGKGYHLMSFPQSAPHGVVFLHVTYVCAQEKNFTTAPAICHDGKAHFPREGVFVSNGTHWFVTQRNFYEPQIITTDNTFVSGNCDVVIGIVNNTVYDPLQPELDSGGGGSDIDPYKEFGSSYQLLNFLPLDFFPDLNALVDTATALYEEELTGREHCSPHHTAIRQALVCWDELTKLIAWMSSNITSEQVRTIIVNHVNDTWGLKVRQSLWFHLSCLTFGQHTVQEFLVSFGVWIRTPAPYRPPNAPILSTLPEHTVIC

SEQ ID NO: 11163 - protein, 1301 aa, Artificial Sequence
  SARS-CoV-2/South Korea/SNU01/2020__EPI_ISL_411929 spike protein (1-1147)(P715C_P1069C) WhcAg construct
MFVFLVLLPLVSSQCVNLTTRTQLPPAYTNSFTRGVYYPDKVFRSSVLHSTQDLFLPFFSNVTWFHAIHVSGTNGTKRFDNPVLPFNDGVYFASTEKSNIIRGWIFGTTLDSKTQSLLIVNNATNVVIKVCEFQFCNDPFLGVYYHKNNKSWMESEFRVYSSANNCTFEYVSQPFLMDLEGKQGNFKNLREFVFKNIDGYFKIYSKHTPINLVRDLPQGFWALEPLVDLPIGINITRFQTLLALHRSYLTPGDSSSGWTAGAAAYYVGYLQPRTFLLKYNENGTITDAVDCALDPLSETKCTLKSFTVEKGIYQTSNFRVQPTESIVRFPNITNLCPFGEVFNATRFASVYAWNRKRISNCVADYSVLYNSASFSTFKCYGVSPTKLNDLCFTNVYADSFVIRGDEVRQIAPGQTGKIADYNYKLPDDFTGCVIAWNSNNLDSKVGGNYNYLYRLFRKSNLKPFERDISTEIYQAGSTPCNGVEGFNCYFPLQSYGFQPTNGVGYQPYRVVVLSFELLHAPATVCGPKKSTNLVKNKCVNFNFNGLTGTGVLTESNKKFLPFQQFGRDIADTTDAVRDPQTLEILDITPCSFGGVSVITPGTNTSNQVAVLYQDVNCTEVPVAIHADQLTPTWRVYSTGSNVFQTRAGCLIGAEHVNNSYECDIPIGAGICASYQTQTNSPRRARSVASQSIIAYTMSLGAENSVAYSNNSIAICTNFTISVTTEILPVSMTKTSVDCTMYICGDSTECSNLLLQYGSFCTQLNRALTGIAVEQDKNTQEVFAQVKQIYKTPPIKDFGGFNFSQILPDPSKPSKRSFIEDLLFNKVTLADAGFIKQYGDCLGDIAARDLICAQKFNGLTVLPPLLTDEMIAQYTSALLAGTITSGWTFGAGAALQIPFAMQMAYRFNGIGVTQNVLYENQKLIANQFNSAIGKIQDSLSSTASALGKLQDVVNQNAQALNTLVKQLSSNFGAISSVLNDILSRLDKVEAEVQIDRLITGRLQSLQTYVTQQLIRAAEIRASANLAATKMSECVLGQSKRVDFCGKGYHLMSFPQSAPHGVVFLHVTYVCAQEKNFTTAPAICHDGKAHFPREGVFVSNGTHWFVTQRNFYEPQIITTDNTFVSGNCDVVIGIVNNTVYDPLQPELDSGGGGSDIDPYKEFGSSYQLLNFLPLDFFPDLNALVDTATALYEEELTGREHCSPHHTAIRQALVCWDELTKLIAWMSSNITSEQVRTIIVNHVNDTWGLKVRQSLWFHLSCLTFGQHTVQEFLVSFGVWIRTPAPYRPPNAPILSTLPEHTVIC

SEQ ID NO: 11164 - protein, 1301 aa, Artificial Sequence
  SARS-CoV-2/China/WF0004/2020__EPI_ISL_413694 spike protein (1-1147)(P715C_P1069C) WhcAg construct
MFVFLVLLPLVSSQCVNLTTRTQLPPAYTNSFTRGVYYPDKVFRSSVLHSTQDLFLPFFSNVTWFHAIHVSGTNGTKRFDNPVLPFNDGVYFASTEKSNIIRGWIFGTTLDSKTQSLLIVNNATNVVIKVCEFQFCNDPFLGVYYHKNNKSWTESEFRVYSSANNCTFEYVSQPFLMDLEGKQGNFKNLREFVFKNIDGYFKIYSKHTPINLVRDLPQGFSALEPLVDLPIGINITRFQTLLALHRSYLTPGDSSSGWTAGAAAYYVGYLQPRTFLLKYNENGTITDAVDCALDPLSETKCTLKSFTVEKGIYQTSNFRVQPTESIVRFPNITNLCPFGEVFNATRFASVYAWNRKRISNCVADYSVLYNSASFSTFKCYGVSPTKLNDLCFTNVYADSFVIRGDEVRQIAPGQTGKIADYNYKLPDDFTGCVIAWNSNNLDSKVGGNYNYLYRLFRKSNLKPFERDISTEIYQAGSTPCNGVEGFNCYFPLQSYGFQPTNGVGYQPYRVVVLSFELLHAPATVCGPKKSTNLVKNKCVNFNFNGLTGTGVLTESNKKFLPFQQFGRDIADTTDAVRDPQTLEILDITPCSFGGVSVITPGTNTSNQVAVLYQDVNCTEVPVAIHADQLTPTWRVYSTGSNVFQTRAGCLIGAEHVNNSYECDIPIGAGICASYQTQTNSPRRARSVASQSIIAYTMSLGAENSVAYSNNSIAICTNFTISVTTEILPVSMTKTSVDCTMYICGDSTECSNLLLQYGSFCTQLNRALTGIAVEQDKNTQEVFAQVKQIYKTPPIKDFGGFNFSQILPDPSKPSKRSFIEDLLFNKVTLADAGFIKQYGDCLGDIAARDLICAQKFNGLTVLPPLLTDEMIAQYTSALLAGTITSGWTFGAGAALQIPFAMQMAYRFNGIGVTQNVLYENQKLIANQFNSAIGKIQDSLSSTASALGKLQDVVNQNAQALNTLVKQLSSNFGAISSVLNDILSRLDKVEAEVQIDRLITGRLQSLQTYVTQQLIRAAEIRASANLAATKMSECVLGQSKRFDFCGKGYHLMSFPQSAPHGVVFLHVTYVCAQEKNFTTAPAICHDGKAHFPREGVFVSNGTHWFVTQRNFYEPQIITTDNTFVSGNCDVVIGIVNNTVYDPLQPELDSGGGGSDIDPYKEFGSSYQLLNFLPLDFFPDLNALVDTATALYEEELTGREHCSPHHTAIRQALVCWDELTKLIAWMSSNITSEQVRTIIVNHVNDTWGLKVRQSLWFHLSCLTFGQHTVQEFLVSFGVWIRTPAPYRPPNAPILSTLPEHTVIC

SEQ ID NO: 11165 - protein, 1301 aa, Artificial Sequence
  SARS-CoV-2/China/WF0028/2020__EPI_ISL_413791 spike protein (1-1147)(P715C_P1069C) WhcAg construct
MFVFLVLLPLVSSQCVNLTTRTQLPPAYTNSFTRGVYYPDKVFRSSVLHSTQDLFLPFFSNVTWFHAIHVSGTNGTKRFDNPVLPFNDGVYFASTEKSNIIRGWIFGTTLDSKTQSLLIVNNATNVVIKVCEFQFCNDPFLGVYYHKNNKSWMESEFRVYSSANNCTFEYVSQPFLMDLEGKQGNFKNLREFVFKNIDGYFKIYSKHTPINLVRDLPQGFSALEPLVDLPIGINITRFQTLLALHRSYLTPGDSSSGWTAGAAAYYVGYLQPRTFLLKYNENGTITDAVDCALDPLSETKCTLKSFTVEKGIYQTSNFRVQPTESIVRFPNITNLCPFGEVFNATRFASVYAWNRKRISNCVADYSVLYNSASFSTFKCYGVSPTKLNDLCFTNVYADSFVIRGDEVRQIAPGQTGKIADYNYKLPDDFTGCVIAWNSNNLDSKVGGNYNYLYRLFRKSNLKPFERDISTEIYQAGSTPCNGVEGFNCYFPLQSYGFQPTNGVGYQPYRVVVLSFELLHAPATVCGPKKSTNLVKNKCVNFNFNGLTGTGVLTESNKKFLPFQQFGRDIADTTDAVRDPQTLEILDITPCSFGGVSVITPGTNTSNQVAVLYQDVNCTEVPVAIHADQLTPTWRVYSTGSNVFQTRAGCLIGAEHVNNSYECDIPIGAGICASYQTQTNSPRRARSVASQSIIAYTMSLGAENSVAYSNNSIAICTNFTISVTTEILPVSMTKTSVDCTMYICGDSTECSNLLLQYGSFCTQLNRALTGIAVEQDKNTQEVFAQVKQIYKTPPIKDFGGFNFSQILPDPSKPSKRSFIEDLLFNKVTLADAGFIKQYGDCLGDIAARDLICAQKFNGLTVLPPLLTDEMIAQYTSALLAGTITSGWTFGAGAALQIPFAMQMAYRFNGIGVTQNVLYENQKLIANQFNSAIGKIQDSLSSTASALGKLQDVVNQNAQALNTLVKQLSSNFGAISSVLNDILSRLDKVEAEVQIDRLITGRLQSLQTYVTQQLIRAAEIRASANLAATKMSECVLGQSKRVDFCGKGYHLMSFPQSAPHGVVFLHVTYVCAQEKNFTTAPAICHDGKAHFPREGVFVSNGTHWFVTQRNFYEPQIITTDNTFVSGNCDVVIGIVNNTVYDPLQPELESGGGGSDIDPYKEFGSSYQLLNFLPLDFFPDLNALVDTATALYEEELTGREHCSPHHTAIRQALVCWDELTKLIAWMSSNITSEQVRTIIVNHVNDTWGLKVRQSLWFHLSCLTFGQHTVQEFLVSFGVWIRTPAPYRPPNAPILSTLPEHTVIC

SEQ ID NO: 11166 - protein, 1301 aa, Artificial Sequence
  SARS-CoV-2/2019-nCoV/USA-CruiseA-18/2020__MT159716.1 spike protein (1-1147)(P715C_P1069C) WhcAg construct
MFVFLVLLPLVSSQCVNLTTRTQLPPAYTNSFTRGVYYPDKVFRSSVLHSTQDLFLPFFSNVTWFHAIHVSGTNGTKRFDNPVLPFNDGVYFASTEKSNIIRGWIFGTTLDSKTQSLLIVNNATNVVIKVCEFQFCNDPFLGVYYHKNNKSWMESELRVYSSANNCTFEYVSQPFLMDLEGKQGNFKNLREFVFKNIDGYFKIYSKHTPINLVRDLPQGFSALEPLVDLPIGINITRFQTLLALHRSYLTPGDSSSGWTAGAAAYYVGYLQPRTFLLKYNENGTITDAVDCALDPLSETKCTLKSFTVEKGIYQTSNFRVQPTESIVRFPNITNLCPFGEVFNATRFASVYAWNRKRISNCVADYSVLYNSASFSTFKCYGVSPTKLNDLCFTNVYADSFVIRGDEVRQIAPGQTGKIADYNYKLPDDFTGCVIAWNSNNLDSKVGGNYNYLYRLFRKSNLKPFERDISTEIYQAGSTPCNGVEGFNCYFPLQSYGFQPTNGVGYQPYRVVVLSFELLHAPATVCGPKKSTNLVKNKCVNFNFNGLTGTGVLTESNKKFLPFQQFGRDIADTTDAVRDPQTLEILDITPCSFGGVSVITPGTNTSNQVAVLYQDVNCTEVPVAIHADQLTPTWRVYSTGSNVFQTRAGCLIGAEHVNNSYECDIPIGAGICASYQTQTNSPRRARSVASQSIIAYTMSLGAENSVAYSNNSIAICTNFTISVTTEILPVSMTKTSVDCTMYICGDSTECSNLLLQYGSFCTQLNRALTGIAVEQDKNTQEVFAQVKQIYKTPPIKDFGGFNFSQILPDPSKPSKRSFIEDLLFNKVTLADAGFIKQYGDCLGDIAARDLICAQKFNGLTVLPPLLTDEMIAQYTSALLAGTITSGWTFGAGAALQIPFAMQMAYRFNGIGVTQNVLYENQKLIANQFNSAIGKIQDSLSSTASALGKLQDVVNQNAQALNTLVKQLSSNFGAISSVLNDILSRLDKVEAEVQIDRLITGRLQSLQTYVTQQLIRAAEIRASANLAATKMSECVLGQSKRVDFCGKGYHLMSFPQSAPHGVVFLHVTYVCAQEKNFTTAPAICHDGKAHFPREGVFVSNGTHWFVTQRNFYEPQIITTDNTFVSGNCDVVIGIVNNTVYDPLQPELDSGGGGSDIDPYKEFGSSYQLLNFLPLDFFPDLNALVDTATALYEEELTGREHCSPHHTAIRQALVCWDELTKLIAWMSSNITSEQVRTIIVNHVNDTWGLKVRQSLWFHLSCLTFGQHTVQEFLVSFGVWIRTPAPYRPPNAPILSTLPEHTVIC

SEQ ID NO: 11167 - protein, 1301 aa, Artificial Sequence
  SARS-CoV-2/SARS-CoV-2/Yunnan-01/human/2020/CHN__MT049951.1 spike protein (1-1147)(P715C_P1069C) WhcAg construct
MFVFLVLLPLVSSQCVNLTTRTQLPPANTNSFTRGVYYPDKVFRSSVLHSTQDLFLPFFSNVTWFHAIHVSGTNGTKRFDNPVLPFNDGVYFASTEKSNIIRGWIFGTTLDSKTQSLLIVNNATNVVIKVCEFQFCNDPFLGVYYHKNNKSWMESEFRVYSSANNCTFEYVSQPFLMDLEGKQGNFKNLREFVFKNIDGYFKIYSKHTPINLVRDLPQGFSALEPLVDLPIGINITRFQTLLALHRSYLTPGDSSSGWTAGAAAYYVGYLQPRTFLLKYNENGTITDAVDCALDPLSETKCTLKSFTVEKGIYQTSNFRVQPTESIVRFPNITNLCPFGEVFNATRFASVYAWNRKRISNCVADYSVLYNSASFSTFKCYGVSPTKLNDLCFTNVYADSFVIRGDEVRQIAPGQTGKIADYNYKLPDDFTGCVIAWNSNNLDSKVGGNYNYLYRLFRKSNLKPFERDISTEIYQAGSTPCNGVEGFNCYFPLQSYGFQPTNGVGYQPYRVVVLSFELLHAPATVCGPKKSTNLVKNKCVNFNFNGLTGTGVLTESNKKFLPFQQFGRDIADTTDAVRDPQTLEILDITPCSFGGVSVITPGTNTSNQVAVLYQDVNCTEVPVAIHADQLTPTWRVYSTGSNVFQTRAGCLIGAEHVNNSYECDIPIGAGICASYQTQTNSPRRARSVASQSIIAYTMSLGAENSVAYSNNSIAICTNFTISVTTEILPVSMTKTSVDCTMYICGDSTECSNLLLQYGSFCTQLNRALTGIAVEQDKNTQEVFAQVKQIYKTPPIKDFGGFNFSQILPDPSKPSKRSFIEDLLFNKVTLADAGFIKQYGDCLGDIAARDLICAQKFNGLTVLPPLLTDEMIAQYTSALLAGTITSGWTFGAGAALQIPFAMQMAYRFNGIGVTQNVLYENQKLIANQFNSAIGKIQDSLSSTASALGKLQDVVNQNAQALNTLVKQLSSNFGAISSVLNDILSRLDKVEAEVQIDRLITGRLQSLQTYVTQQLIRAAEIRASANLAATKMSECVLGQSKRVDFCGKGYHLMSFPQSAPHGVVFLHVTYVCAQEKNFTTAPAICHDGKAHFPREGVFVSNGTHWFVTQRNFYEPQIITTDNTFVSGNCDVVIGIVNNTVYDPLQPELDSGGGGSDIDPYKEFGSSYQLLNFLPLDFFPDLNALVDTATALYEEELTGREHCSPHHTAIRQALVCWDELTKLIAWMSSNITSEQVRTIIVNHVNDTWGLKVRQSLWFHLSCLTFGQHTVQEFLVSFGVWIRTPAPYRPPNAPILSTLPEHTVIC

SEQ ID NO: 11168 - protein, 1301 aa, Artificial Sequence
  SARS-CoV-2/USA/WA-UW292/2020__EPI_ISL_418077 spike protein (1-1147)(P715C_P1069C) WhcAg construct
MFVFLVLLPLVSSQCVNLTTRTQLPPAYTNSFTRGVYYPDKVFRSSVLHSTQDLFLPFFSNVTWFHAIHVSGTNGTKRFDNPVLPFNDGVYFASTEKSNIIRGWIFGTTLDSKTQSLLIVNNATNVVIKVCEFQFCNDPFLGVYYHKNNKSWMESEFRVYSSANNCTFEYVSQPFLMDLEGKQGNFKNLREFVFKNIDGYFKIYSKHTPINLVRDLPQGFSALEPLVDLPIGINITRFQTLLALHRSYLTPGDSSSGWTAGAAAYYVGYLQPRTFLLKYNENGTITDAVDCALDPLSETKCTLKSFTVEKGIYQTSNFRVQPTESIVRFPNITNLCPFGEVFNATRFASVYAWNRKRISNCVADYSVLYNSASFSTFKCYGVSPTKLNDLCFTNVYADSFVIRGDEVRQIAPGQTGKIADYNYKLPDDFTGCVIAWNSNNLDSKVGGNYNYLYRLFRKSNLKPFERDISTEIYQASSTPCNGVEGFNCYFPLQSYGFQPTNGVGYQPYRVVVLSFELLHAPATVCGPKKSTNLVKNKCVNFNFNGLTGTGVLTESNKKFLPFQQFGRDIADTTDAVRDPQTLEILDITPCSFGGVSVITPGTNTSNQVAVLYQDVNCTEVPVAIHADQLTPTWRVYSTGSNVFQTRAGCLIGAEHVNNSYECDIPIGAGICASYQTQTNSPRRARSVASQSIIAYTMSLGAENSVAYSNNSIAICTNFTISVTTEILPVSMTKTSVDCTMYICGDSTECSNLLLQYGSFCTQLNRALTGIAVEQDKNTQEVFAQVKQIYKTPPIKDFGGFNFSQILPDPSKPSKRSFIEDLLFNKVTLADAGFIKQYGDCLGDIAARDLICAQKFNGLTVLPPLLTDEMIAQYTSALLAGTITSGWTFGAGAALQIPFAMQMAYRFNGIGVTQNVLYENQKLIANQFNSAIGKIQDSLSSTASALGKLQDVVNQNAQALNTLVKQLSSNFGAISSVLNDILSRLDKVEAEVQIDRLITGRLQSLQTYVTQQLIRAAEIRASANLAATKMSECVLGQSKRVDFCGKGYHLMSFPQSAPHGVVFLHVTYVCAQEKNFTTAPAICHDGKAHFPREGVFVSNGTHWFVTQRNFYEPQIITTDNTFVSGNCDVVIGIVNNTVYDPLQPELDSGGGGSDIDPYKEFGSSYQLLNFLPLDFFPDLNALVDTATALYEEELTGREHCSPHHTAIRQALVCWDELTKLIAWMSSNITSEQVRTIIVNHVNDTWGLKVRQSLWFHLSCLTFGQHTVQEFLVSFGVWIRTPAPYRPPNAPILSTLPEHTVIC

SEQ ID NO: 11169 - protein, 1301 aa, Artificial Sequence
  SARS-CoV-2/Iceland/192/2020__EPI_ISL_417819 spike protein (1-1147)(P715C_P1069C) WhcAg construct
MFVFFVLLPLVSSQCVNLTTRTQLPPAYTNSFTRGVYYPDKVFRSSVLHSTQDLFLPFFSNVTWFHAIHVSGTNGTKRFDNPVLPFNDGVYFASTEKSNIIRGWIFGTTLDSKTQSLLIVNNATNVVIKVCEFQFCNDPFLGVYYHKNNKSWMESEFRVYSSANNCTFEYVSQPFLMDLEGKQGNFKNLREFVFKNIDGYFKIYSKHTPINLVRDLPQGFSALEPLVDLPIGINITRFQTLLALHRSYLTPGDSSSGWTAGAAAYYVGYLQPRTFLLKYNENGTITDAVDCALDPLSETKCTLKSFTVEKGIYQTSNFRVQPTESIVRFPNITNLCPFGEVFNATRFASVYAWNRKRISNCVADYSVLYNSASFSTFKCYGVSPTKLNDLCFTNVYADSFVIRGDEVRQIAPGQTGKIADYNYKLPDDFTGCVIAWNSNNLDSKVGGNYNYLYRLFRKSNLKPFERDISTEIYQAGSTPCNGVEGFNCYFPLQSYGFQPTNGVGYQPYRVVVLSFELLHAPATVCGPKKSTNLVKNKCVNFNFNGLTGTGVLTESNKKFLPFQQFGRDIADTTDAVRDPQTLEILDITPCSFGGVSVITPGTNTSNQVAVLYQGVNCTEVPVAIHADQLTPTWRVYSTGSNVFQTRAGCLIGAEHVNNSYECDIPIGAGICASYQTQTNSPRRARSVASQSIIAYTMSLGAENSVAYSNNSIAICTNFTISVTTEILPVSMTKTSVDCTMYICGDSTECSNLLLQYGSFCTQLNRALTGIAVEQDKNTQEVFAQVKQIYKTPPIKDFGGFNFSQILPDPSKPSKRSFIEDLLFNKVTLADAGFIKQYGDCLGDIAARDLICAQKFNGLTVLPPLLTDEMIAQYTSALLAGTITSGWTFGAGAALQIPFAMQMAYRFNGIGVTQNVLYENQKLIANQFNSAIGKIQDSLSSTASALGKLQDVVNQNAQALNTLVKQLSSNFGAISSVLNDILSRLDKVEAEVQIDRLITGRLQSLQTYVTQQLIRAAEIRASANLAATKMSECVLGQSKRVDFCGKGYHLMSFPQSAPHGVVFLHVTYVCAQEKNFTTAPAICHDGKAHFPREGVFVSNGTHWFVTQRNFYEPQIITTDNTFVSGNCDVVIGIVNNTVYDPLQPELDSGGGGSDIDPYKEFGSSYQLLNFLPLDFFPDLNALVDTATALYEEELTGREHCSPHHTAIRQALVCWDELTKLIAWMSSNITSEQVRTIIVNHVNDTWGLKVRQSLWFHLSCLTFGQHTVQEFLVSFGVWIRTPAPYRPPNAPILSTLPEHTVIC

SEQ ID NO: 11170 - protein, 1301 aa, Artificial Sequence
  SARS-CoV-2/Belgium/ULG-6939/2020__EPI_ISL_417020 spike protein (1-1147)(P715C_P1069C) WhcAg construct
MFVFLVLLPLVSSQCVNLTTRTQLPPAYTNSFTRGVYYPDKVFRSSVLHSTQDLFLPFFSNVTWFHAIHVSGTNGTKRFDNPVLPFNDGVYFASTEKSNIIRGWIFGTTLDSKTQSLLIVNNATNVVIKVCEFQFCNDPFLGVYYHKNNKSWMESEFRVYSSANNCTFEYVSQPFLMDLEGKQGNFKNLREFVFKNIDGYFKIYSKHTPINLVRDLPQGFSALEPLVDLPIGINITRFQTLLALHRSYLTPGDSSSGWTAGAAAYYVGYLQPRTFLLKYNENGTITDAVDCALDPLSETKCTLKSFTVEKGIYQTSNFRVQPTESIVRFPNITNLCPFGEVFNATRFASVYAWNRKRISNCVADYSVLYNSASFSTFKCYGVSPTKLNDLCFTNVYADSFVIRGDEVRQIAPGQTGKIADYNYKLPDDFTGCVIAWNSNNLDSKVGGNYNYLYRLFRKSNLKPFERDISTEIYQAGSTPCNGVEGFNCYFPLQSYGFQPTNGVGYQPYRVVVLSFELLHAPATVCGPKKSTNLVKNKCVNFNFNGLTGTGVLTESNKKFLPFQQFGRDIADTTDAVRDPQTLEILDITPCSFGGVSVITPGTNTSNQVAVLYQGVNCTEVPVAIHADQLTPTWRVYSTGSNVFQTRAGCLIGAEHVNNSYECDIPIGAGICASYQTQTNSPRRARSVASQSIIAYTMSLGAENSVVYSNNSIAICTNFTISVTTEILPVSMTKTSVDCTMYICGDSTECSNLLLQYGSFCTQLNRALTGIAVEQDKNTQEVFAQVKQIYKTPPIKDFGGFNFSQILPDPSKPSKRSFIEDLLFNKVTLADAGFIKQYGDCLGDIAARDLICAQKFNGLTVLPPLLTDEMIAQYTSALLAGTITSGWTFGAGAALQIPFAMQMAYRFNGIGVTQNVLYENQKLIANQFNSAIGKIQDSLSSTASALGKLQDVVNQNAQALNTLVKQLSSNFGAISSVLNDILSRLDKVEAEVQIDRLITGRLQSLQTYVTQQLIRAAEIRASANLAATKMSECVLGQSKRVDFCGKGYHLMSFPQSAPHGVVFLHVTYVCAQEKNFTTAPAICHDGKAHFPREGVFVSNGTHWFVTQRNFYEPQIITTDNTFVSGNCDVVIGIVNNTVYDPLQPELDSGGGGSDIDPYKEFGSSYQLLNFLPLDFFPDLNALVDTATALYEEELTGREHCSPHHTAIRQALVCWDELTKLIAWMSSNITSEQVRTIIVNHVNDTWGLKVRQSLWFHLSCLTFGQHTVQEFLVSFGVWIRTPAPYRPPNAPILSTLPEHTVIC

SEQ ID NO: 11171 - protein, 1301 aa, Artificial Sequence
  SARS-CoV-2/France/HF2496/2020__EPI_ISL_418231 spike protein (1-1147)(P715C_P1069C) WhcAg construct
MFVFLVLLPLVSSQCVNLTTRTQLPPAYTNSFTRGVYYPDKVFRSSVLHSTQDLFLPFFSNVTWFHAIHVSGTNGTKRFDNPVLPFNDGVYFASTEKSNIIRGWIFGTTLDSKTQSLLIVNNATNVVIKVCEFQFCNDPFLGVYYHKNNKSWMESEFRVYSSANNCTFEYVSQPFLMDLEGKQGNFKNLREFVFKNIDGYFKIYSKHTPINLVRDLPQGFSALEPLVDLPIGINITRFQTLLALHRSYLTPGDSSSGWTAGAAAYYVGYLQPRTFLLKYNENGTITDAVDCALDPLSETKCTLKSFTVEKGIYQTSNFRVQPTESIVRFPNITNLCPFGEVFNATRFASVYAWNRKRISNCVADYSVLYNSASFSTFKCYGVSPTKLNDLCFTNVYADSFVIRGDEVRQIAPGQTGKIADYNYKLPDDFTGCVIAWNSNNLDSKVGGNYNYLYRLFRKSNLKPFERDISTEIYQAGSTPCNGVEGFNCYFPLQSYGFQPTNGVGYQPYRVVVLSFELLHAPATVCGPKKSTNLVKNKCVNFNFNGLTGTGVLTESNKKFLPFQQFGRDIADTTDAVRDPQTLEILDITPCSFGGVSVITPGTNTSNQVAVLYQGVNCTEVPVAIHADQLTPTWRVYSTGSNVFQTRAGCLIGAEHVNNSYECDIPIGAGICASYQTQTNSPRRARSVASQSIIAYTMSLGAENSVAYSNNSIAICTNFTISVTTEILPVSMTKTSVDCTMYICGDSTECSNLLLQYGSFCTQLNRALTGIAVEQDKNTQEVFAQVKQIYKTPPIKDFGGFNFSQILPDPSKPSKRSFIEDLLFNKVTLADAGFIKQYGDCLGDIVARDLICAQKFNGLTVLPPLLTDEMIAQYTSALLAGTITSGWTFGAGAALQIPFAMQMAYRFNGIGVTQNVLYENQKLIANQFNSAIGKIQDSLSSTASALGKLQDVVNQNAQALNTLVKQLSSNFGAISSVLNDILSRLDKVEAEVQIDRLITGRLQSLQTYVTQQLIRAAEIRASANLAATKMSECVLGQSKRVDFCGKGYHLMSFPQSAPHGVVFLHVTYVCAQEKNFTTAPAICHDGKAHFPREGVFVSNGTHWFVTQRNFYEPQIITTDNTFVSGNCDVVIGIVNNTVYDPLQPELDSGGGGSDIDPYKEFGSSYQLLNFLPLDFFPDLNALVDTATALYEEELTGREHCSPHHTAIRQALVCWDELTKLIAWMSSNITSEQVRTIIVNHVNDTWGLKVRQSLWFHLSCLTFGQHTVQEFLVSFGVWIRTPAPYRPPNAPILSTLPEHTVIC

SEQ ID NO: 11172 - protein, 1301 aa, Artificial Sequence
  SARS-CoV-2/USA/WA-UW291/2020__EPI_ISL_418076 spike protein (1-1147)(P715C_P1069C) WhcAg construct
MFVFLVLLPLVSSQCVNLTTRTQLPPAYTNSFTRGVYYPDKVFRSSVLHSTQDLFLPFFSNVTWFHAIHVSGTNGTKRFDNPVLPFNDGVYFASTEKSNIIRGWIFGTTLDSKTQSLLIVNNATNVVIKVCEFQFCNDPFLGVYYHKNNKSWMESEFRVYSSANNCTFEYVSQPFLMDLEGKQGNFKNLREFVFKNIDGYFKIYSKHTPINLVRDLPQGFSALEPLVDLPIGINITRFQTLLALHRSYLTPGDSSSGWTAGAAAYYVGYLQPRTFLLKYNENGTITDAVDCALDPLSETKCTLKSFTVEKGIYQTSNFRVQPTESIVRFPNITNLCPFGEVFNATRFASVYAWNRKRISNCVADYSVLYNSASFSTFKCYGVSPTKLNDLCFTNVYADSFVIRGDEVRQIAPGQTGKIADYNYKLPDDFTGCVIAWNSNNLDSKVGGNYNYLYRLFRKSNLKPFERDISTEIYQAGSTPCNGVEGFNCYFPLQSYGFQPTNGVGYQPYRVVVLSFELLHAPATVCGPKKSTNLVKNKCVNFNFNGLTGTGVLTESNKKFLPFQQFGRDIADTTDAVRDPQTLEILDITPCSFGGVSVITPGTNTSNQVAVLYQGVNCTEVPVAIHADQLTPTWRVYSTGSNVFQTRAGCLIGAEHVNNSYECDIPIGAGICASYQTQTNSPRRARSVASQSIIAYTMSLGAENSVAYSNNSIAICTNFTISVTTEILPVSMTKTSVDCTMYICGDSTECSNLLLQYGSFCTQLNRALTGIAVEQDKNTQEVFAQVKQIYKTPPIKDFGGFNFSQILPDPSKPSKRSFIEDLLFNKVTLADAGFIKQYGDCLGDIAARDLICAQKFNGLTVLPPLLTDEMIAQYTSALLAGTITSGWTFGAGAALQIPFAMQMAYRFNGIGVTQNVLYENQKLIANQFNSAIGKIQYSLSSTASALGKLQDVVNQNAQALNTLVKQLSSNFGAISSVLNDILSRLDKVEAEVQIDRLITGRLQSLQTYVTQQLIRAAEIRASANLAATKMSECVLGQSKRVDFCGKGYHLMSFPQSAPHGVVFLHVTYVCAQEKNFTTAPAICHDGKAHFPREGVFVSNGTHWFVTQRNFYEPQIITTDNTFVSGNCDVVIGIVNNTVYDPLQPELDSGGGGSDIDPYKEFGSSYQLLNFLPLDFFPDLNALVDTATALYEEELTGREHCSPHHTAIRQALVCWDELTKLIAWMSSNITSEQVRTIIVNHVNDTWGLKVRQSLWFHLSCLTFGQHTVQEFLVSFGVWIRTPAPYRPPNAPILSTLPEHTVIC

SEQ ID NO: 11173 - protein, 1301 aa, Artificial Sequence; identical to SEQ ID NO: 11136
  SARS-CoV-2/Portugal/PT0034/2020__EPI_ISL_418019 spike protein (1-1147)(P715C_P1069C) WhcAg construct

SEQ ID NO: 11174 - protein, 1301 aa, Artificial Sequence; identical to SEQ ID NO: 11128
  SARS-CoV-2/Iceland/202/2020__EPI_ISL_417750 spike protein (1-1147)(P715C_P1069C) WhcAg construct

SEQ ID NO: 11175 - protein, 1301 aa, Artificial Sequence
  SARS-CoV-2/USA/WA-UW261/2020__EPI_ISL_418046 spike protein (1-1147)(P715C_P1069C) WhcAg construct
MFVFLVLLPLVSSQCVNLTTRTQLPPAYTNSFTRGVYYPDKVFRSSVLHSTQDLFLPFFSNVTWFHAIHVSGTNGTKRFDNPVLPFNDGVYFASTEKSNIIRGWIFGTTLDSKTQSLLIVNNATNVVIKVCEFQFCNDPFLGVYYHKNNKSWMESEFRVYSSANNCTFEYVSQPFLMDLEGKQGNFKNLREFVFKNIDGYFKIYSKHTPINLVRDLPQGFSALEPLVDLPIGINITRFQTLLALHRSYLTPGDSSSGWTAGAAAYYVGYLQPRTFLLKYNENGTITDAVDCALDPLSETKCTLKSFTVEKGIYQTSNFRVQPTESIVRFPNITNLCPFGEVFNATRFTSVYAWNRKRISNCVADYSVLYNSASFSTFKCYGVSPTKLNDLCFTNVYADSFVIRGDEVRQIAPGQTGKIADYNYKLPDDFTGCVIAWNSNNLDSKVGGNYNYLYRLFRKSNLKPFERDISTEIYQAGSTPCNGVEGFNCYFPLQSYGFQPTNGVGYQPYRVVVLSFELLHAPATVCGPKKSTNLVKNKCVNFNFNGLTGTGVLTESNKKFLPFQQFGRDIADTTDAVRDPQTLEILDITPCSFGGVSVITPGTNTSNQVAVLYQDVNCTEVPVAIHADQLTPTWRVYSTGSNVFQTRAGCLIGAEHVNNSYECDIPIGAGICASYQTQTNSPRRARSVASQSIIAYTMSLGAENSVAYSNNSIAICTNFTISVTTEILPVSMTKTSVDCTMYICGDSTECSNLLLQYGSFCTQLNRALTGIAVEQDKNTQEVFAQVKQIYKTPPIKDFGGFNFSQILPDPSKPSKRSFIEDLLFNKVTLADAGFIKQYGDCLGDIAARDLICAQKFNGLTVLPPLLTDEMIAQYTSALLAGTITSGWTFGAGAALQIPFAMQMAYRFNGIGVTQNVLYENQKLIANQFNSAIGKIQDSLSSTASALGKLQDVVNQNAQALNTLVKQLSSNFGAISSVLNDILSRLDKVEAEVQIDRLITGRLQSLQTYVTQQLIRAAEIRASANLAATKMSECVLGQSKRVDFCGKGYHLMSFPQSAPHGVVFLHVTYVCAQEKNFTTAPAICHDGKAHFPREGVFVSNGTHWFVTQRNFYEPQIITTDNTFVSGNCDVVIGIVNNTVYDPLQPELDSGGGGSDIDPYKEFGSSYQLLNFLPLDFFPDLNALVDTATALYEEELTGREHCSPHHTAIRQALVCWDELTKLIAWMSSNITSEQVRTIIVNHVNDTWGLKVRQSLWFHLSCLTFGQHTVQEFLVSFGVWIRTPAPYRPPNAPILSTLPEHTVIC

SEQ ID NO: 11176 - protein, 1301 aa, Artificial Sequence
  SARS-CoV-2/Portugal/PT0035/2020__EPI_ISL_418020 spike protein (1-1147)(P715C_P1069C) WhcAg construct
MFVFLVLLPLVSSQCVNLTTRTQLPPAYTNSFTRGVYYPDKVFRSSVLHSTQDLFLPFFSNVTWFHAIHVSGTNGTKRFDNPVLPFNDGVYFASTEKSNIIRGWIFGTTLDSKTQSLLIVNNATNVVIKVCEFQFCNDPFLGVYYHKNNKSWMESEFRVYSSANNCTFEYVSQPFLMDLEGKQGNFKNLREFVFKNIDGYFKIYSKHTPINLVRDLPQGFSALEPLVDLPIGINITRFQTLLALHRSYLTPGDSSSGWTAGAAAYYVGYLQPRTFLLKYNENGTITDAVDCALDPLSETKCTLKSFTVEKGIYQTSNFRVQPTESIVRFPNITNLCPFGEVFNATRFASVYAWNRKRISNCVADYSVLYNSASFSTFKCYGVSPTKLNDLCFTNVYADSFVIRGDEVRQIAPGQTGKIADYNYKLPDDFTGCVIAWNSNNLDSKVGGNYNYLYRLFRKSNLKPFERDISTEIYQAGSTPCNGVEGFNCYFPLQSYGFQPTNGVGYQPYRVVVLSFELLHAPATVCGPKKSTNLVKNKCVNFNFNGLTGTGVLTESNKKFLPFQQFGRDIADTTDAVRDPQTLEILDITPCSFGGVSVITPGTNTSNQVAVLYQDVNCTEVPVAIHADQLTPTWRVYSTGSNVFQTRAGCLIGAEHVNNSYECDIPIGAGICASYQTQTNSPRRARSVASQSIIAYTMSLGAENSVAYSNNSIAICTNFTISVTTEILPVSMTKTSVDCTMYICGDSTECSNLLLQYGSFCTQLNRALTGIAVEQDKNTQEVFAQVKQIYKTPPIKDFGGFNFSQILPDPSKPSKRSFIEDLLFNKVTLADAGFIKQYGDCLGDISARDLICAQKFNGLTVLPPLLTDEMIAQYTSALLAGTITSGWTFGAGAALQIPFAMQMAYRFNGIGVTQNVLYENQKLIANQFNSAIGKIQDSLSSTASALGKLQDVVNQNAQALNTLVKQLSSNFGAISSVLNDILSRLDKVEAEVQIDRLITGRLQSLQTYVTQQLIRAAEIRASANLAATKMSECVLGQSKRVDFCGKGYHLMSFPQSAPHGVVFLHVTYVCAQEKNFTTAPAICHDGKAHFPREGVFVSNGTHWFVTQRNFYEPQIITTDNTFVSGNCDVVIGIVNNTVYDPLQPELDSGGGGSDIDPYKEFGSSYQLLNFLPLDFFPDLNALVDTATALYEEELTGREHCSPHHTAIRQALVCWDELTKLIAWMSSNITSEQVRTIIVNHVNDTWGLKVRQSLWFHLSCLTFGQHTVQEFLVSFGVWIRTPAPYRPPNAPILSTLPEHTVIC

SEQ ID NO: 11177 - protein, 1301 aa, Artificial Sequence
  SARS-CoV-2/USA/NY-NYUMC7/2020__EPI_ISL_418192 spike protein (1-1147)(P715C_P1069C) WhcAg construct
MFVFLVLLPLVSSQCVNLTTRTQLPPAYTNSFTRGVYYPDKVFRSSVLHSTQDLFLPFFSNVTWFHAIHVSGTNGTKRFDNPVLPFNDGVYFASTEKSNIIRGWIFGTTLDSKTQSLLIVNNATNVVIKVCEFQFCNDPFLGVYHHKNNKSWMESEFRVYSSANNCTFEYVSQPFLMDLEGKQGNFKNLREFVFKNIDGYFKIYSKHTPINLVRDLPQGFSALEPLVDLPIGINITRFQTLLALHRSYLTPGDSSSGWTAGAAAYYVGYLQPRTFLLKYNENGTITDAVDCALDPLSETKCTLKSFTVEKGIYQTSNFRVQPTESIVRFPNITNLCPFGEVFNATRFASVYAWNRKRISNCVADYSVLYNSASFSTFKCYGVSPTKLNDLCFTNVYADSFVIRGDEVRQIAPGQTGKIADYNYKLPDDFTGCVIAWNSNNLDSKVGGNYNYLYRLFRKSNLKPFERDISTEIYQAGSTPCNGVEGFNCYFPLQSYGFQPTNGVGYQPYRVVVLSFELLHAPATVCGPKKSTNLVKNKCVNFNFNGLTGTGVLTESNKKFLPFQQFGRDIADTTDAVRDPQTLEILDITPCSFGGVSVITPGTNTSNQVAVLYQGVNCTEVPVAIHADQLTPTWRVYSTGSNVFQTRAGCLIGAEHVNNSYECDIPIGAGICASYQTQTNSPRRARSVASQSIIAYTMSLGAENSVAYSNNSIAICTNFTISVTTEILPVSMTKTSVDCTMYICGDSTECSNLLLQYGSFCTQLNRALTGIAVEQDKNTQEVFAQVKQIYKTPPIKDFGGFNFSQILPDPSKPSKRSFIEDLLFNKVTLADAGFIKQYGDCLGDIAARDLICAQKFNGLTVLPPLLTDEMIAQYTSALLAGTITSGWTFGAGAALQIPFAMQMAYRFNGIGVTQNVLYENQKLIANQFNSAIGKIQDSLSSTASALGKLQDVVNQNAQALNTLVKQLSSNFGAISSVLNDILSRLDKVEAEVQIDRLITGRLQSLQTYVTQQLIRAAEIRASANLAATKMSECVLGQSKRVDFCGKGYHLMSFPQSAPHGVVFLHVTYVCAQEKNFTTAPAICHDGKAHFPREGVFVSNGTHWFVTQRNFYEPQIITTDNTFVSGNCDVVIGIVNNTVYDPLQPELDSGGGGSDIDPYKEFGSSYQLLNFLPLDFFPDLNALVDTATALYEEELTGREHCSPHHTAIRQALVCWDELTKLIAWMSSNITSEQVRTIIVNHVNDTWGLKVRQSLWFHLSCLTFGQHTVQEFLVSFGVWIRTPAPYRPPNAPILSTLPEHTVIC

SEQ ID NO: 11178 - protein, 1301 aa, Artificial Sequence
  SARS-CoV-2/Iceland/189/2020__EPI_ISL_417709 spike protein (1-1147)(P715C_P1069C) WhcAg construct
MFVFLVLLPLVSSQCVNLTTRTQLPPAYTNSFTRGVYYPDKVFRSSVLHSTQDLFLPFFSNVTWFHAIHVSGTNGTKRFDNPVLPFNDGVYFASTEKSNIIRGWIFGTTLDSKTQSLLIVNNATNVVIKVCEFQFCNDPFLGVYYHKNNKSWMESEFRVYSSANNCTFEYVSQPFLMDLEGKQGNFKNLREFVFKNIDGYFKIYSKHTPINLVRDLPQGFSALEPLVDLPIGINITRFQTLLALHRSYLTPGDSSSGWTAGAAAYYVGYLQPRTFLLKYNENGTITDAVDCALDPLSETKCTLKSFTVEKGIYQTSNFRVQPTESIVRFPNITNLCPFGEVFNATRFASVYAWNRKRISNCVADYSVLYNSASFSTFKCYGVSPTKLNDLCFTNVYADSFVIRGDEVRQIAPGQTGKIADYNYKLPDDFTGCVIAWNSNNLDSKVGGNYNYLYRLFRKSNLKPFERDISTEIYQAGSTPCNGVEGFNCYFPLQSYGFQPTNGVGYQPYRVVVLSFELLHAPATVCGPKKSTNLVKNKCVNFNFNGLTGTGVLTESNKKFLPFQQFGRDIADTTDAVRDPQTLEILDITPCSFGGVSVITPGTNTSNQVAVLYQGVNCTEVPVAIHADQLTPTWRVYSTGSNVFQTRAGCLIGAEHVNNSYECDIPIGAGICASYQTQTNSPRRARSVASQSIIAYTMSLGAENSVAYSNNSIAICTNFTISVTTEILPVSMTKTSVDCTMYICGDSTECSNLLLQYGSFCTQLNRALTGIAVEQDKNTQEVFAQVKQIYKTPPIKDFGGFNFSQILPDPSKPSKRSFIEDLLFNKVTLADAGFTKQYGDCLGDIAARDLICAQKFNGLTVLPPLLTDEMIAQYTSALLAGTITSGWTFGAGAALQIPFAMQMAYRFNGIGVTQNVLYENQKLIANQFNSAIGKIQDSLSSTASALGKLQDVVNQNAQALNTLVKQLSSNFGAISSVLNDILSRLDKVEAEVQIDRLITGRLQSLQTYVTQQLIRAAEIRASANLAATKMSECVLGQSKRVDFCGKGYHLMSFPQSAPHGVVFLHVTYVCAQEKNFTTAPAICHDGKAHFPREGVFVSNGTHWFVTQRNFYEPQIITTDNTFVSGNCDVVIGIVNNTVYDPLQPELDSGGGGSDIDPYKEFGSSYQLLNFLPLDFFPDLNALVDTATALYEEELTGREHCSPHHTAIRQALVCWDELTKLIAWMSSNITSEQVRTIIVNHVNDTWGLKVRQSLWFHLSCLTFGQHTVQEFLVSFGVWIRTPAPYRPPNAPILSTLPEHTVIC

SEQ ID NO: 11179 - protein, 1301 aa, Artificial Sequence
  SARS-CoV-2/Australia/NSW56/2020__EPI_ISL_417408 spike protein (1-1147)(P715C_P1069C) WhcAg construct
MFVFLVLLPLVSSQCVNLTTRTQLPPAYTNSFTRGVYYPDKVFRSSVLHSTQDLFLPFFSNVTWFHAIHVSGTNGTKRFDNPVLPFNDGVYFASTEKSNIIRGWIFGTTLDSKTQSLLIVNNATNVVIKVCEFQFCNDPFLGVYYHKNNKSWMESEFRVYSSANNCTFEYVSQPFLMDLEGKQGNFKNLREFVFKNIDGYFKIYSKHTPINLVRDLPQGFSALEPLVDLPIGINITRFQTLLALHRSYLTPGDSSSGWTAGAAAYYVGYLQPRTFLLKYNENGTITDAVDCALDPLSETKCTLKSFTVEKGIYQTSNFRVQPTESIVRFPNITNLCPFGEVFNATRFASVYAWNRKRISNCVADYSVLYNSASFSTFKCYGVSPTKLNDLCFTNVYADSFVIRGDEVRQIAPGQTGKIADYNYKLPDDFTGCVIAWNSNNLDSKVGGNYNYLYRLFRKSNLKPFERDISTEIYQAGSTPCNGVEGFNCYFPLQSYGFQPTNGVGYQPYRVVVLSFELLHAPATVCGPKKSTNLVKNKCVNFNFNGLTGTGVLTESNKKFLPFQQFGRDIADTTDAVRDPQTLEILDITPCSFGGVSVITPGTNTSNQVAVLYQDVNCTEVPVAIHADQLTPTWRVYSTGSNVFQTRAGCLIGAEHVNNSYECDIPIGAGICASYQTQTNSPRRARSVASQSIIAYTMSLGAENSVAYSNNSIAICTNFTISVTTEILPVSMTKTSVDCTMYICGDSTECSNLLLQYGSFCTQLNRALTGIAVEQDKNTQEVFAQVKQIYKTPPIKDFGGFNFSQILPDSSKPSKRSFIEDLLFNKVTLADAGFIKQYGDCLGDIAARDLICAQKFNGLTVLPPLLTDEMIAQYTSALLAGTITSGWTFGAGAALQIPFAMQMAYRFNGIGVTQNVLYENQKLIANQFNSAIGKIQDSLSSTASALGKLQDVVNQNAQALNTLVKQLSSNFGAISSVLNDILSRLDKVEAEVQIDRLITGRLQSLQTYVTQQLIRAAEIRASANLAATKMSECVLGQSKRVDFCGKGYHLMSFPQSAPHGVVFLHVTYVCAQEKNFTTAPAICHDGKAHFPREGVFVSNGTHWFVTQRNFYEPQIITTDNTFVSGNCDVVIGIVNNTVYDPLQPELDSGGGGSDIDPYKEFGSSYQLLNFLPLDFFPDLNALVDTATALYEEELTGREHCSPHHTAIRQALVCWDELTKLIAWMSSNITSEQVRTIIVNHVNDTWGLKVRQSLWFHLSCLTFGQHTVQEFLVSFGVWIRTPAPYRPPNAPILSTLPEHTVIC

SEQ ID NO: 11180 - protein, 1301 aa, Artificial Sequence
  SARS-CoV-2/Iceland/280/2020__EPI_ISL_417608 spike protein (1-1147)(P715C_P1069C) WhcAg construct
MFVFLVLLPLVSSQCVNLTTRTQLPPAYTNSFTRGVYYPDKVFRSSVLHSTQDLFLPFFSNVTWFHAIHVSGTNGTKRFDNPVLPFNDGVYFASTEKSNIIRGWIFGTTLDSKTQSLLIVNNATNVVIKVCEFQFCNDPFLGVYYHKNNKSWMESEFRVYSSANNCTFEYVSQPFLMDLEGKQGNFKNLREFVFKNIDGYFKIYSKHTPINLVRDLPQGFSALEPLVDLPIGINITRFQTLLALHRSYLTPGDSSSGWTAGAAAYYVGYLQPRTFLLKYNENGTITDAVDCALDPLSETKCTLKSFTVEKGIYQTSNFRVQPTESIVRFPNITNLCPFGEVFNATRFASVYAWNRKRISNCVADYSVLYNSASFSTFKCYGVSPTKLNDLCFTNVYADSFVIRGDEVRQIAPGQTGKIADYNYKLPDDFTGCVIAWNSNNLDSKVGGNYNYLYRLFRKSNLKPFERDISTEIYQAGSTPCNGVEGFNCYFPLQSYGFQPTNGVGYQPYRVVVLSFELLHAPATVCGPKKSTNLVKNKCVNFNFNGLTGTGVLTESNKKFLPFQQFGRDIADTTDAVRDPQTLEILDITPCSFGGVSVITPGTNTSNQVAVLYQGVNCTEVPVAIHADQLTPTWRVYSTGSNVFQTRAGCLIGAEHVNNSYECDIPIGAGICASYHTQTNSPRRARSVASQSIIAYTMSLGAENSVAYSNNSIAICTNFTISVTTEILPVSMTKTSVDCTMYICGDSTECSNLLLQYGSFCTQLNRALTGIAVEQDKNTQEVFAQVKQIYKTPPIKDFGGFNFSQILPDPSKPSKRSFIEDLLFNKVTLADAGFIKQYGDCLGDIAARDLICAQKFNGLTVLPPLLTDEMIAQYTSALLAGTITSGWTFGAGAALQIPFAMQMAYRFNGIGVTQNVLYENQKLIANQFNSAIGKIQDSLSSTASALGKLQDVVNQNAQALNTLVKQLSSNFGAISSVLNDILSRLDKVEAEVQIDRLITGRLQSLQTYVTQQLIRAAEIRASANLAATKMSECVLGQSKRVDFCGKGYHLMSFPQSAPHGVVFLHVTYVCAQEKNFTTAPAICHDGKAHFPREGVFVSNGTHWFVTQRNFYEPQIITTDNTFVSGNCDVVIGIVNNTVYDPLQPELDSGGGGSDIDPYKEFGSSYQLLNFLPLDFFPDLNALVDTATALYEEELTGREHCSPHHTAIRQALVCWDELTKLIAWMSSNITSEQVRTIIVNHVNDTWGLKVRQSLWFHLSCLTFGQHTVQEFLVSFGVWIRTPAPYRPPNAPILSTLPEHTVIC

SEQ ID NO: 11181 - protein, 1301 aa, Artificial Sequence; identical to SEQ ID NO: 11136
  SARS-CoV-2/Iceland/247/2020__EPI_ISL_417575 spike protein (1-1147)(P715C_P1069C) WhcAg construct

SEQ ID NO: 11182 - protein, 1301 aa, Artificial Sequence
  SARS-CoV-2/Iceland/238/2020__EPI_ISL_417566 spike protein (1-1147)(P715C_P1069C) WhcAg construct
MFVFLVLLPLVSSQCVNLTTRTQLPPAYTNSFTRGVYYPDKVFRSSVLHSTQDLFLPFFSNVTWFHAIHVSGTNGTKRFDNPVLPFNDGVYFASTEKSNIIRGWIFGTTLDSKTQSLLIVNNATNVVIKVCEFQFCNDPFLGVYYHKNNKSWMESEFRVYSSANNCTFEYVSQPFLMDLEGKQGNFKNLREFVFKNIDGYFKIYSKHTPINLVRDLPQGFSALEPLVDLPIGINITRFQTLLALHRSYLTPGDSSSGWTAGAAAYYVGYLQPRTFLLKYNENGTITDAVDCALDPLSETKCTLKSFTVEKGIYQTSNFRVQPTESIVRFPNITNLCPFGEVFNATRFASVYAWNRKRISNCVADYSVLYNSASFSTFKCYGVSPTKLNDLCFTNVYADSFVIRGDEVRQIAPGQTGKIADYNYKLPDDFTGCVIAWNSNNLDSKVGGNYNYLYRLFRKSNLKPFERDISTEIYQAGSTPCNGVEGFNCYFPLQSYGFQPTNGVGYQPYRVVVLSFELLHAPATVCGPKKSTNLVKNKCVNFNFNGLTGTGVLTESNKKFLPFQQFGRDIADTTDAVRDPQTLEILDITPCSFGGVSVITPGTNTSNQVAVLYQGVNCTEVPVAIHADQLTPTWRVYSTGSNVFQTRAGCLIGAEHVNNSYECDIPIGAGICASYQTQTNSPRRARSVASQSIIAYTMSLGAENSVAYSNNSIAICTNFTISVTTEILPVSMTKTSVDCTMYICGDSTECSNLLLQYGSFCTQLNRALTGIAVEQDKNTQEVFAQVKQIYKTPPIKDFGGFNFSQILPDPSKPSKRSFIEDLLFNKVTLADVGFIKQYGDCLGDIAARDLICAQKFNGLTVLPPLLTDEMIAQYTSALLAGTITSGWTFGAGAALQIPFAMQMAYRFNGIGVTQNVLYENQKLIANQFNSAIGKIQDSLSSTASALGKLQDVVNQNAQALNTLVKQLSSNFGAISSVLNDILSRLDKVEAEVQIDRLITGRLQSLQTYVTQQLIRAAEIRASANLAATKMSECVLGQSKRVDFCGKGYHLMSFPQSAPHGVVFLHVTYVCAQEKNFTTAPAICHDGKAHFPREGVFVSNGTHWFVTQRNFYEPQIITTDNTFVSGNCDVVIGIVNNTVYDPLQPELDSGGGGSDIDPYKEFGSSYQLLNFLPLDFFPDLNALVDTATALYEEELTGREHCSPHHTAIRQALVCWDELTKLIAWMSSNITSEQVRTIIVNHVNDTWGLKVRQSLWFHLSCLTFGQHTVQEFLVSFGVWIRTPAPYRPPNAPILSTLPEHTVIC

SEQ ID NO: 11183 - protein, 1301 aa, Artificial Sequence
  SARS-CoV-2/Greece/16/2020__EPI_ISL_418265 spike protein (1-1147)(P715C_P1069C) WhcAg construct
MFVFLVLLPLVSSQCVNLTTRTQLPPAYTNSFTRGVYYPDKVFRSSVLHSTQDLFLPFFSNVTWFHAIHVSGTNGTKRFDNPVLPFNDGVYFASTEKSNIIRGWIFGTTLDSKTQSLLIVNNATNVVIKVCEFQFCNDPFLGVYYHKNNKSWMESEFRVYSSANNCTFEYVSQPFLMDLEGKQGNFKNLREFVFKNVDGYFKIYSKHTPINLVRDLPQGFSALEPLVDLPIGINITRFQTLLALHRSYLTPGDSSSGWTAGAAAYYVGYLQPRTFLLKYNENGTITDAVDCALDPLSETKCTLKSFTVEKGIYQTSNFRVQPTESIVRFPNITNLCPFGEVFNATRFASVYAWNRKRISNCVADYSVLYNSASFSTFKCYGVSPTKLNDLCFTNVYADSFVIRGDEVRQIAPGQTGKIADYNYKLPDDFTGCVIAWNSNNLDSKVGGNYNYLYRLFRKSNLKPFERDISTEIYQAGSTPCNGVEGFNCYFPLQSYGFQPTNGVGYQPYRVVVLSFELLHAPATVCGPKKSTNLVKNKCVNFNFNGLTGTGVLTESNKKFLPFQQFGRDIADTTDAVRDPQTLEILDITPCSFGGVSVITPGTNTSNQVAVLYQDVNCTEVPVAIHADQLTPTWRVYSTGSNVFQTRAGCLIGAEHVNNSYECDIPIGAGICASYQTQTNSPRRARSVASQSIIAYTMSLGAENSVAYSNNSIAICTNFTISVTTEILPVSMTKTSVDCTMYICGDSTECSNLLLQYGSFCTQLNRALTGIAVEQDKNTQEVFAQVKQIYKTPPIKDFGGFNFSQILPDPSKPSKRSFIEDLLFNKVTLADAGFIKQYGDCLGDIAARDLICAQKFNGLTVLPPLLTDEMIAQYTSALLAGTITSGWTFGAGAALQIPFAMQMAYRFNGIGVTQNVLYENQKLIANQFNSAIGKIQDSLSSTASALGKLQDVVNQNAQALNTLVKQLSSNFGAISSVLNDILSRLDKVEAEVQIDRLITGRLQSLQTYVTQQLIRAAEIRASANLAATKMSECVLGQSKRVDFCGKGYHLMSFPQSAPHGVVFLHVTYVCAQEKNFTTAPAICHDGKAHFPREGVFVSNGTHWFVTQRNFYEPQIITTDNTFVSGNCDVVIGIVNNTVYDPLQPELDSGGGGSDIDPYKEFGSSYQLLNFLPLDFFPDLNALVDTATALYEEELTGREHCSPHHTAIRQALVCWDELTKLIAWMSSNITSEQVRTIIVNHVNDTWGLKVRQSLWFHLSCLTFGQHTVQEFLVSFGVWIRTPAPYRPPNAPILSTLPEHTVIC

SEQ ID NO: 11184 - protein, 1301 aa, Artificial Sequence
  SARS-CoV-2/Iceland/319/2020__EPI_ISL_417648 spike protein (1-1147)(P715C_P1069C) WhcAg construct
MFVFLVLLPLVSSQCVNLTTRTQLPPAYTNSFTRGVYYPDKVFRSSVLHSTQDLFLPFFSNVTWFHAIHVSGTNGTKRFDNPVLPFNDGVYFASTEKSNIIRGWIFGTTLDSKTQSLLIVNNATNVVIKVCEFQFCNDPFLGVYYHKNNKSWMESEFRVYSSANNCTFEYVSQPFLIDLEGKQGNFKNLREFVFKNIDGYFKIYSKHTPINLVRDLPQGFSALEPLVDLPIGINITRFQTLLALHRSYLTPGDSSSGWTAGAAAYYVGYLQPRTFLLKYNENGTITDAVDCALDPLSETKCTLKSFTVEKGIYQTSNFRVQPTESIVRFPNITNLCPFGEVFNATRFASVYAWNRKRISNCVADYSVLYNSASFSTFKCYGVSPTKLNDLCFTNVYADSFVIRGDEVRQIAPGQTGKIADYNYKLPDDFTGCVIAWNSNNLDSKVGGNYNYLYRLFRKSNLKPFERDISTEIYQAGSTPCNGVEGFNCYFPLQSYGFQPTNGVGYQPYRVVVLSFELLHAPATVCGPKKSTNLVKNKCVNFNFNGLTGTGVLTESNKKFLPFQQFGRDIADTTDAVRDPQTLEILDITPCSFGGVSVITPGTNTSNQVAVLYQGVNCTEVPVAIHADQLTPTWRVYSTGSNVFQTRAGCLIGAEHVNNSYECDIPIGAGICASYQTQTNSPRRARSVASQSIIAYTMSLGAENSVAYSNNSIAICTNFTISVTTEILPVSMTKTSVDCTMYICGDSTECSNLLLQYGSFCTQLNRALTGIAVEQDKNTQEVFAQVKQIYKTPPIKDFGGFNFSQILPDPSKPSKRSFIEDLLFNKVTLADAGFIKQYGDCLGDIAARDLICAQKFNGLTVLPPLLTDEMIAQYTSALLAGTITSGWTFGAGAALQIPFAMQMAYRFNGIGVTQNVLYENQKLIANQFNSAIGKIQDSLSSTASALGKLQDVVNQNAQALNTLVKQLSSNFGAISSVLNDILSRLDKVEAEVQIDRLITGRLQSLQTYVTQQLIRAAEIRASANLAATKMSECVLGQSKRVDFCGKGYHLMSFPQSAPHGVVFLHVTYVCAQEKNFTTAPAICHDGKAHFPREGVFVSNGTHWFVTQRNFYEPQIITTDNTFVSGNCDVVIGIVNNTVYDPLQPELDSGGGGSDIDPYKEFGSSYQLLNFLPLDFFPDLNALVDTATALYEEELTGREHCSPHHTAIRQALVCWDELTKLIAWMSSNITSEQVRTIIVNHVNDTWGLKVRQSLWFHLSCLTFGQHTVQEFLVSFGVWIRTPAPYRPPNAPILSTLPEHTVIC

SEQ ID NO: 11185 - protein, 1301 aa, Artificial Sequence
  SARS-CoV-2/Congo/94/2020__EPI_ISL_417947 spike protein (1-1147)(P715C_P1069C) WhcAg construct
MFVFLVLLPLVSSQCVNLTTRTQLPPAYTNSFTRGVYYPDKVFRSSVLHSTQDLFLPFFSNVTWFHAIHVSGTNGTKRFDNPVLPFNDGVYFASTEKSNIIRGWIFGTTLDSKTQSLLIVNNATNVVIKVCEFQFCNDPFLGVYYHKNNKSWMESEFRVYSSANNCTFEYVSQPFLMDLEGKQGNFKNLREFVFKNIDGYFKIYSKHTPINLVRDLPQGFSALEPLVDLPIGINITRFQTLLALHRSYLTPGDSSSGWTAGAAAYYVGYLQPRTFLLKYNENGTITDAVDCALDPLSETKCTLKSFTVEKGIYQTSNFRVQPTESIVRFPNITNLCPFGEVFNATRFASVYAWNRKRISNCVADYSVLYNSASFSTFKCYGVSPTKLNDLCFTNVYADSFVIRGDEVRQIAPGQTGKIADYNYKLPDDFTGCVIAWNSNNLDSKVGGNYNYLYRLFRKSNLKPFERDISTEIYQAGSTPCNGVEGFNCYFPLQSYGFQPTNGVGYQPYRVVVLSFELLHAPATVCGPKKSTNLVKNKCVNFNFNGLTGTGVLTESNKKFLPFQQFGRDIADTTDAVRDPQTLEILDITPCSFGGVSVITPGTNTSNQVAVLYQGVNCTEVPVAIHADQLTPTWRVYSTGSNVFQTRAGCLIGAEHVNNSYECDIPIGAGICASYQTQTNSPRRARSVASQSIIAYTMSLGAENSVAYSNNSIAICTNFTISVTTEILPVSMTKTSVDCTMYICGDSTECSNLLLQYGSFCTQLNRALTGIAVEQDKNTQEVFAQVKQIYKTPPIKDFGGFNFSQILPDPSKPSKRSFIEDILFNKVTLADAGFIKQYGDCLGDIAARDLICAQKFNGLTVLPPLLTDEMIAQYTSALLAGTITSGWTFGAGAALQIPFAMQMAYRFNGIGVTQNVLYENQKLIANQFNSAIGKIQDSLSSTASALGKLQDVVNQNAQALNTLVKQLSSNFGAISSVLNDILSRLDKVEAEVQIDRLITGRLQSLQTYVTQQLIRAAEIRASANLAATKMSECVLGQSKRVDFCGKGYHLMSFPQSAPHGVVFLHVTYVCAQEKNFTTAPAICHDGKAHFPREGVFVSNGTHWFVTQRNFYEPQIITTDNTFVSGNCDVVIGIVNNTVYDPLQPELDSGGGGSDIDPYKEFGSSYQLLNFLPLDFFPDLNALVDTATALYEEELTGREHCSPHHTAIRQALVCWDELTKLIAWMSSNITSEQVRTIIVNHVNDTWGLKVRQSLWFHLSCLTFGQHTVQEFLVSFGVWIRTPAPYRPPNAPILSTLPEHTVIC

SEQ ID NO: 11186 - protein, 1301 aa, Artificial Sequence
  SARS-CoV-2/Congo/158/2020__EPI_ISL_417950 spike protein (1-1147)(P715C_P1069C) WhcAg construct
MFVFLVLLPLVSSQCVNLTTRTQLPPAYTNSFTRGVYYPDKVFRSSVLHSTQDLFLPFFSNVTWFHAIHVSGTNGTKRFDNPVLPFNDGVYFASTEKSNIIRGWIFGTTLDSKTQSLLIVNNATNVVIKVCEFQFCNDPFLGVYYHKNNKSWMESEFRVYSSANNCTFEYVSQPFLMDLEGKQGNFKNLREFVFKNIDGYFKIYSKHTPINLVRDLPQGFSALEPLVDLPIGINITRFQTLLALHRSYLTPGDSSSGWTAGAAAYYVGYLQPRTFLLKYNENGTITDAVDCALDPLSETKCTLKSFTVEKGIYQTSNFRVQPTESIVRFPNITNLCPFGEVFNATRFASVYAWNRKRISNCVADYSVLYNSASFSTFKCYGVSPTKLNDLCFTNVYADSFVIRGDEVRQIAPGQTGKIADYNYKLPDDFTGCVIAWNSNNLDSKVGGNYNYLYRLFRKSNLKPFERDISTEIYQAGSTPCNGVEGFNCYFPLQSYGFQPTNGVGYQPYRVVVLSFELLHAPATVCGPKKSTNLVKNKCVNFNFNGLTGTGVLTESNKKFLPFQQFGRDIADTTDAVRDPQTLEILDITPCSFGGVSVITPGTNTSNQVAVLYQDVNCTEVPVAIHADQLTPTWRVYSTGSNVFQTRAGCLIGAEHVNNSYECDIPIGAGICASYQTQTNSPRRARSVASQSIIAYTMSLGAENSVAYSNNSIAICTNFTISVTTEILPVSMTKTSVDCTMYICGDSTECSNLLLQYGSFCTQLNRALTGIAVEQDKNTQEVFAQVKQIYKTPPIKDFGGFNFSQILPDPSKPSKRSFIEDLLFNKVTLADAGFIKQYGDCLGDIAARDLICAQKFNGLTVLPPLLTDEMIAQYTSALLAGTITSGWTFGAGAALQIPFAMQMAYRFNGIGVTQNVLYENQKLIANQFNSAIGKIQDSLSSTASALGKLQDVVNQNAQALNTLVKQLSSNFGAISSVLNDILSRLDKVEAEVQIDRLITGRLQSLQTYVTQQLIRAAEIRASANLAATKMSECVLGQSKRVDFCGKGYHLMSFPQSAPHGVVFLHVTYVCAQEKNFTTAPAICHDGKAHFPREGVFVSNGTHWFVTQRNFYEPQIITTDNTFLSGNCDVVIGIVNNTVYDPLQPELDSGGGGSDIDPYKEFGSSYQLLNFLPLDFFPDLNALVDTATALYEEELTGREHCSPHHTAIRQALVCWDELTKLIAWMSSNITSEQVRTIIVNHVNDTWGLKVRQSLWFHLSCLTFGQHTVQEFLVSFGVWIRTPAPYRPPNAPILSTLPEHTVIC

SEQ ID NO: 11187 - protein, 1301 aa, Artificial Sequence
  SARS-CoV-2/USA/UT-00034/2020__EPI_ISL_417977 spike protein (1-1147)(P715C_P1069C) WhcAg construct
MFVFLVLLPLVSSQCVNLTTRTQLPPAYTNSFTRGVYYPDKVFRSSVLHSTQDLFLPFFSNVTWFHAIHVSGTNGTKRFDNPVLPFNDGVYFASTEKSNIIRGWIFGTTLDSKTQSLLIVNNATNVVIKVCEFQFCNDPFLGVYYYKNNKSWMESEFRVYSSANNCTFEYVSQPFLMDLEGKQGNFKNLREFVFKNIDGYFKIYSKHTPINLVRDLPQGFSALEPLVDLPIGINITRFQTLLALHRSYLTPGDSSSGWTAGAAAYYVGYLQPRTFLLKYNENGTITDAVDCALDPLSETKCTLKSFTVEKGIYQTSNFRVQPTESIVRFPNITNLCPFGEVFNATRFASVYAWNRKRISNCVADYSVLYNSASFSTFKCYGVSPTKLNDLCFTNVYADSFVIRGDEVRQIAPGQTGKIADYNYKLPDDFTGCVIAWNSNNLDSKVGGNYNYLYRLFRKSNLKPFERDISTEIYQAGSTPCNGVEGFNCYFPLQSYGFQPTNGVGYQPYRVVVLSFELLHAPATVCGPKKSTNLVKNKCVNFNFNGLTGTGVLTESNKKFLPFQQFGRDIADTTDAVRDPQTLEILDITPCSFGGVSVITPGTNTSNQVAVLYQGVNCTEVPVAIHADQLTPTWRVYSTGSNVFQTRAGCLIGAEHVNNSYECDIPIGAGICASYQTQTNSPRRARSVASQSIIAYTMSLGAENSVAYSNNSIAICTNFTISVTTEILPVSMTKTSVDCTMYICGDSTECSNLLLQYGSFCTQLNRALTGIAVEQDKNTQEVFAQVKQIYKTPPIKDFGGFNFSQILPDPSKPSKRSFIEDLLFNKVTLADAGFIKQYGDCLGDIAARDLICAQKFNGLTVLPPLLTDEMIAQYTSALLAGTITSGWTFGAGAALQIPFAMQMAYRFNGIGVTQNVLYENQKLIANQFNSAIGKIQDSLSSTASALGKLQDVVNQNAQALNTLVKQLSSNFGAISSVLNDILSRLDKVEAEVQIDRLITGRLQSLQTYVTQQLIRAAEIRASANLAATKMSECVLGQSKRVDFCGKGYHLMSFPQSAPHGVVFLHVTYVCAQEKNFTTAPAICHDGKAHFPREGVFVSNGTHWFVTQRNFYEPQIITTDNTFVSGNCDVVIGIVNNTVYDPLQPELDSGGGGSDIDPYKEFGSSYQLLNFLPLDFFPDLNALVDTATALYEEELTGREHCSPHHTAIRQALVCWDELTKLIAWMSSNITSEQVRTIIVNHVNDTWGLKVRQSLWFHLSCLTFGQHTVQEFLVSFGVWIRTPAPYRPPNAPILSTLPEHTVIC

SEQ ID NO: 11188 - protein, 1301 aa, Artificial Sequence
  SARS-CoV-2/USA/UT-00033/2020__EPI_ISL_417976 spike protein (1-1147)(P715C_P1069C) WhcAg construct
MFVFLVLLPLVSSQCVNLTTRTQLPPAYTNSFTRGVYYPDKVFRSSVLHSTQDLFLPFFSNVTWFHAIHVSGTNGTKRFDNPVLPFNDGVYFASTEKSNIIRGWIFGTTLDSKTQSLLIVNNATNVVIKVCEFQFCNDPFLGVYYHKNNKSWMESEFRVYSSANNCTFEYVSQPFLMDLEGKQGNFKNLREFVFKNIDGYFKIYSKHTPINLVRDLPQGFSALEPLVDLPIGINITRFQTLLALHRSYLTPGDSSSGLTAGAAAYYVGYLQPRTFLLKYNENGTITDAVDCALDPLSETKCTLKSFTVEKGIYQTSNFRVQPTESIVRFPNITNLCPFGEVFNATRFASVYAWNRKRISNCVADYSVLYNSASFSTFKCYGVSPTKLNDLCFTNVYADSFVIRGDEVRQIAPGQTGKIADYNYKLPDDFTGCVIAWNSNNLDSKVGGNYNYLYRLFRKSNLKPFERDISTEIYQAGSTPCNGVEGFNCYFPLQSYGFQPTNGVGYQPYRVVVLSFELLHAPATVCGPKKSTNLVKNKCVNFNFNGLTGTGVLTESNKKFLPFQQFGRDIADTTDAVRDPQTLEILDITPCSFGGVSVITPGTNTSNQVAVLYQGVNCTEVPVAIHADQLTPTWRVYSTGSNVFQTRAGCLIGAEHVNNSYECDIPIGAGICASYQTQTNSPRRARSVASQSIIAYTMSLGAENSVAYSNNSIAICTNFTISVTTEILPVSMTKTSVDCTMYICGDSTECSNLLLQYGSFCTQLNRALTGIAVEQDKNTQEVFAQVKQIYKTPPIKDFGGFNFSQILPDPSKPSKRSFIEDLLFNKVTLADAGFIKQYGDCLGDIAARDLICAQKFNGLTVLPPLLTDEMIAQYTSALLAGTITSGWTFGAGAALQIPFAMQMAYRFNGIGVTQNVLYENQKLIANQFNSAIGKIQDSLSSTASALGKLQDVVNQNAQALNTLVKQLSSNFGAISSVLNDILSRLDKVEAEVQIDRLITGRLQSLQTYVTQQLIRAAEIRASANLAATKMSECVLGQSKRVDFCGKGYHLMSFPQSAPHGVVFLHVTYVCAQEKNFTTAPAICHDGKAHFPREGVFVSNGTHWFVTQRNFYEPQIITTDNTFVSGNCDVVIGIVNNTVYDPLQPELDSGGGGSDIDPYKEFGSSYQLLNFLPLDFFPDLNALVDTATALYEEELTGREHCSPHHTAIRQALVCWDELTKLIAWMSSNITSEQVRTIIVNHVNDTWGLKVRQSLWFHLSCLTFGQHTVQEFLVSFGVWIRTPAPYRPPNAPILSTLPEHTVIC

SEQ ID NO: 11189 - protein, 1301 aa, Artificial Sequence
  SARS-CoV-2/USA/WI-13/2020__EPI_ISL_417516 spike protein (1-1147)(P715C_P1069C) WhcAg construct
MFVFLVLLPLVSSQCVNLTTRTQLPPAYTNSFTRGVYYPDKVFRSSVLHSTQDLFLPFFSNVTWFHAIHVSGTNGTKRFDNPVLPFNDGVYFASTEKSNIIRGWIFGTTLDSKTQSLLIVNNATNVVIKVCEFQFCNDPFLGVYYHKNNKSWMESEFRVYSSANNCTFEYVSQPFLMDLEGKQGNFKNLREFVFKNIDGYFKIYSKHTPINLVRDLPQGFSALEPLVDLPIGINITRFQTLLALHRSYLTPGDSSSGWTAGAAAYYVGYLQPRTFLLKYNENGTITDAVDCALDPLSETKCTLKSFTVEKGIYQTSNFRVLPTESIVRFPNITNLCPFGEVFNATRFASVYAWNRKRISNCVADYSVLYNSASFSTFKCYGVSPTKLNDLCFTNVYADSFVIRGDEVRQIAPGQTGKIADYNYKLPDDFTGCVIAWNSNNLDSKVGGNYNYLYRLFRKSNLKPFERDISTEIYQAGSTPCNGVEGFNCYFPLQSYGFQPTNGVGYQPYRVVVLSFELLHAPATVCGPKKSTNLVKNKCVNFNFNGLTGTGVLTESNKKFLPFQQFGRDIADTTDAVRDPQTLEILDITPCSFGGVSVITPGTNTSNQVAVLYQGVNCTEVPVAIHADQLTPTWRVYSTGSNVFQTRAGCLIGAEHVNNSYECDIPIGAGICASYQTQTNSPRRARSVASQSIIAYTMSLGAENSVAYSNNSIAICTNFTISVTTEILPVSMTKTSVDCTMYICGDSTECSNLLLQYGSFCTQLNRALTGIAVEQDKNTQEVFAQVKQIYKTPPIKDFGGFNFSQILPDPSKPSKRSFIEDLLFNKVTLADAGFIKQYGDCLGDIAARDLICAQKFNGLTVLPPLLTDEMIAQYTSALLAGTITSGWTFGAGAALQIPFAMQMAYRFNGIGVTQNVLYENQKLIANQFNSAIGKIQDSLSSTASALGKLQDVVNQNAQALNTLVKQLSSNFGAISSVLNDILSRLDKVEAEVQIDRLITGRLQSLQTYVTQQLIRAAEIRASANLAATKMSECVLGQSKRVDFCGKGYHLMSFPQSAPHGVVFLHVTYVCAQEKNFTTAPAICHDGKAHFPREGVFVSNGTHWFVTQRNFYEPQIITTDNTFVSGNCDVVIGIVNNTVYDPLQPELDSGGGGSDIDPYKEFGSSYQLLNFLPLDFFPDLNALVDTATALYEEELTGREHCSPHHTAIRQALVCWDELTKLIAWMSSNITSEQVRTIIVNHVNDTWGLKVRQSLWFHLSCLTFGQHTVQEFLVSFGVWIRTPAPYRPPNAPILSTLPEHTVIC

SEQ ID NO: 11190 - protein, 1300 aa, Artificial Sequence
  SARS-CoV-2/India/1-27/2020__EPI_ISL_413522 spike protein (1-1146)(P714C_P1068C) WhcAg construct
MFVFLVLLPLVSSQCVNLTTRTQLPPAYTNSFTRGVYYPDKVFRSSVLHSTQDLFLPFFSNVTWFHAIHVSGTNGTKRFDNPVLPFNDGVYFASTEKSNIIRGWIFGTTLDSKTQSLLIVNNATNVVIKVCEFQFCNDPFLGVYHKNNKSWMESEFRVYSSANNCTFEYVSQPFLMDLEGKQGNFKNLREFVFKNIDGYFKIYSKHTPINLVRDLPQGFSALEPLVDLPIGINITRFQTLLALHRSYLTPGDSSSGWTAGAAAYYVGYLQPRTFLLKYNENGTITDAVDCALDPLSETKCTLKSFTVEKGIYQTSNFRVQPTESIVRFPNITNLCPFGEVFNATRFASVYAWNRKRISNCVADYSVLYNSASFSTFKCYGVSPTKLNDLCFTNVYADSFVIRGDEVIQIAPGQTGKIADYNYKLPDDFTGCVIAWNSNNLDSKVGGNYNYLYRLFRKSNLKPFERDISTEIYQAGSTPCNGVEGFNCYFPLQSYGFQPTNGVGYQPYRVVVLSFELLHAPATVCGPKKSTNLVKNKCVNFNFNGLTGTGVLTESNKKFLPFQQFGRDIADTTDAVRDPQTLEILDITPCSFGGVSVITPGTNTSNQVAVLYQDVNCTEVPVAIHADQLTPTWRVYSTGSNVFQTRAGCLIGAEHVNNSYECDIPIGAGICASYQTQTNSPRRARSVASQSIIAYTMSLGAENSVAYSNNSIAICTNFTISVTTEILPVSMTKTSVDCTMYICGDSTECSNLLLQYGSFCTQLNRALTGIAVEQDKNTQEVFAQVKQIYKTPPIKDFGGFNFSQILPDPSKPSKRSFIEDLLFNKVTLADAGFIKQYGDCLGDIAARDLICAQKFNGLTVLPPLLTDEMIAQYTSALLAGTITSGWTFGAGAALQIPFAMQMAYRFNGIGVTQNVLYENQKLIANQFNSAIGKIQDSLSSTASALGKLQDVVNQNAQALNTLVKQLSSNFGAISSVLNDILSRLDKVEAEVQIDRLITGRLQSLQTYVTQQLIRAAEIRASANLAATKMSECVLGQSKRVDFCGKGYHLMSFPQSAPHGVVFLHVTYVCAQEKNFTTAPAICHDGKAHFPREGVFVSNGTHWFVTQRNFYEPQIITTDNTFVSGNCDVVIGIVNNTVYDPLQPELDSGGGGSDIDPYKEFGSSYQLLNFLPLDFFPDLNALVDTATALYEEELTGREHCSPHHTAIRQALVCWDELTKLIAWMSSNITSEQVRTIIVNHVNDTWGLKVRQSLWFHLSCLTFGQHTVQEFLVSFGVWIRTPAPYRPPNAPILSTLPEHTVIC

SEQ ID NO: 11191 - protein, 1295 aa, Artificial Sequence
  SARS-CoV-2/pangolin/Guangxi/P4L/2017__EPI_ISL_410538 spike protein (1-1141)(P709C_P1063C) WhcAg construct
MFVFLFVLPLVSSQCVNLTTRTGIPPGYTNSSTRGVYYPDKVFRSSILHLTQDLFLPFFSNVTWFNTINYQGGFKKFDNPVLPFNDGVYFASTEKSNIIRGWIFGTTLDARTQSLLIVNNATNVVIKVCEFQFCTDPFLGVYYHNNNKTWVENEFRVYSSANNCTFEYISQPFLMDLEGKQGNFKNLREFVFKNVDGYFKIYSKHTPIDLVRDLPRGFAALEPLVDLPIGINITRFQTLLALHRSYLTPGNLESGWTTGAAAYYVGYLQQRTFLLSYNQNGTITDAVDCSLDPLSETKCTLKSLTVEKGIYQTSNFRVQPTISIVRFPNITNLCPFGEVFNASKFASVYAWNRKRISNCVADYSVLYNSTSFSTFKCYGVSPTKLNDLCFTNVYADSFVVKGDEVRQIAPGQTGVIADYNYKLPDDFTGCVIAWNSVKQDALTGGNYGYLYRLFRKSKLKPFERDISTEIYQAGSTPCNGQVGLNCYYPLERYGFHPTTGVNYQPFRVVVLSFELLNGPATVCGPKLSTTLVKDKCVNFNFNGLTGTGVLTTSKKQFLPFQQFGRDISDTTDAVRDPQTLEILDITPCSFGGVSVITPGTNTSNQVAVLYQDVNCTEVPMAIHAEQLTPAWRVYSAGANVFQTRAGCLVGAEHVNNSYECDIPVGAGICASYHSMSSLRSVNQRSIIAYTMSLGAENSVAYSNNSIAICTNFTISVTTEILPVSMTKTSVDCTMYICGDSIECSNLLLQYGSFCTQLNRALTGIAVEQDKNTQEVFAQVKQIYKTPPIKDFGGFNFSQILPDPSKPSKRSFIEDLLFNKVTLADAGFIKQYGDCLGDIAARDLICAQKFNGLTVLPPLLTDEMIAQYTSALLAGTITSGWTFGAGAALQIPFAMQMAYRFNGIGVTQNVLYENQKLIANQFNSAIGKIQDSLSSTASALGKLQDVVNQNAQALNTLVKQLSSNFGAISSVLNDILSRLDKVEAEVQIDRLITGRLQSLQTYVTQQLIRAAEIRASANLAATKMSECVLGQSKRVDFCGKGYHLMSFPQSAPHGVVFLHVTYVCAQEKNFTTAPAICHEGKAHFPREGVFVSNGTHWFITQRNFYEPQIITTDNTFVSGSCDVVIGIVNNTVYDPLQPELDSGGGGSDIDPYKEFGSSYQLLNFLPLDFFPDLNALVDTATALYEEELTGREHCSPHHTAIRQALVCWDELTKLIAWMSSNITSEQVRTIIVNHVNDTWGLKVRQSLWFHLSCLTFGQHTVQEFLVSFGVWIRTPAPYRPPNAPILSTLPEHTVIC

SEQ ID NO: 11192 - protein, 1295 aa, Artificial Sequence
  SARS-CoV-2/pangolin/Guangxi/P5L/2017__EPI_ISL_410540 spike protein (1-1141)(P709C_P1063C) WhcAg construct
MFVFLFVLPLVSSQCVNLTTRTGIPPGYTNSSTRGVYYPDKVFRSSILHLTQDLFLPFFSNVTWFNTINYQGGFKKFDNPVLPFNDGVYFASTEKSNIIRGWIFGTTLDARTQSLLIVNNATNVVIKVCEFQFCTDPFLGVYYHNNNKTWVENEFRVYSSANNCTFEYISQPFLMDLEGKQGNFKNLREFVFKNVDGYFKIYSKHTPIDLVRDLPRGFAALEPLVDLPIGINITRFQTLLALHRSYLTPGKLESGWTTGAAAYYVGYLQQRTFLLSYNQNGTITDAVDCSLDPLSETKCTLKSLTVEKGIYQTSNFRVQPTISIVRFPNITNLCPFGEVFNASKFASVYAWNRKRISNCVADYSVLYNSTSFSTFKCYGVSPTKLNDLCFTNVYADSFVVKGDEVRQIAPGQTGVIADYNYKLPDDFTGCVIAWNSVKQDALTGGNYGYLYRLFRKSKLKPFERDISTEIYQAGSTPCNGQVGLNCYYPLERYGFHPTTGVNYQPFRVVVLSFELLNGPATVCGPKLSTTLVKDKCVNFNFNGLTGTGVLTTSKKQFLPFQQFGRDISDTTDAVRDPQTLEILDITPCSFGGVSVITPGTNTSNQVAVLYQDVNCTEVPMAIHAEQLTPAWRVYSAGANVFQTRAGCLVGAEHVNNSYECDIPVGAGICASYHSMSSFRSVNQRSIIAYTMSLGAENSVAYSNNSIAICTNFTISVTTEILPVSMTKTSVDCTMYICGDSIECSNLLLQYGSFCTQLNRALTGIAVEQDKNTQEVFAQVKQIYKTPPIKDFGGFNFSQILPDPSKPSKRSFIEDLLFNKVTLADAGFIKQYGDCLGDIAARDLICAQKFNGLTVLPPLLTDEMIAQYTSALLAGTITSGWTFGAGAALQIPFAMQMAYRFNGIGVTQNVLYENQKLIANQFNSAIGKIQDSLSSTASALGKLQDVVNQNAQALNTLVKQLSSNFGAISSVLNDILSRLDKVEAEVQIDRLITGRLQSLQTYVTQQLIRAAEIRASANLAATKMSECVLGQSKRVDFCGKGYHLMSFPQSAPHGVVFLHVTYVCAQEKNFTTAPAICHEGKAHFPREGVFVSNGTHWFITQRNFYEPQIITTDNTFVSGSCDVVIGIVNNTVYDPLQPELDSGGGGSDIDPYKEFGSSYQLLNFLPLDFFPDLNALVDTATALYEEELTGREHCSPHHTAIRQALVCWDELTKLIAWMSSNITSEQVRTIIVNHVNDTWGLKVRQSLWFHLSCLTFGQHTVQEFLVSFGVWIRTPAPYRPPNAPILSTLPEHTVIC

SEQ ID NO: 11193 - protein, 1295 aa, Artificial Sequence
  SARS-CoV-2/pangolin/Guangxi/P5E/2017__EPI_ISL_410541 spike protein (1-1141)(P709C_P1063C) WhcAg construct
MFVFLFVLPLVSSQCVNLTTRTGIPPGYTNSSTRGVYYPDKVFRSSILHLTQDLFLPFFSNVTWFNTITYQGGSKKFDNPVLPFNDGVYFASTEKSNIIRGWIFGTTLDARTQSLLIVNNATNVVIKVCEFQFCTDPFLGVYYHNNNKTWVENEFRVYSSANNCTFEYISQPFLMDLEGKQGNFKNLREFVFKNVDGYFKIYSKHTPIDLVRDLPRGFAALEPLVDLPIGINITRFQTLLALHRSYLTPGKLESGWTTGAAAYYVGYLQQRTFLLSYNQNGTITDAVDCSLDPLSETKCTLKSLTVEKGIYQTSNFRVQPTISIVRFPNITNLCPFGEVFNASKFASVYAWNRKRISNCVADYSVLYNSTSFSTFKCYGVSPTKLNDLCFTNVYADSFVVKGDEVRQIAPGQTGVIADYNYKLPDDFTGCVIAWNSVKQDALTGDNYGYLYRLFRKSKLKPFERDISTEIYQAGSTPCNGQVGLNCYYPLERYGFHPTTGVNYQPFRVVVLSFELLNGPATVCGPKLSTTLVKDKCVNFNFNGLTGTGVLTTSKKQFLPFQQFGRDISDTTDAVRDPQTLEILDITPCSFGGVSVITPGTNTSNQVAVLYQDVNCTEVPMAIHAEQLTPAWRVYSAGANVFQTRAGCLVGAEHVNNSYECDIPVGAGICASYHSMSSFRSVNQRSIIAYTMSLGAENSVAYSNNSIAICTNFTISVTTEILPVSMTKTSVDCTMYICGDSIECSNLLLQYGSFCTQLNRALTGIAVEQDKNTQEVFAQVKQIYKTPPIKDFGGFNFSQILPDPSKPSKRSFIEDLLFNKVTLADAGFIKQYGDCLGDIAARDLICAQKFNGLTVLPPLLTDEMIAQYTSALLAGTITSGWTFGAGAALQIPFAMQMAYRFNGIGVTQNVLYENQKLIANQFNSAIGKIQDSLSSTASALGKLQDVVNQNAQALNTLVKQLSSNFGAISSVLNDILSRLDKVEAEVQIDRLITGRLQSLQTYVTQQLIRAAEIRASANLAATKMSECVLGQSKRVDFCGKGYHLMSFPQSAPHGVVFLHVTYVCAQEKNFTTAPAICHEGKAHFPREGVFVSNGTHWFITQRNFYEPQIITTDNTFVSGSCDVVIGIVNNTVYDPLQPELDSGGGGSDIDPYKEFGSSYQLLNFLPLDFFPDLNALVDTATALYEEELTGREHCSPHHTAIRQALVCWDELTKLIAWMSSNITSEQVRTIIVNHVNDTWGLKVRQSLWFHLSCLTFGQHTVQEFLVSFGVWIRTPAPYRPPNAPILSTLPEHTVIC

SEQ ID NO: 11194 - protein, 1293 aa, Artificial Sequence
  SARS-CoV-2/pangolin/Guangxi/P1E/2017__EPI_ISL_410539 spike protein (1-1139)(P707C_P1061C) WhcAg construct
MFVFLFVLPLVSSQCVNLTTRTGIQPGYTNSSTRGVYYPDKVFRSSILHLTQDLFLPFFSNVTWFNTINYQGGFKKFDNPVLPFNDGVYFASTEKSNIIRGWIFGTTLDARTQSLLIVNNATNVVIKVCEFQFCTDPFLGVYYHNNNKTWVENEFRVYSSANNCTFEYISQPFLMDLEGKQGNFKNLREFVFKNVDGYFKIYSKHTPIDLVRDLPRGFAALEPLVDLPIGINITRFQTLLALHRSYLTPGKLESGWTTGAAAYYVGYLQQRTFLLSYNQNGTITDAVDCSLDPLSETKCTLKSLTVEKGIYQTSNFRVQPTISIVRFPNITNLCPFGEVFNASKFASVYAWNRKRISNCVADYSVLYNSTSFSTFKCYGVSPTKLNDLCFTNVYADSFVVKGDEVRQIAPGQTGVIADYNYKLPDDFTGCVIAWNSVKQDALTGGNYLYRLFRKSKLKPFERDISTEIYQAGSTPCNGQVGLNCYYPLERYGFHPTTGVNYQPFRVVVLSFELLNGPATVCGPKLSTTLVKDKCVNFNFNGLTGTGVLTTSKKQFLPFQQFGRDISDTTDAVRDPQTLEILDITPCSFGGVSVITPGTNTSNQVAVLYQDVNCTEVPMAIHAEQLTPAWRVYSAGANVFQTRAGCLVGAEHVNNSYECDIPVGAGICASYHSMSSLRSVNQRSIIAYTMSLGAENSVAYSNNSIAICTNFTISVTTEILPVSMTKTSVDCTMYICGDSIECSNLLLQYGSFCTQLNRALTGIAVEQDKNTQEVFAQVKQIYKTPPIKDFGGFNFSQILPDPSKPSKRSFIEDLLFNKVTLADAGFIKQYGDCLGDIAARDLICAQKFNGLTVLPPLLTDEMIAQYTSALLAGTITSGWTFGAGAALQIPFAMQMAYRFNGIGVTQNVLYENQKLIANQFNSAIGKIQDSLSSTASALGKLQDVVNQNAQALNTLVKQLSSNFGAISSVLNDILSRLDKVEAEVQIDRLITGRLQSLQTYVTQQLIRAAEIRASANLAATKMSECVLGQSKRVDFCGKGYHLMSFPQSAPHGVVFLHVTYVCAQEKNFTTAPAICHEGKAHFPREGVFVSNGTHWFITQRNFYEPQIITTDNTFVSGSCDVVIGIVNNTVYDPLQPELDSGGGGSDIDPYKEFGSSYQLLNFLPLDFFPDLNALVDTATALYEEELTGREHCSPHHTAIRQALVCWDELTKLIAWMSSNITSEQVRTIIVNHVNDTWGLKVRQSLWFHLSCLTFGQHTVQEFLVSFGVWIRTPAPYRPPNAPILSTLPEHTVIC

SEQ ID NO: 11195 - protein, 1301 aa, Artificial Sequence
  SARS-CoV-2/Wuhan/WIV05/2019__EPI_ISL_402128 spike protein (1-1147)(G889C_L1034C) WhcAg construct
MFVFLVLLPLVSSQCVNLTTRTQLPPAYTNSFTRGVYYPDKVFRSSVLHSTQDLFLPFFSNVTWFHAIHVSGTNGTKRFDNPVLPFNDGVYFASTEKSNIIRGWIFGTTLDSKTQSLLIVNNATNVVIKVCEFQFCNDPFLGVYYHKNNKSWMESEFRVYSSANNCTFEYVSQPFLMDLEGKQGNFKNLREFVFKNIDGYFKIYSKHTPINLVRDLPQGFSALEPLVDLPIGINITRFQTLLALHRSYLTPGDSSSGWTAGAAAYYVGYLQPRTFLLKYNENGTITDAVDCALDPLSETKCTLKSFTVEKGIYQTSNFRVQPTESIVRFPNITNLCPFGEVFNATRFASVYAWNRKRISNCVADYSVLYNSASFSTFKCYGVSPTKLNDLCFTNVYADSFVIRGDEVRQIAPGQTGKIADYNYKLPDDFTGCVIAWNSNNLDSKVGGNYNYLYRLFRKSNLKPFERDISTEIYQAGSTPCNGVEGFNCYFPLQSYGFQPTNGVGYQPYRVVVLSFELLHAPATVCGPKKSTNLVKNKCVNFNFNGLTGTGVLTESNKKFLPFQQFGRDIADTTDAVRDPQTLEILDITPCSFGGVSVITPGTNTSNQVAVLYQDVNCTEVPVAIHADQLTPTWRVYSTGSNVFQTRAGCLIGAEHVNNSYECDIPIGAGICASYQTQTNSPRRARSVASQSIIAYTMSLGAENSVAYSNNSIAIPTNFTISVTTEILPVSMTKTSVDCTMYICGDSTECSNLLLQYGSFCTQLNRALTGIAVEQDKNTQEVFAQVKQIYKTPPIKDFGGFNFSQILPDPSKPSKRSFIEDLLFNKVTLADAGFIKQYGDCLGDIAARDLICAQKFNGLTVLPPLLTDEMIAQYTSALLAGTITSGWTFCAGAALQIPFAMQMAYRFNGIGVTQNVLYENQKLIANQFNSAIGKIQDSLSSTASALGKLQDVVNQNAQALNTLVKQLSSNFGAISSVLNDILSRLDKVEAEVQIDRLITGRLQSLQTYVTQQLIRAAEIRASANLAATKMSECVCGQSKRVDFCGKGYHLMSFPQSAPHGVVFLHVTYVPAQEKNFTTAPAICHDGKAHFPREGVFVSNGTHWFVTQRNFYEPQIITTDNTFVSGNCDVVIGIVNNTVYDPLQPELDSGGGGSDIDPYKEFGSSYQLLNFLPLDFFPDLNALVDTATALYEEELTGREHCSPHHTAIRQALVCWDELTKLIAWMSSNITSEQVRTIIVNHVNDTWGLKVRQSLWFHLSCLTFGQHTVQEFLVSFGVWIRTPAPYRPPNAPILSTLPEHTVIC

SEQ ID NO: 11196 - protein, 1297 aa, Artificial Sequence
  SARS-CoV-2/bat/Yunnan/RaTG13/2013__EPI_ISL_402131 spike protein (1-1143)(G885C_L1030C) WhcAg construct
MFVFLVLLPLVSSQCVNLTTRTQLPPAYTNSSTRGVYYPDKVFRSSVLHLTQDLFLPFFSNVTWFHAIHVSGTNGIKRFDNPVLPFNDGVYFASTEKSNIIRGWIFGTTLDSKTQSLLIVNNATNVVIKVCEFQFCNDPFLGVYYHKNNKSWMESEFRVYSSANNCTFEYVSQPFLMDLEGKQGNFKNLREFVFKNIDGYFKIYSKHTPINLVRDLPPGFSALEPLVDLPIGINITRFQTLLALHRSYLTPGDSSSGWTAGAAAYYVGYLQPRTFLLKYNENGTITDAVDCALDPLSETKCTLKSFTVEKGIYQTSNFRVQPTDSIVRFPNITNLCPFGEVFNATTFASVYAWNRKRISNCVADYSVLYNSTSFSTFKCYGVSPTKLNDLCFTNVYADSFVITGDEVRQIAPGQTGKIADYNYKLPDDFTGCVIAWNSKHIDAKEGGNFNYLYRLFRKANLKPFERDISTEIYQAGSKPCNGQTGLNCYYPLYRYGFYPTDGVGHQPYRVVVLSFELLNAPATVCGPKKSTNLVKNKCVNFNFNGLTGTGVLTESNKKFLPFQQFGRDIADTTDAVRDPQTLEILDITPCSFGGVSVITPGTNASNQVAVLYQDVNCTEVPVAIHADQLTPTWRVYSTGSNVFQTRAGCLIGAEHVNNSYECDIPIGAGICASYQTQTNSRSVASQSIIAYTMSLGAENSVAYSNNSIAIPTNFTISVTTEILPVSMTKTSVDCTMYICGDSTECSNLLLQYGSFCTQLNRALTGIAVEQDKNTQEVFAQVKQIYKTPPIKDFGGFNFSQILPDPSKPSKRSFIEDLLFNKVTLADAGFIKQYGDCLGDIAARDLICAQKFNGLTVLPPLLTDEMIAQYTSALLAGTITSGWTFCAGAALQIPFAMQMAYRFNGIGVTQNVLYENQKLIANQFNSAIGKIQDSLSSTASALGKLQDVVNQNAQALNTLVKQLSSNFGAISSVLNDILSRLDKVEAEVQIDRLITGRLQSLQTYVTQQLIRAAEIRASANLAATKMSECVCGQSKRVDFCGKGYHLMSFPQSAPHGVVFLHVTYVPAQEKNFTTAPAICHDGKAHFPREGVFVSNGTHWFVTQRNFYEPQIITTDNTFVSGSCDVVIGIVNNTVYDPLQPELDSGGGGSDIDPYKEFGSSYQLLNFLPLDFFPDLNALVDTATALYEEELTGREHCSPHHTAIRQALVCWDELTKLIAWMSSNITSEQVRTIIVNHVNDTWGLKVRQSLWFHLSCLTFGQHTVQEFLVSFGVWIRTPAPYRPPNAPILSTLPEHTVIC

SEQ ID NO: 11197 - protein, 1301 aa, Artificial Sequence
  SARS-CoV-2/Wuhan/HBCDC-HB-01/2019__EPI_ISL_402132 spike protein (1-1147)(G889C_L1034C) WhcAg construct
MFVFLVLLPLVSSQCVNLTTRTQLPPAYTNSITRGVYYPDKVFRSSVLHSTQDLFLPFFSNVTWFHAIHVSGTNGTKRFDNPVLPFNDGVYFASTEKSNIIRGWIFGTTLDSKTQSLLIVNNATNVVIKVCEFQFCNDPFLGVYYHKNNKSWMESEFRVYSSANNCTFEYVSQPFLMDLEGKQGNFKNLREFVFKNIDGYFKIYSKHTPINLVRDLPQGFSALEPLVDLPIGINITRFQTLLALHRSYLTPGDSSSGWTAGAAAYYVGYLQPRTFLLKYNENGTITDAVDCALDPLSETKCTLKSFTVEKGIYQTSNFRVQPTESIVRFPNITNLCPFGEVFNATRFASVYAWNRKRISNCVADYSVLYNSASFSTFKCYGVSPTKLNDLCFTNVYADSFVIRGDEVRQIAPGQTGKIADYNYKLPDDFTGCVIAWNSNNLDSKVGGNYNYLYRLFRKSNLKPFERDISTEIYQAGSTPCNGVEGFNCYFPLQSYGFQPTNGVGYQPYRVVVLSFELLHAPATVCGPKKSTNLVKNKCVNFNFNGLTGTGVLTESNKKFLPFQQFGRDIADTTDAVRDPQTLEILDITPCSFGGVSVITPGTNTSNQVAVLYQDVNCTEVPVAIHADQLTPTWRVYSTGSNVFQTRAGCLIGAEHVNNSYECDIPIGAGICASYQTQTNSPRRARSVASQSIIAYTMSLGAENSVAYSNNSIAIPTNFTISVTTEILPVSMTKTSVDCTMYICGDSTECSNLLLQYGSFCTQLNRALTGIAVEQDKNTQEVFAQVKQIYKTPPIKDFGGFNFSQILPDPSKPSKRSFIEDLLFNKVTLADAGFIKQYGDCLGDIAARDLICAQKFNGLTVLPPLLTDEMIAQYTSALLAGTITSGWTFCAGAALQIPFAMQMAYRFNGIGVTQNVLYENQKLIANQFNSAIGKIQDSLSSTASALGKLQDVVNQNAQALNTLVKQLSSNFGAISSVLNDILSRLDKVEAEVQIDRLITGRLQSLQTYVTQQLIRAAEIRASANLAATKMSECVCGQSKRVDFCGKGYHLMSFPQSAPHGVVFLHVTYVPAQEKNFTTAPAICHDGKAHFPREGVFVSNGTHWFVTQRNFYEPQIITTDNTFVSGNCDVVIGIVNNTVYDPLQPELDSGGGGSDIDPYKEFGSSYQLLNFLPLDFFPDLNALVDTATALYEEELTGREHCSPHHTAIRQALVCWDELTKLIAWMSSNITSEQVRTIIVNHVNDTWGLKVRQSLWFHLSCLTFGQHTVQEFLVSFGVWIRTPAPYRPPNAPILSTLPEHTVIC

SEQ ID NO: 11198 - protein, 1301 aa, Artificial Sequence
  SARS-CoV-2/Guangdong/20SF028/2020__EPI_ISL_403936 spike protein (1-1147)(G889C_L1034C) WhcAg construct
MFVFLVLLPLVSSQCVNLTTRTQLPPAYTNSFTRGVYYPDKVFRSSVLYSTQDLFLPFFSNVTWFHAIHVSGTNGTKRFDNPVLPFNDGVYFASTEKSNIIRGWIFGTTLDSKTQSLLIVNNATNVVIKVCEFQFCNDPFLGVYYHKNNKSWMESEFRVYSSANNCTFEYVSQPFLMDLEGKQGNFKNLREFVFKNIDGYFKIYSKHTPINLVRDLPQGFSALEPLVDLPIGINITRFQTLLALHRSYLTPGDSSSGWTAGAAAYYVGYLQPRTFLLKYNENGTITDAVDCALDPLSETKCTLKSFTVEKGIYQTSNFRVQPTESIVRFPNITNLCPFGEVFNATRFASVYAWNRKRISNCVADYSVLYNSASFSTFKCYGVSPTKLNDLCFTNVYADSFVIRGDEVRQIAPGQTGKIADYNYKLPDDFTGCVIAWNSNNLDSKVGGNYNYLYRLFRKSNLKPFERDISTEIYQAGSTPCNGVEGFNCYFPLQSYGFQPTNGVGYQPYRVVVLSFELLHAPATVCGPKKSTNLVKNKCVNFNFNGLTGTGVLTESNKKFLPFQQFGRDIADTTDAVRDPQTLEILDITPCSFGGVSVITPGTNTSNQVAVLYQDVNCTEVPVAIHADQLTPTWRVYSTGSNVFQTRAGCLIGAEHVNNSYECDIPIGAGICASYQTQTNSPRRARSVASQSIIAYTMSLGAENSVAYSNNSIAIPTNFTISVTTEILPVSMTKTSVDCTMYICGDSTECSNLLLQYGSFCTQLNRALTGIAVEQDKNTQEVFAQVKQIYKTPPIKDFGGFNFSQILPDPSKPSKRSFIEDLLFNKVTLADAGFIKQYGDCLGDIAARDLICAQKFNGLTVLPPLLTDEMIAQYTSALLAGTITSGWTFCAGAALQIPFAMQMAYRFNGIGVTQNVLYENQKLIANQFNSAIGKIQDSLSSTASALGKLQDVVNQNAQALNTLVKQLSSNFGAISSVLNDILSRLDKVEAEVQIDRLITGRLQSLQTYVTQQLIRAAEIRASANLAATKMSECVCGQSKRVDFCGKGYHLMSFPQSAPHGVVFLHVTYVPAQEKNFTTAPAICHDGKAHFPREGVFVSNGTHWFVTQRNFYEPQIITTDNTFVSGNCDVVIGIVNNTVYDPLQPELDSGGGGSDIDPYKEFGSSYQLLNFLPLDFFPDLNALVDTATALYEEELTGREHCSPHHTAIRQALVCWDELTKLIAWMSSNITSEQVRTIIVNHVNDTWGLKVRQSLWFHLSCLTFGQHTVQEFLVSFGVWIRTPAPYRPPNAPILSTLPEHTVIC

SEQ ID NO: 11199 - protein, 1301 aa, Artificial Sequence
  SARS-CoV-2/Shenzhen/SZTH-001/2020__EPI_ISL_406592 spike protein (1-1147)(G889C_L1034C) WhcAg construct
MFVFLVLLPLVSSQCVNLTTRTQLPPAYTNSFTRGVYYPDKVFRSSVLHSTQDLFLPFFSNVTWFHAIHVSGTNGTKRFDNPVLPFNDGVYFASTEKSNIIRGWIFGTTLDSKTQSLLIVNNATNVVIKVCEFQFCNDPFLGVYYHKNNKSWMESEFRVYSSANNCTFEYVSQPFLMDLEGKQGNFKNLREFVFKNIDGYFKIYSKHTPINLVRDLPQGFSALEPLVDLPIGINITRFQTLLALHRSYLTPGDSSSGWTAGAAAYYVGYLQPRTFLLKYNENGTITDAVDCALDPLSETKCTLKSFTVEKGIYQTSNFRVQPTESIVRFPNITNLCPFGEVFNATRFASVYAWNRKRISNCVADYSVLYNSASFSTFKCYGVSPTKLNDLCFTNVYADSFVIRGDEVRQIAPGQTGKIADYNYKLPDDFTGCVIAWNSNNLDSKVGGNYNYLYRLFRKSNLKPFERDISTEIYQAGSTPCNGVEGFNCYFPLQSYGFQPTNGVGYQPYRVVVLSFELLHAPATVCGPKKSTNLVKNKCVNFNFNGLTGTGVLTESNKKFLPFQQFGRDIADTTDAVRDPQTLEILDITPCSFGGVSVITPGTNTSNQVAVLYQDVNCTEVPVAIHADQLTPTWRVYSTGSNVFQTRAGCLIGAEHVNNSYECDIPIGAGICASYQTQTNSPRRARSVASQSIIAYTMSLGAENSVAYSNNSIAIPTNFTISVTTEILPVSMTKTSVDCTMYICGDSTECSNLLLQYGSFCTQLNRALTGIAVEQDKNTQEVFAQVKQIYKTPPIKDFGGFNFSQILPDPSKPSKRSFIEDLLFNKVTLADAGFIKQYGDCLGDIAARDLICAQKFNGLTVLPPLLTDEMIAQYTSALLAGTITSGWTFCAGAALQIPFAMQMAYRFNGIGVTQNVLYENQKLIANQFNSAIGKIQDSLSSTASALGKLQDVVNQNAQALNTLVKQLSSNFGAISSVLNDILSRLDKVEAEVQIDRLITGRLQSLQTYVTQQLIRAAEIRASANLAATKMSECVCGQSKRVDFCGKGYHLMSFPQSAPHGVVFLHVTYVPAQEKNFTTAPAICHDGKAHFPREGVFVSNGTHWFVTQRNFYEPQIITTDNTFVSGNCDVLIGIVNNTVYDPLQPELDSGGGGSDIDPYKEFGSSYQLLNFLPLDFFPDLNALVDTATALYEEELTGREHCSPHHTAIRQALVCWDELTKLIAWMSSNITSEQVRTIIVNHVNDTWGLKVRQSLWFHLSCLTFGQHTVQEFLVSFGVWIRTPAPYRPPNAPILSTLPEHTVIC

SEQ ID NO: 11200 - protein, 1301 aa, Artificial Sequence
  SARS-CoV-2/Shenzhen/SZTH-004/2020__EPI_ISL_406595 spike protein (1-1147)(G889C_L1034C) WhcAg construct
MFVFLVLLPLVSSQCVNLTTRTQLPPAYTNSFTRGVYYPDKVFRSSVLHSTQDLFLPFFSNVTWFHAIHVSGTNGTKRFDNPVLPFNDGVYFASTEKSNIIRGWIFGTTLDSKTQSLLIVNNATNVVIKVCEFQFCNDPFLGVYYHKNNKSWMESEFRVYSSANNCTFEYVSQPFLMDLEGKQGNFKNLREFVFKNIDGYFKIYSKHTPINLVRDLPQGFSALEPLVDLPIGINITRFQTLLALHRSYLTPGDSSSGWTAGAAAYYVGYLQPRTFLLKYNENGTITDAVDCALDPLSETKCTLKSFTVEKGIYQTSNFRVQPTESIVRFPNITNLCPFGEVFNATRFASVYAWDRKRISNCVAYYSVLYNSASFSTFKCYGVSPTKLNDLCFTNVYADSFVIRGDEVRQIAPGQTGKIADYNYKLPDDFTGCVIAWNSNNLDSKVGGNYNYLYRLFRKSNLKPFERDISTEIYQAGSTPCNGVEGFNCYFPLQSYGFQPTNGVGYQPYRVVVLSFELLHAPATVCGPKKSTNLVKNKCVNFNFNGLTGTGVLTESNKKFLPFQQFGRDIADTTDAVRDPQTLEILDITPCSFGGVSVITPGTNTSNQVAVLYQDVNCTEVPVAIHADQLTPTWRVYSTGSNVFQTRAGCLIGAEHVNNSYECDIPIGAGICASYQTQTNSPRRARSVASQSIIAYTMSLGAENSVAYSNNSIAIPTNFTISVTTEILPVSMTKTSVDCTMYICGDSTECSNLLLQYGSFCTQLNRALTGIAVEQDKNTQEVFAQVKQIYKTPPIKDFGGFNFSQILPDPSKPSKRSFIEDLLFNKVTLADAGFIKQYGDCLGDIAARDLICAQKFNGLTVLPPLLTDEMIAQYTSALLAGTITSGWTFCAGAALQIPFAMQMAYRFNGIGVTQNVLYENQKLIANQFNSAIGKIQDSLSSTASALGKLQDVVNQNAQALNTLVKQLSSNFGAISSVLNDILSRLDKVEAEVQIDRLITGRLQSLQTYVTQQLIRAAEIRASANLAATKMSECVCGQSKRVDFCGKGYHLMSFPQSAPHGVVFLHVTYVPAQEKNFTTAPAICHDGKAHFPREGVFVSNGTHWFVTQRNFYEPQIITTDNTFVSGNCDVVIGIVNNTVYDPLQPELDSGGGGSDIDPYKEFGSSYQLLNFLPLDFFPDLNALVDTATALYEEELTGREHCSPHHTAIRQALVCWDELTKLIAWMSSNITSEQVRTIIVNHVNDTWGLKVRQSLWFHLSCLTFGQHTVQEFLVSFGVWIRTPAPYRPPNAPILSTLPEHTVIC

SEQ ID NO: 11201 - protein, 1301 aa, Artificial Sequence
  SARS-CoV-2/France/IDF0372/2020__EPI_ISL_406596 spike protein (1-1147)(G889C_L1034C) WhcAg construct
MFVFLVLLPLVSSQCVNLTTRTQLPPAYTNSFTRGVYYPDKVFRSSVLHSTQDLFLPFFSNVTWFHAIHVSGTNGTKRFDNPVLPFNDGVYFASTEKSNIIRGWIFGTTLDSKTQSLLIVNNATNVVIKVCEFQFCNDPFLGVYYHKNNKSWMESEFRVYSSANNCTFEYVSQPFLMDLEGKQGNFKNLREFVFKNIDGYFKIYSKHTPINLVRDLPQGFSALEPLVDLPIGINITRFQTLLALHRSYLTPGDSSSGWTAGAAAYYVGYLQPRTFLLKYNENGTITDAVDCALDPLSETKCTLKSFTVEKGIYQTSNFRVQPTESIVRFPNITNLCPFGEVFNATRFASVYAWNRKRISNCVADYSFLYNSASFSTFKCYGVSPTKLNDLCFTNVYADSFVIRGDEVRQIAPGQTGKIADYNYKLPDDFTGCVIAWNSNNLDSKVGGNYNYLYRLFRKSNLKPFERDISTEIYQAGSTPCNGVEGFNCYFPLQSYGFQPTNGVGYQPYRVVVLSFELLHAPATVCGPKKSTNLVKNKCVNFNFNGLTGTGVLTESNKKFLPFQQFGRDIADTTDAVRDPQTLEILDITPCSFGGVSVITPGTNTSNQVAVLYQDVNCTEVPVAIHADQLTPTWRVYSTGSNVFQTRAGCLIGAEHVNNSYECDIPIGAGICASYQTQTNSPRRARSVASQSIIAYTMSLGAENSVAYSNNSIAIPTNFTISVTTEILPVSMTKTSVDCTMYICGDSTECSNLLLQYGSFCTQLNRALTGIAVEQDKNTQEVFAQVKQIYKTPPIKDFGGFNFSQILPDPSKPSKRSFIEDLLFNKVTLADAGFIKQYGDCLGDIAARDLICAQKFNGLTVLPPLLTDEMIAQYTSALLAGTITSGWTFCAGAALQIPFAMQMAYRFNGIGVTQNVLYENQKLIANQFNSAIGKIQDSLSSTASALGKLQDVVNQNAQALNTLVKQLSSNFGAISSVLNDILSRLDKVEAEVQIDRLITGRLQSLQTYVTQQLIRAAEIRASANLAATKMSECVCGQSKRVDFCGKGYHLMSFPQSAPHGVVFLHVTYVPAQEKNFTTAPAICHDGKAHFPREGVFVSNGTHWFVTQRNFYEPQIITTDNTFVSGNCDVVIGIVNNTVYDPLQPELDSGGGGSDIDPYKEFGSSYQLLNFLPLDFFPDLNALVDTATALYEEELTGREHCSPHHTAIRQALVCWDELTKLIAWMSSNITSEQVRTIIVNHVNDTWGLKVRQSLWFHLSCLTFGQHTVQEFLVSFGVWIRTPAPYRPPNAPILSTLPEHTVIC

SEQ ID NO: 11202 - protein, 1301 aa, Artificial Sequence
  SARS-CoV-2/Australia/VIC01/2020__EPI_ISL_406844 spike protein (1-1147)(G889C_L1034C) WhcAg construct
MFVFLVLLPLVSSQCVNLTTRTQLPPAYTNSFTRGVYYPDKVFRSSVLHSTQDLFLPFFSNVTWFHAIHVSGTNGTKRFDNPVLPFNDGVYFASTEKSNIIRGWIFGTTLDSKTQSLLIVNNATNVVIKVCEFQFCNDPFLGVYYHKNNKSWMESEFRVYSSANNCTFEYVSQPFLMDLEGKQGNFKNLREFVFKNIDGYFKIYSKHTPINLVRDLPQGFSALEPLVDLPIGINITRFQTLLALHRRYLTPGDSSSGWTAGAAAYYVGYLQPRTFLLKYNENGTITDAVDCALDPLSETKCTLKSFTVEKGIYQTSNFRVQPTESIVRFPNITNLCPFGEVFNATRFASVYAWNRKRISNCVADYSVLYNSASFSTFKCYGVSPTKLNDLCFTNVYADSFVIRGDEVRQIAPGQTGKIADYNYKLPDDFTGCVIAWNSNNLDSKVGGNYNYLYRLFRKSNLKPFERDISTEIYQAGSTPCNGVEGFNCYFPLQSYGFQPTNGVGYQPYRVVVLSFELLHAPATVCGPKKSTNLVKNKCVNFNFNGLTGTGVLTESNKKFLPFQQFGRDIADTTDAVRDPQTLEILDITPCSFGGVSVITPGTNTSNQVAVLYQDVNCTEVPVAIHADQLTPTWRVYSTGSNVFQTRAGCLIGAEHVNNSYECDIPIGAGICASYQTQTNSPRRARSVASQSIIAYTMSLGAENSVAYSNNSIAIPTNFTISVTTEILPVSMTKTSVDCTMYICGDSTECSNLLLQYGSFCTQLNRALTGIAVEQDKNTQEVFAQVKQIYKTPPIKDFGGFNFSQILPDPSKPSKRSFIEDLLFNKVTLADAGFIKQYGDCLGDIAARDLICAQKFNGLTVLPPLLTDEMIAQYTSALLAGTITSGWTFCAGAALQIPFAMQMAYRFNGIGVTQNVLYENQKLIANQFNSAIGKIQDSLSSTASALGKLQDVVNQNAQALNTLVKQLSSNFGAISSVLNDILSRLDKVEAEVQIDRLITGRLQSLQTYVTQQLIRAAEIRASANLAATKMSECVCGQSKRVDFCGKGYHLMSFPQSAPHGVVFLHVTYVPAQEKNFTTAPAICHDGKAHFPREGVFVSNGTHWFVTQRNFYEPQIITTDNTFVSGNCDVVIGIVNNTVYDPLQPELDSGGGGSDIDPYKEFGSSYQLLNFLPLDFFPDLNALVDTATALYEEELTGREHCSPHHTAIRQALVCWDELTKLIAWMSSNITSEQVRTIIVNHVNDTWGLKVRQSLWFHLSCLTFGQHTVQEFLVSFGVWIRTPAPYRPPNAPILSTLPEHTVIC

SEQ ID NO: 11203 - protein, 1301 aa, Artificial Sequence
  SARS-CoV-2/Germany/BavPat1/2020__EPI_ISL_406862 spike protein (1-1147)(G889C_L1034C) WhcAg construct
MFVFLVLLPLVSSQCVNLTTRTQLPPAYTNSFTRGVYYPDKVFRSSVLHSTQDLFLPFFSNVTWFHAIHVSGTNGTKRFDNPVLPFNDGVYFASTEKSNIIRGWIFGTTLDSKTQSLLIVNNATNVVIKVCEFQFCNDPFLGVYYHKNNKSWMESEFRVYSSANNCTFEYVSQPFLMDLEGKQGNFKNLREFVFKNIDGYFKIYSKHTPINLVRDLPQGFSALEPLVDLPIGINITRFQTLLALHRSYLTPGDSSSGWTAGAAAYYVGYLQPRTFLLKYNENGTITDAVDCALDPLSETKCTLKSFTVEKGIYQTSNFRVQPTESIVRFPNITNLCPFGEVFNATRFASVYAWNRKRISNCVADYSVLYNSASFSTFKCYGVSPTKLNDLCFTNVYADSFVIRGDEVRQIAPGQTGKIADYNYKLPDDFTGCVIAWNSNNLDSKVGGNYNYLYRLFRKSNLKPFERDISTEIYQAGSTPCNGVEGFNCYFPLQSYGFQPTNGVGYQPYRVVVLSFELLHAPATVCGPKKSTNLVKNKCVNFNFNGLTGTGVLTESNKKFLPFQQFGRDIADTTDAVRDPQTLEILDITPCSFGGVSVITPGTNTSNQVAVLYQGVNCTEVPVAIHADQLTPTWRVYSTGSNVFQTRAGCLIGAEHVNNSYECDIPIGAGICASYQTQTNSPRRARSVASQSIIAYTMSLGAENSVAYSNNSIAIPTNFTISVTTEILPVSMTKTSVDCTMYICGDSTECSNLLLQYGSFCTQLNRALTGIAVEQDKNTQEVFAQVKQIYKTPPIKDFGGFNFSQILPDPSKPSKRSFIEDLLFNKVTLADAGFIKQYGDCLGDIAARDLICAQKFNGLTVLPPLLTDEMIAQYTSALLAGTITSGWTFCAGAALQIPFAMQMAYRFNGIGVTQNVLYENQKLIANQFNSAIGKIQDSLSSTASALGKLQDVVNQNAQALNTLVKQLSSNFGAISSVLNDILSRLDKVEAEVQIDRLITGRLQSLQTYVTQQLIRAAEIRASANLAATKMSECVCGQSKRVDFCGKGYHLMSFPQSAPHGVVFLHVTYVPAQEKNFTTAPAICHDGKAHFPREGVFVSNGTHWFVTQRNFYEPQIITTDNTFVSGNCDVVIGIVNNTVYDPLQPELDSGGGGSDIDPYKEFGSSYQLLNFLPLDFFPDLNALVDTATALYEEELTGREHCSPHHTAIRQALVCWDELTKLIAWMSSNITSEQVRTIIVNHVNDTWGLKVRQSLWFHLSCLTFGQHTVQEFLVSFGVWIRTPAPYRPPNAPILSTLPEHTVIC

SEQ ID NO: 11204 - protein, 1301 aa, Artificial Sequence
  SARS-CoV-2/Wuhan/HBCDC-HB-02/2020__EPI_ISL_412978 spike protein (1-1147)(G889C_L1034C) WhcAg construct
MFVFLVLLPLVSSQCVNLTTRTQLPPAYTNSFTRGVYYPDKVFRSSVLHSTQDLFLPFFSNVTWFHAIHVSGTNGTKRFDNPVLPFNDGVYFASTEKSNIIRGWIFGTTLDSKTQSLLIVNNATNVVIKVCEFQFCNDPFLGVYYHKNNKSWMESEFRVYSSANNCTFEYVSQPFLMDLEGKQGNFKNLREFVFKNIDGYFKIYSKHTPINLVRDLPQGFSALEPLVDLPIGINITRFQTLLALHRSYLTPGDSSSGWTAGAAAYYVGYLQPRTFLLKYNENGTITDAVDCALDPLSETKCTLKSFTVEKGIYQTSNFRVQPTESIVRFPNITNLCPFGEVFNATRFASVYAWNRKRISNCVADYSVLYNSASFSTFKCYGVSPTKLNDLCFTNVYADSFVIRGDEVRQIAPGQTGKIADYNYKLPDDFTGCVIAWNSNNLDSKVGGNYNYLYRLFRKSNLKPFERDISTEIYQAGSTPCNGVEGFNCYFPLQSYGFQPTNGVGYQPYRVVVLSFELLHAPATVCGPKKSTNLVKNKCVNFNFNGLTGTGVLTESNKKFLPFQQFGRDIADTTDAVRDPQTLEILDITPCSFGGVSVITPGTNTSNQVAVLYQDVNCTEVPVAIHADQLTPTWRVYSTGSNVFQTRAGCLIGAEHVNNSYECDIPIGAGICASYQTQTNSPRRARSVASQSIIAYTMSLGAENSVAYSNNSIAIPTNFTISVTTEILPVSMTKTSVDCTMYICGDSTECSNFLLQYGSFCTQLNRALTGIAVEQDKNTQEVFAQVKQIYKTPPIKDFGGFNFSQILPDPSKPSKRSFIEDLLFNKVTLADAGFIKQYGDCLGDIAARDLICAQKFNGLTVLPPLLTDEMIAQYTSALLAGTITSGWTFCAGAALQIPFAMQMAYRFNGIGVTQNVLYENQKLIANQFNSAIGKIQDSLSSTASALGKLQDVVNQNAQALNTLVKQLSSNFGAISSVLNDILSRLDKVEAEVQIDRLITGRLQSLQTYVTQQLIRAAEIRASANLAATKMSECVCGQSKRVDFCGKGYHLMSFPQSAPHGVVFLHVTYVPAQEKNFTTAPAICHDGKAHFPREGVFVSNGTHWFVTQRNFYEPQIITTDNTFVSGNCDVVIGIVNNTVYDPLQPELDSGGGGSDIDPYKEFGSSYQLLNFLPLDFFPDLNALVDTATALYEEELTGREHCSPHHTAIRQALVCWDELTKLIAWMSSNITSEQVRTIIVNHVNDTWGLKVRQSLWFHLSCLTFGQHTVQEFLVSFGVWIRTPAPYRPPNAPILSTLPEHTVIC

SEQ ID NO: 11205 - protein, 1301 aa, Artificial Sequence
  SARS-CoV-2/Australia/QLD02/2020__EPI_ISL_407896 spike protein (1-1147)(G889C_L1034C) WhcAg construct
MFVFLVLLPLVSSQCVNLTTRTQLPPAYTNSFTRGVYYPDKVFRSSVLHSTQDLFLPFFSNVTWFHAIHVSGTNGTKRFDNPVLPFNDGVYFASTEKSNIIRGWIFGTTLDSKTQSLLIVNNATNVVIKVCEFQFCNDPFLGVYYHKNNKSWMESEFRVYSSANNCTFEYVSQPFLMDLEGKQGNFKNLREFVFKNIDGYFKIYSKHTPINLVRDLPQGFSALEPLVDLPIGINITRFQTLLALHRSYLTPGDSSSGWTAGAAAYYVGYLQPRTFLLKYNENGTITDAVDCALDPLSETKCTLKSFTVEKGIYQTSNFRVQPTESIVRFPNITNLCPFGEVFNATRFASVYAWNRKRISNCVADYSVLYNSASFSTFKCYGVSPTKLNDLCFTNVYADSFVIRGDEVRQIAPGQTGKIADYNYKLPDDFTGCVIAWNSNNLDSKVGGNYNYLYRLFRKSNLKPFERDISTEIYQAGSTPCNGVEGFNCYFPLQSYGFQPTNGVGYQPYRVVVLSFELLHAPATVCGPKKSTNLVKNKCVNFNFNGLTGTGVLTESNKKFLPFQQFGRDIADTTDAVRDPQTLEILDITPCSFGGVSVITPGTNTSNQVAVLYQDVNCTEVPVAIHADQLTPTWRVYSTGSNVFQTRAGCLIGAEHVNNSYECDIPIGAGICASYQTQTNSPRRARSVASQSIIAYTMSLGAENSVAYSNNSIAIPTNFTISVTTEILPVSMTKTSVDCTMYICGDSTECSNLLLQYGSFCTQLNRALTGIAVEQDKNTQEVFAQVKQIYKTPPIKDFGGFNFSQILPDPSKPSKRSFIEDLLFNKVTLADAGFIKQYGDCLGDIAARDLICAQKFNGLTVLPPLLTDEMIAQYTSALLAGTITSGWTFCAGAALQIPFAMQMAYRFNGIGVTQNVLYENQKLIANQFNSAIGKIQDSLSSTASALGKLQDVVNQNAQALNTLVKQLSSNFGAISSVLNDILSRLDKVEAEVQIDRLITGRLQSLQTYVTQQLIRAAEIRASANLAATKMSECVCGQSKRVDFCGKGYHLMSFPQSAPHGVVFLHVTYVPAQEKNFTTAPAICHDGKAHFPREGVFVSNGTHWFVTQRNFYEPQIITTDNTFVSGNCDVVIGIVNNTVYDPLQLELDSGGGGSDIDPYKEFGSSYQLLNFLPLDFFPDLNALVDTATALYEEELTGREHCSPHHTAIRQALVCWDELTKLIAWMSSNITSEQVRTIIVNHVNDTWGLKVRQSLWFHLSCLTFGQHTVQEFLVSFGVWIRTPAPYRPPNAPILSTLPEHTVIC

SEQ ID NO: 11206 - protein, 1301 aa, Artificial Sequence
  SARS-CoV-2/India/1-31/2020__EPI_ISL_413523 spike protein (1-1147)(G889C_L1034C) WhcAg construct
MFVFLVLLPLVSSQCVNLTTRTQLPPAYTNSFTRGVYYPDKVFRSSVLHSTQDLFLPFFSNVTWFHAIHVSGTNGTKRFDNPVLPFNDGVYFASTEKSNIIRGWIFGTTLDSKTQSLLIVNNATNVVIKVCEFQFCNDPFLGVYYHKNNKSWMESEFRVYSSANNCTFEYVSQPFLMDLEGKQGNFKNLREFVFKNIDGYFKIYSKHTPINLVRDLPQGFSALEPLVDLPIGINITRFQTLLALHRSYLTPGDSSSGWTAGAAAYYVGYLQPRTFLLKYNENGTITDAVDCALDPLSETKCTLKSFTVEKGIYQTSNFRVQPTESIVRFPNITNLCPFGEVFNATRFASVYAWNRKRISNCVADYSVLYNSASFSTFKCYGVSPTKLNDLCFTNVYADSFVIRGDEVRQIAPGQTGKIADYNYKLPDDFTGCVIAWNSNNLDSKVGGNYNYLYRLFRKSNLKPFERDISTEIYQAGSTPCNGVEGFNCYFPLQSYGFQPTNGVGYQPYRVVVLSFELLHAPATVCGPKKSTNLVKNKCVNFNFNGLTGTGVLTESNKKFLPFQQFGRDIADTTDAVRDPQTLEILDITPCSFGGVSVITPGTNTSNQVAVLYQDVNCTEVPVAIHADQLTPTWRVYSTGSNVFQTRAGCLIGAEHVNNSYECDIPIGAGICASYQTQTNSPRRARSVASQSIIAYTMSLGAENSVAYSNNSIAIPTNFTISVTTEILPVSMTKTSVDCTMYICGDSTECSNLLLQYGSFCTQLNRALTGIAVEQDKNTQEVFAQVKQIYKTPPIKDFGGFNFSQILPDPSKPSKRSFIEDLLFNKVTLADAGFIKQYGDCLGDIAARDLICAQKFNGLTVLPPLLTDEMIAQYTSALLAGTITSGWTFCAGAALQIPFAMQMAYRFNGIGVTQNVLYENQKLIANQFNSVIGKIQDSLSSTASALGKLQDVVNQNAQALNTLVKQLSSNFGAISSVLNDILSRLDKVEAEVQIDRLITGRLQSLQTYVTQQLIRAAEIRASANLAATKMSECVCGQSKRVDFCGKGYHLMSFPQSAPHGVVFLHVTYVPAQEKNFTTAPAICHDGKAHFPREGVFVSNGTHWFVTQRNFYEPQIITTDNTFVSGNCDVVIGIVNNTVYDPLQPELDSGGGGSDIDPYKEFGSSYQLLNFLPLDFFPDLNALVDTATALYEEELTGREHCSPHHTAIRQALVCWDELTKLIAWMSSNITSEQVRTIIVNHVNDTWGLKVRQSLWFHLSCLTFGQHTVQEFLVSFGVWIRTPAPYRPPNAPILSTLPEHTVIC

SEQ ID NO: 11207 - protein, 1301 aa, Artificial Sequence
  SARS-CoV-2/Guangdong/GD2020087-P0008/2020__EPI_ISL_413863 spike protein (1-1147)(G889C_L1034C) WhcAg construct
MFVFLVLLPLVSSQCVNLTTRTQLPPAYTNSFTRGVYYPDKVFRSSVLHSTQDLFLPFFSNVTWFHAIHVSGTNGTKRFDNPVLPFNDGVYFASTEKSNIIRGWIFGTTLDSKTQSLLIVNNATNVVIKVCEFQFCNDPFLGVYYHKNNKSWMESEFRVYSSANNCTFEYVSQPFLMDLEGKQGNFKNLREFVFKNIDGYFKIYSKHTPINLVRDLPQGFSALEPLVDLPIGINITRFQTLLALHRSYLTPGDSSSGWTAGAAAYYVGYLQPRTFLLKYNENGTITDAVDCALDPLSETKCTLKSFTVEKGIYQTSNFRVQPTESIVRFPNITNLCPFGEVFNATRFASVYAWNRKRISNCVADYSVLYNSASFSTFKCYGVSPTKLNDLCFTNVYADSFVIRGDEVREIAPGQTGKIADYNYKLPDDFTGCVIAWNSNNLDSKVGGNYNYLYRLFRKSNLKPFERDISTEIYQAGSTPCNGVEGFNCYFPLQSYGFQPTNGVGYQPYRVVVLSFELLHAPATVCGPKKSTNLVKNKCVNFNFNGLTGTGVLTESNKKFLPFQQFGRDIADTTDAVRDPQTLEILDITPCSFGGVSVITPGTNTSNQVAVLYQDVNCTEVPVAIHADQLTPTWRVYSTGSNVFQTRAGCLIGAEHVNNSYECDIPIGAGICASYQTQTNSPRRARSVASQSIIAYTMSLGAENSVAYSNNSIAIPTNFTISVTTEILPVSMTKTSVDCTMYICGDSTECSNLLLQYGSFCTQLNRALTGIAVEQDKNTQEVFAQVKQIYKTPPIKDFGGFNFSQILPDPSKPSKRSFIEDLLFNKVTLADAGFIKQYGDCLGDIAARDLICAQKFNGLTVLPPLLTDEMIAQYTSALLAGTITSGWTFCAGAALQIPFAMQMAYRFNGIGVTQNVLYENQKLIANQFNSAIGKIQDSLSSTASALGKLQDVVNQNAQALNTLVKQLSSNFGAISSVLNDILSRLDKVEAEVQIDRLITGRLQSLQTYVTQQLIRAAEIRASANLAATKMSECVCGQSKRVDFCGKGYHLMSFPQSAPHGVVFLHVTYVPAQEKNFTTAPAICHDGKAHFPREGVFVSNGTHWFVTQRNFYEPQIITTDNTFVSGNCDVVIGIVNNTVYDPLQPELDSGGGGSDIDPYKEFGSSYQLLNFLPLDFFPDLNALVDTATALYEEELTGREHCSPHHTAIRQALVCWDELTKLIAWMSSNITSEQVRTIIVNHVNDTWGLKVRQSLWFHLSCLTFGQHTVQEFLVSFGVWIRTPAPYRPPNAPILSTLPEHTVIC

SEQ ID NO: 11208 - protein, 1301 aa, Artificial Sequence
  SARS-CoV-2/Sweden/01/2020__EPI_ISL_411951 spike protein (1-1147)(G889C_L1034C) WhcAg construct
MFVFLVLLPLVSSQCVNLTTRTQLPPAYTNSFTRGVYYPDKVFRSSVLHSTQDLFLPFFSNVTWFHAIHVSGTNGTKRFDNPVLPFNDGVYFASTEKSNIIRGWIFGTTLDSKTQSLLIVNNATNVVIKVCEFQFCNDPFLGVYYHKNNKSWMESEFRVYSSANNCTFEYVSQPFLMDLEGKQGNFKNLREFVFKNIDGYFKIYSKHTPINLVRDLPQGFSALEPLVDLPIGINITRFQTLLALHRSYLTPGDSSSGWTAGAAAYYVGYLQPRTFLLKYNENGTITDAVDCALDPLSETKCTLKSFTVEKGIYQTSNFRVQPTESIVRFPNITNLCPFGEVFNATRFASVYAWNRKRISNCVADYSVLYNSASFSTFKCYGVSPTKLNDLCFTNVYADSFVIRGDEVRQIAPGQTGKIADYNYKLPDDFTGCVIAWNSNNLDSKVGGNYNYLYRLFRKSNLKPFERDISTEIYQAGSTPCNGVEGFNCYFPLQSYGFQPTNGVGYQPYRVVVLSFELLHAPATVCGPKKSTNLVKNKCVNFNFNGLTGTGVLTESNKKFLPFQQFGRDIADTTDAVRDPQTLEILDITPCSFGGVSVITPGTNTSNQVAVLYQDVNCTEVPVAIHADQLTPTWRVYSTGSNVFQTRAGCLIGAEHVNNSYECDIPIGAGICASYQTQTNSPRRARSVASQSIIAYTMSLGAENSVAYSNNSIAIPTNFTISVTTEILPVSMTKTSVDCTMYICGDSTECSNLLLQYGSFCTQLNRALTGIAVEQDKNTQEVFAQVKQIYKTPPIKDCGGFNFSQILPDPSKPSKRSFIEDLLFNKVTLADAGFIKQYGDCLGDIAARDLICAQKFNGLTVLPPLLTDEMIAQYTSALLAGTITSGWTFCAGAALQIPFAMQMAYRFNGIGVTQNVLYENQKLIANQFNSAIGKIQDSLSSTASALGKLQDVVNQNAQALNTLVKQLSSNFGAISSVLNDILSRLDKVEAEVQIDRLITGRLQSLQTYVTQQLIRAAEIRASANLAATKMSECVCGQSKRVDFCGKGYHLMSFPQSAPHGVVFLHVTYVPAQEKNFTTAPAICHDGKAHFPREGVFVSNGTHWFVTQRNFYEPQIITTDNTFVSGNCDVVIGIVNNTVYDPLQPELDSGGGGSDIDPYKEFGSSYQLLNFLPLDFFPDLNALVDTATALYEEELTGREHCSPHHTAIRQALVCWDELTKLIAWMSSNITSEQVRTIIVNHVNDTWGLKVRQSLWFHLSCLTFGQHTVQEFLVSFGVWIRTPAPYRPPNAPILSTLPEHTVIC

SEQ ID NO: 11209 - protein, 1301 aa, Artificial Sequence
  SARS-CoV-2/Tianmen/HBCDC-HB-07/2020__EPI_ISL_412983 spike protein (1-1147)(G889C_L1034C) WhcAg construct
MFVFLVLLPLVSSQCVNLTTRTQLPPAYTNSFTRGVYYPDKVFRSSVLHSTQDLFLPFFSNVTWFHAIHVSGTNGTKRFDNPVLPFNDGVYFASTEKSNIIRGWIFGTTLDSKTQSLLIVNNATNVVIKVCEFQFCNDPFLGVYYHKNNKSWMESEFRVYSSANNCTFEYVSQPFLMDLEGKQGNFKNLREFVFKNIDGYFKIYSKHTPINLVRDLPQGFSALEPLVDLPIGINITRFQTLLALHRSYLTPGDSSSGWTAGAAAYYVGYLQPRTFLLKYNENGTITDAVDCALDPLSETKCTLKSFTVEKGIYQTSNFRVQPTESIVRFPNITNLCPFGEVFNATRFASVYAWNRKRISNCVADYSVLYNSASFSTFKCYGVSPTKLNDLCFTNVYADSFVIRGDEVRQIAPGQTGKIADYNYKLPDDFTGCVIAWNSNNLDSKVGGNYNYLYRLFRKSNLKPFERDISTEIYQAGSTPCNGVEGFNCYFPLQSYGFQPTNGVGYQPYRVVVLSFELLHAPATVCGPKKSTNLVKNKCVNFNFNGLTGTGVLTESNKKFLPFQQFGRDIADTTDAVRDPQTLEILDITPCSFGGVSVITPGTNTSNQVAVLYQDLNCTEVPVAIHADQLTPTWRVYSTGSNVFQTRAGCLIGAEHVNNSYECDIPIGAGICASYQTQTNSPRRARSVASQSIIAYTMSLGAENSVAYSNNSIAIPTNFTISVTTEILPVSMTKTSVDCTMYICGDSTECSNLLLQYGSFCTQLNRALTGIAVEQDKNTQEVFAQVKQIYKTPPIKDFGGFNFSQILPDPSKPSKRSFIEDLLFNKVTLADAGFIKQYGDCLGDIAARDLICAQKFNGLTVLPPLLTDEMIAQYTSALLAGTITSGWTFCAGAALQIPFAMQMAYRFNGIGVTQNVLYENQKLIANQFNSAIGKIQDSLSSTASALGKLQDVVNQNAQALNTLVKQLSSNFGAISSVLNDILSRLDKVEAEVQIDRLITGRLQSLQTYVTQQLIRAAEIRASANLAATKMSECVCGQSKRVDFCGKGYHLMSFPQSAPHGVVFLHVTYVPAQEKNFTTAPAICHDGKAHFPREGVFVSNGTHWFVTQRNFYEPQIITTDNTFVSGNCDVVIGIVNNTVYDPLQPELDSGGGGSDIDPYKEFGSSYQLLNFLPLDFFPDLNALVDTATALYEEELTGREHCSPHHTAIRQALVCWDELTKLIAWMSSNITSEQVRTIIVNHVNDTWGLKVRQSLWFHLSCLTFGQHTVQEFLVSFGVWIRTPAPYRPPNAPILSTLPEHTVIC

SEQ ID NO: 11210 - protein, 1301 aa, Artificial Sequence
  SARS-CoV-2/Hong Kong/case42_VM20002493/2020__EPI_ISL_414527 spike protein (1-1147)(G889C_L1034C) WhcAg construct
MFVFLVLLPLVSSQCVNLTTRTQLPPAYTNSFTRGVYYPDKVFRSSVLHSTQDLFLPFFSNVTWFHAIHVSGTNGTKRFDNPVLPFNDGVYFASTEKSNIIRGWIFGTTLDSKTQSLLIVNNATNVVIKVCEFQFCNDPFLGVYYHKNNKSWMESEFRVYSSANNCTFEYVSQPFLMDLEGKQGNFKNLREFVFKNIDGYFKIYSKHTPINLVRDLPQGFSALEPLVDLPIGINITRFQTLLALHRSYLTPGDSSSGWTAGAAAYYVGYLQPRTFLLKYNENGTITDAVDCALDPLSETKCTLKSFTVEKGIYQTSNFRVQPTESIVRFPNITNLCPFGEVFNATRFASVYAWNRKRISNCVADYSVLYNSASFSTFKCYGVSPTKLNDLCFTNVYADSFVIRGDEVRQIAPGQTGKIADYNYKLPDDFTGCVIAWNSNNLDSKVGGNYNYLYRLFRKSNLKPFERDISTEIYQAGSTPCNGVEGFNCYFPLQSYGFQPTNGVGYQPYRVVVLSFELLHAPATVCGPKKSTNLVKNKCVNFNFNGLTGTGVLTESNKKFLPFQQFGRDIADTTDAVRDPQTLEILDITPCSFGGVSVITPGTNTSNQVAVLYQDVNCTEVPVAIHADQLTPTWRVYSTGSNVFQTRAGCLIGAEHVNNSYECDIPIGAGICASYQTQTNSPRRARSVASQSIIAYTMSLGAENSVAYSNNSIAIPTNFAISVTTEILPVSMTKTSVDCTMYICGDSTECSNLLLQYGSFCTQLNRALTGIAVEQDKNTQEVFAQVKQIYKTPPIKDFGGFNFSQILPDPSKPSKRSFIEDLLFNKVTLADAGFIKQYGDCLGDIAARDLICAQKFNGLTVLPPLLTDEMIAQYTSALLAGTITSGWTFCAGAALQIPFAMQMAYRFNGIGVTQNVLYENQKLIANQFNSAIGKIQDSLSSTASALGKLQDVVNQNAQALNTLVKQLSSNFGAISSVLNDILSRLDKVEAEVQIDRLITGRLQSLQTYVTQQLIRAAEIRASANLAATKMSECVCGQSKRVDFCGKGYHLMSFPQSAPHGVVFLHVTYVPAQEKNFTTAPAICHDGKAHFPREGVFVSNGTHWFVTQRNFYEPQIITTDNTFVSGNCDVVIGIVNNTVYDPLQPELDSGGGGSDIDPYKEFGSSYQLLNFLPLDFFPDLNALVDTATALYEEELTGREHCSPHHTAIRQALVCWDELTKLIAWMSSNITSEQVRTIIVNHVNDTWGLKVRQSLWFHLSCLTFGQHTVQEFLVSFGVWIRTPAPYRPPNAPILSTLPEHTVIC

SEQ ID NO: 11211 - protein, 1301 aa, Artificial Sequence
  SARS-CoV-2/USA/CruiseA-23/2020__EPI_ISL_414482 spike protein (1-1147)(G889C_L1034C) WhcAg construct
MFVFLVLLPLVSSQCVNLTTRTQLPPAYTNSFTRGVYYPDKVFRSSVLHSTQDLFLPFFSNVTWFHAIHVSGTNGTKRFDNPVLPFNDGVYFASTEKSNIIRGWIFGTTLDSKTQSLLIVNNATNVVIKVCEFQFCNDPFLGVYYHKNNKSWMESEFRVYSSANNCTFEYVSQPFLMDLEVKQGNFKNLREFVFKNIDGYFKIYSKHTPINLVRDLPQGFSALEPLVDLPIGINITRFQTLLALHRSYLTPGDSSSGWTAGAAAYYVGYLQPRTFLLKYNENGTITDAVDCALDPLSETKCTLKSFTVEKGIYQTSNFRVQPTESIVRFPNITNLCPFGEVFNATRFASVYAWNRKRISNCVADYSVLYNSASFSTFKCYGVSPTKLNDLCFTNVYADSFVIRGDEVRQIAPGQTGKIADYNYKLPDDFTGCVIAWNSNNLDSKVGGNYNYLYRLFRKSNLKPFERDISTEIYQAGSTPCNGVEGFNCYFPLQSYGFQPTNGVGYQPYRVVVLSFELLHAPATVCGPKKSTNLVKNKCVNFNFNGLTGTGVLTESNKKFLPFQQFGRDIADTTDAVRDPQTLEILDITPCSFGGVSVITPGTNTSNQVAVLYQDVNCTEVPVAIHADQLTPTWRVYSTGSNVFQTRAGCLIGAEHVNNSYECDIPIGAGICASYQTQTNSPRRARSVASQSIIAYTMSLGAENSVAYSNNSIAIPTNFTISVTTEILPVSMTKTSVDCTMYICGDSTECSNLLLQYGSFCTQLNRALTGIAVEQDKNTQEVFAQVKQIYKTPPIKDFGGFNFSQILPDPSKPSKRSFIEDLLFNKVTLADAGFIKQYGDCLGDIAARDLICAQKFNGLTVLPPLLTDEMIAQYTSALLAGTITSGWTFCAGAALQIPFAMQMAYRFNGIGVTQNVLYENQKLIANQFNSAIGKIQDSLSSTASALGKLQDVVNQNAQALNTLVKQLSSNFGAISSVLNDILSRLDKVEAEVQIDRLITGRLQSLQTYVTQQLIRAAEIRASANLAATKMSECVCGQSKRVDFCGKGYHLMSFPQSAPHGVVFLHVTYVPAQEKNFTTAPAICHDGKAHFPREGVFVSNGTHWFVTQRNFYEPQIITTDNTFVSGNCDVVIGIVNNTVYDPLQPELDSGGGGSDIDPYKEFGSSYQLLNFLPLDFFPDLNALVDTATALYEEELTGREHCSPHHTAIRQALVCWDELTKLIAWMSSNITSEQVRTIIVNHVNDTWGLKVRQSLWFHLSCLTFGQHTVQEFLVSFGVWIRTPAPYRPPNAPILSTLPEHTVIC

SEQ ID NO: 11212 - protein, 1301 aa, Artificial Sequence
  SARS-CoV-2/Hong Kong/case85_VM20002868/2020__EPI_ISL_414519 spike protein (1-1147)(G889C_L1034C) WhcAg construct
MFVFLVLVPLVSSQCVNLTTRTQLPPAYTNSFTRGVYYPDKVFRSSVLHSTQDLFLPFFSNVTWFHAIHVSGTNGTKRFDNPVLPFNDGVYFASTEKSNIIRGWIFGTTLDSKTQSLLIVNNATNVVIKVCEFQFCNDPFLGVYYHKNNKSWMESEFRVYSSANNCTFEYVSQPFLMDLEGKQGNFKNLREFVFKNIDGYFKIYSKHTPINLVRDLPQGFSALEPLVDLPIGINITRFQTLLALHRSYLTPGDSSSGWTAGAAAYYVGYLQPRTFLLKYNENGTITDAVDCALDPLSETKCTLKSFTVEKGIYQTSNFRVQPTESIVRFPNITNLCPFGEVFNATRFASVYAWNRKRISNCVADYSVLYNSASFSTFKCYGVSPTKLNDLCFTNVYADSFVIRGDEVRQIAPGQTGKIADYNYKLPDDFTGCVIAWNSNNLDSKVGGNYNYLYRLFRKSNLKPFERDISTEIYQAGSTPCNGVEGFNCYFPLQSYGFQPTNGVGYQPYRVVVLSFELLHAPATVCGPKKSTNLVKNKCVNFNFNGLTGTGVLTESNKKFLPFQQFGRDIADTTDAVRDPQTLEILDITPCSFGGVSVITPGTNTSNQVAVLYQDVNCTEVPVAIHADQLTPTWRVYSTGSNVFQTRAGCLIGAEHVNNSYECDIPIGAGICASYQTQTNSPRRARSVASQSIIAYTMSLGAENSVAYSNNSIAIPTNFTISVTTEILPVSMTKTSVDCTMYICGDSTECSNLLLQYGSFCTQLNRALTGIAVEQDKNTQEVFAQVKQIYKTPPIKDFGGFNFSQILPDPSKPSKRSFIEDLLFNKVTLADAGFIKQYGDCLGDIAARDLICAQKFNGLTVLPPLLTDEMIAQYTSALLAGTITSGWTFCAGAALQIPFAMQMAYRFNGIGVTQNVLYENQKLIANQFNSAIGKIQDSLSSTASALGKLQDVVNQNAQALNTLVKQLSSNFGAISSVLNDILSRLDKVEAEVQIDRLITGRLQSLQTYVTQQLIRAAEIRASANLAATKMSECVCGQSKRVDFCGKGYHLMSFPQSAPHGVVFLHVTYVPAQEKNFTTAPAICHDGKAHFPREGVFVSNGTHWFVTQRNFYEPQIITTDNTFVSGNCDVVIGIVNNTVYDPLQPELDSGGGGSDIDPYKEFGSSYQLLNFLPLDFFPDLNALVDTATALYEEELTGREHCSPHHTAIRQALVCWDELTKLIAWMSSNITSEQVRTIIVNHVNDTWGLKVRQSLWFHLSCLTFGQHTVQEFLVSFGVWIRTPAPYRPPNAPILSTLPEHTVIC

SEQ ID NO: 11213 - protein, 1301 aa, Artificial Sequence; identical to SEQ ID NO: 11203
  SARS-CoV-2/England/200990660/2020__EPI_ISL_414523 spike protein (1-1147)(G889C_L1034C) WhcAg construct

SEQ ID NO: 11214 - protein, 1301 aa, Artificial Sequence
  SARS-CoV-2/Australia/NSW09/2020__EPI_ISL_413595 spike protein (1-1147)(G889C_L1034C) WhcAg construct
MFVFLVLLPLVSSQCVNLTTRTQLPPAYTNSFTRGVYYPDKVFRSSVLHSTQDLFLPFFSNVTWFHAIHVSGTNGTKRFDNPVLPFNDGVYFASTEKSNIIRGWIFGTTLDSKTQSLLIVNNATNVVIKVCEFQFCNDPFLGVYYHKNNKSWMESEFRVYSSANNCTFEYVSQPFLMDLEGKQGNFKNLREFVFKNIDGYFKIYSKHTPINLVRDLPQGFSALEPLVDLPIGINITRFQTLLALHRSYLTPGDSSSGWTAGAAAYYVGYLQPRTFLLKYNENGTITDAVDCALDPLSETKCTLKSFTVEKGIYQTSNFRVQPTESIVRFPNITNLCPFGEVFNATRFASVYAWNRKRISNCVADYSVLYNSASFSTFKCYGVSPTKLNDLCFTNVYADSFVIRGDEVRQIAPGQTGKIADYNYKLPDDFTGCVIAWNSNNLDSKVGGNYNYLYRLFRKSNLKPFERDISTEIYQAGSTPCNGVEGFNCYFPLQSYGFQPTNGVGYQPYRVVVLSFELLHAPATVCGPKKSTNLVKNKCVNFNFNGLTGTGVLTESNKKFLPFQQFGRDIADTTDAVRDPQTLEILDITPCSFGGVSVITPGTNTSNQVAVLYQDVNCTEVPVAIHADQLTPTWRVYSTGSNVFQTRAGCLIGAEHVNNSYECDIPIGAGICASYQTQTNSPRRARSVASQSIIAYTMSLGAENSVAYSNNSIAIPTNFTISVTTEILPVSMTKTSVDCTMYICGDSTECSNLLLQYGSFCTQLNRALTGIAVEQDKNTQEVFAQVKQIYKTPPIKDFGGFNFSQILPDPSKPSKRSFIEDLLFNKVTLADAGFIKQYGDCLGDIAARDLICAQKFNGLTVLPPLLTDEMIAQYTSALLAGTITSGWTFCAGAALQIPFAMQMAYRFNGIGVTQNVLYENQKLIANQFNSAIGKIQDSLSFTASALGKLQDVVNQNAQALNTLVKQLSSNFGAISSVLNDILSRLDKVEAEVQIDRLITGRLQSLQTYVTQQLIRAAEIRASANLAATKMSECVCGQSKRVDFCGKGYHLMSFPQSAPHGVVFLHVTYVPAQEKNFTTAPAICHDGKAHFPREGVFVSNGTHWFVTQRNFYEPQIITTDNTFVSGNCDVVIGIVNNTVYDPLQPELDSGGGGSDIDPYKEFGSSYQLLNFLPLDFFPDLNALVDTATALYEEELTGREHCSPHHTAIRQALVCWDELTKLIAWMSSNITSEQVRTIIVNHVNDTWGLKVRQSLWFHLSCLTFGQHTVQEFLVSFGVWIRTPAPYRPPNAPILSTLPEHTVIC

SEQ ID NO: 11215 - protein, 1301 aa, Artificial Sequence; identical to SEQ ID NO: 11195
  SARS-CoV-2/Australia/NSW10/2020__EPI_ISL_413596 spike protein (1-1147)(G889C_L1034C) WhcAg construct

SEQ ID NO: 11216 - protein, 1301 aa, Artificial Sequence
  SARS-CoV-2/Switzerland/1000477797/2020__EPI_ISL_413023 spike protein (1-1147)(G889C_L1034C) WhcAg construct
MFVFLVLLPLVSSQCVNLTTRTQLPPAYTNSFTRGVYYPDKVFRSSVLHSTQDLFLPFFSNVTWFHAIHVSGTNGTKRFDNPVLPFNDGVYFASTEKSNIIRGWIFGTTLDSKTQSLLIVNNATNVVIKVCEFQFCNDPFLGVYYHKNNKSWMESEFRVYSSANNCTFEYVSQPFLMDLEGKQGNFKNLREFVFKNIDGYFNIYSKHTPINLVRDLPQGFSALEPLVDLPIGINITRFQTLLALHRSYLTPGDSSSGWTAGAAAYYVGYLQPRTFLLKYNENGTITDAVDCALDPLSETKCTLKSFTVEKGIYQTSNFRVQPTESIVRFPNITNLCPFGEVFNATRFASVYAWNRKRISNCVADYSVLYNSASFSTFKCYGVSPTKLNDLCFTNVYADSFVIRGDEVRQIAPGQTGKIADYNYKLPDDFTGCVIAWNSNNLDSKVGGNYNYLYRLFRKSNLKPFERDISTEIYQAGSTPCNGVEGFNCYFPLQSYGFQPTNGVGYQPYRVVVLSFELLHAPATVCGPKKSTNLVKNKCVNFNFNGLTGTGVLTESNKKFLPFQQFGRDIADTTDAVRDPQTLEILDITPCSFGGVSVITPGTNTSNQVAVLYQGVNCTEVPVAIHADQLTPTWRVYSTGSNVFQTRAGCLIGAEHVNNSYECDIPIGAGICASYQTQTNSPRRARSVASQSIIAYTMSLGAENSVAYSNNSIAIPTNFTISVTTEILPVSMTKTSVDCTMYICGDSTECSNLLLQYGSFCTQLNRALTGIAVEQDKNTQEVFAQVKQIYKTPPIKDFGGFNFSQILPDPSKPSKRSFIEDLLFNKVTLADAGFIKQYGDCLGDIAARDLICAQKFNGLTVLPPLLTDEMIAQYTSALLAGTITSGWTFCAGAALQIPFAMQMAYRFNGIGVTQNVLYENQKLIANQFNSAIGKIQDSLSSTASALGKLQDVVNQNAQALNTLVKQLSSNFGAISSVLNDILSRLDKVEAEVQIDRLITGRLQSLQTYVTQQLIRAAEIRASANLAATKMSECVCGQSKRVDFCGKGYHLMSFPQSAPHGVVFLHVTYVPAQEKNFTTAPAICHDGKAHFPREGVFVSNGTHWFVTQRNFYEPQIITTDNTFVSGNCDVVIGIVNNTVYDPLQPELDSGGGGSDIDPYKEFGSSYQLLNFLPLDFFPDLNALVDTATALYEEELTGREHCSPHHTAIRQALVCWDELTKLIAWMSSNITSEQVRTIIVNHVNDTWGLKVRQSLWFHLSCLTFGQHTVQEFLVSFGVWIRTPAPYRPPNAPILSTLPEHTVIC

SEQ ID NO: 11217 - protein, 1301 aa, Artificial Sequence
  SARS-CoV-2/Belgium/BA-02291/2020__EPI_ISL_415159 spike protein (1-1147)(G889C_L1034C) WhcAg construct
MFVFLVLLPLVSSQCVNLTTRTQLPPAYTNSFTRGVYYPDKVFRSSVLHSTQDLFLPFFSNVTWFHAIHVSGTNGTKRFDNPVLPFNDGVYFASTEKSNIIRGWIFGTTLDSKTQSLLIVNNATNVVIKVCEFQFCNDPFLGVYYHKNNKSWMESEFRVYSSANNCTFEYVSQPFLMDLEGKQGNFKNLREFVFKNIDGYFKIYSKHTPINLVRDLPQGFSALEPLVDLPIGINITRFQTLLALHRSYLTPGDSSSGWTAGAAAYYVGYLQPRTFLLKYNENGTITDAVDCALDPLSETKCTLKSFTVEKGIYQTSNFRVQPTESIVRFPNITNLCPFGEVFNATRFASVYAWNRKRISNCVADYSVLYNSASFSTFKCYGVSPTKLNDLCFTNVYADSFVIRGDEVRQIAPGQTGKIADYNYKLPDDFTGCVIAWNSNNLDSKVGGNYNYLYRLFRRSNLKPFERDISTEIYQAGSTPCNGVEGFNCYFPLQSYGFQPTNGVGYQPYRVVVLSFELLPAPATVCGPKKSTNLVKNKCVNFNFNGLTGTGVLTESNKKFLPFQQFGRDIADTTDAVRDPQTLEILDITPCSFGGVSVITPGTNTSNQVAVLYQGVNCTEVPVAIHADQLTPTWRVYSTGSNVFQTRAGCLIGAEHVNNSYECDIPIGAGICASYQTQTNSPRRARSVASQSIIAYTMSLGAENSVAYSNNSIAIPTNFTISVTTEILPVSMTKTSVDCTMYICGDSTECSNLLLQYGSFCTQLNRALTGIAVEQDKNTQEVFAQVKQIYKTPPIKDFGGFNFSQILPDPSKPSKRSFIEDLLFNKVTLADAGFIKQYGDCLGDIAARDLICAQKFNGLTVLPPLLTDEMIAQYTSALLAGTITSGWTFCAGAALQIPFAMQMAYRFNGIGVTQNVLYENQKLIANQFNSAIGKIQDSLSSAAPALGKLQDVVNQNAQALNTLVKQLSSNFGAISSVLNDILSRLDKVEAEVQIDRLITGRLQSLQTYVTQQLIRAAEIRASANLAATKMSECVCGQSKRVDFCGKGYHLMSFPQSAPHGVVFLHVTYVPAQEKNFTTAPAICHDGKAHFPREGVFVSNGTHWFVTQRNFYEPQIITTDNTFVSGNCDVVIGIVNNTVYDPLQPELDSGGGGSDIDPYKEFGSSYQLLNFLPLDFFPDLNALVDTATALYEEELTGREHCSPHHTAIRQALVCWDELTKLIAWMSSNITSEQVRTIIVNHVNDTWGLKVRQSLWFHLSCLTFGQHTVQEFLVSFGVWIRTPAPYRPPNAPILSTLPEHTVIC

SEQ ID NO: 11218 - protein, 1301 aa, Artificial Sequence
  SARS-CoV-2/USA/WA8-UW5/2020__EPI_ISL_413486 spike protein (1-1147)(G889C_L1034C) WhcAg construct
MFVFLVLLPLVSSQCVNLTTRTQLPPAYTNSFTRGVYYPDKVFRSSVLHSTQDLFLPFFSNVTWFHAIHVSGTNGTKRFDNPVLPFNDGVYFASTEKSNIIRGWIFGTTLDSKTQSLLIVNNATNVVIKVCEFQFCNDPFLGVYYHKNNKSWMESEFRVYSSANNCTFEYVSQPFLMDLEGKQGNFKNLREFVFKNIDGYFKIYSKHTPINLVRDLPQGFSALEPLVDLPIGINITRFQTLLALHRSYLTPGDSSSGWTAGAAAYYVGYLQPRTFLLKYNENGTITDAVDCALDPLSETKCTLKSFTVEKGIYQTSNFRVQPTESIVRFPNITNLCPFGEVFNATRFASVYAWNRKRISNCVADYSVLYNSASFSTFKCYGVSPTKLNDLCFTNVYADSFVIRGDEVRQIAPGQTGKIADYNYKLPDDFTGCVIAWNSNNLDSKVGGNYNYLYRLFRKSNLKPFERDISTEIYQAGSTPCNGVEGFNCYFPLQSYGFQPTNGVGYQPYRVVVLSFELLHAPATVCGPKKSTNLVKNKCVNFNFNGLTGTGVLTESNKKFLPFQQFGRDIADTTDAVRDPQTLEILDITPCSFGGVSVITPGTNTSNQVAVLYQDVNCTEVPVAIHADQLTPTWRVYSTGSNVFQTRAGCLIGAEYVNNSYECDIPIGAGICASYQTQTNSPRRARSVASQSIIAYTMSLGAENSVAYSNNSIAIPTNFTISVTTEILPVSMTKTSVDCTMYICGDSTECSNLLLQYGSFCTQLNRALTGIAVEQDKNTQEVFAQVKQIYKTPPIKDFGGFNFSQILPDPSKPSKRSFIEDLLFNKVTLADAGFIKQYGDCLGDIAARDLICAQKFNGLTVLPPLLTDEMIAQYTSALLAGTITSGWTFCAGAALQIPFAMQMAYRFNGIGVTQNVLYENQKLIANQFNSAIGKIQDSLSSTASALGKLQDVVNQNAQALNTLVKQLSSNFGAISSVLNDILSRLDKVEAEVQIDRLITGRLQSLQTYVTQQLIRAAEIRASANLAATKMSECVCGQSKRVDFCGKGYHLMSFPQSAPHGVVFLHVTYVPAQEKNFTTAPAICHDGKAHFPREGVFVSNGTHWFVTQRNFYEPQIITTDNTFVSGNCDVVIGIVNNTVYDPLQPELDSGGGGSDIDPYKEFGSSYQLLNFLPLDFFPDLNALVDTATALYEEELTGREHCSPHHTAIRQALVCWDELTKLIAWMSSNITSEQVRTIIVNHVNDTWGLKVRQSLWFHLSCLTFGQHTVQEFLVSFGVWIRTPAPYRPPNAPILSTLPEHTVIC

SEQ ID NO: 11219 - protein, 1301 aa, Artificial Sequence
  SARS-CoV-2/England/20102000506/2020__EPI_ISL_415147 spike protein (1-1147)(G889C_L1034C) WhcAg construct
MFVFLVLLPLVSSQCVNLTTRTQLPPAYTNSFTRGVYYPDKVFRSSVLHSTQDLFLPFFSNVTWFHAIHVSGTNGTKRFDNPVLPFNDGVYFASTEKSNIIRGWIFGTTLDSKTQSLLIVNNATNVVIKVCEFQFCNDPFLGVYYHKNNKSWMESEFRVYSSANNCTFEYVSQPFLMDLEGKQGNFKNLREFVFKNIDGYFKIYSKHTPINLVRDLPQGFSALEPLVDLPIGINITRFQTLLALHRSYLTPGDSSSGWTAGAAAYYVGYLQPRTFLLKYNENGTITDAVDCALDPLSETKCTLKSFTVEKGIYQTSNFRVQPTESIVRFPNITNLCPFGEVFNATRFASVYAWNRKRISNCVADYSVLYNSASFSTFKCYGVSPTKLNDLCFTNVYADSFVIRGDEVRQIAPGQTGKIADYNYKLPDDFTGCVIAWNSNNLDSKVGGNYNYLYRLFRKSNLKPFERDISTEIYQAGSTPCNGVEGFNCYFPLQSYGFQPTNGVGYQPYRVVVLSFELLHAPATVCGPKKSTNLVKNKCVNFNFNGLTGTGVLTESNKKFLPFQQFGRDIADTTDAVRDPQTLEILDITPCSFGGVSVITPGTNTSNQVAVLYQGVNCTEVPVAIHADQLTPTWRVYSTGSNVFQTRAGCLIGAEHVNNSYECDIPIGAGICASYQTQTNSPRRARSVASQSIIAYTMSLGAENSVAYSNNSIAIPTNFTISVTTEILPVSMTKTSVDCTMYICGDSTECSNLLLQYGSFCTQLNRALTGIAVEQDKNTQEVFAQVKQIYKTPPIKDFGGFNFSQILPDPSKPSKRSFIEDLLFNKVTLADAGFIKQYGYCLGDIAARDLICAQKFNGLTVLPPLLTDEMIAQYTSALLAGTITSGWTFCAGAALQIPFAMQMAYRFNGIGVTQNVLYENQKLIANQFNSAIGKIQDSLSSTASALGKLQDVVNQNAQALNTLVKQLSSNFGAISSVLNDILSRLDKVEAEVQIDRLITGRLQSLQTYVTQQLIRAAEIRASANLAATKMSECVCGQSKRVDFCGKGYHLMSFPQSAPHGVVFLHVTYVPAQEKNFTTAPAICHDGKAHFPREGVFVSNGTHWFVTQRNFYEPQIITTDNTFVSGNCDVVIGIVNNTVYDPLQPELDSGGGGSDIDPYKEFGSSYQLLNFLPLDFFPDLNALVDTATALYEEELTGREHCSPHHTAIRQALVCWDELTKLIAWMSSNITSEQVRTIIVNHVNDTWGLKVRQSLWFHLSCLTFGQHTVQEFLVSFGVWIRTPAPYRPPNAPILSTLPEHTVIC

SEQ ID NO: 11220 - protein, 1301 aa, Artificial Sequence
  SARS-CoV-2/Belgium/VAG-03013/2020__EPI_ISL_415155 spike protein (1-1147)(G889C_L1034C) WhcAg construct
MFVFLVLLPLVSSQCVNLTTRTQLPPAYTNSFTRGVYYPDKVFRSSVLHSTQDLFLPFFSNVTWFHAIHVSGTNGTKRFDNPVLPFNDGVYFASTEKSNIIRGWIFGTTLDSKTQSLLIVNNATNVVIKVCEFQFCNDPFLGVYYHKNNKSWMESEFRVYSSANNCTFEYVSQPFLMDLEGKQGNFKNLREFVFKNIDGYFKIYSKHTPINLVRDLPQGFSALEPLVDLPIGINITRFQTLLALHRSYLTPGDSSSGWTAGAAAYYVGYLQPRTFLLKYNENGTITDAVDCALDPLSETKCTLKSFTVEKGIYQTSNFRVQPTESIVRFPNITNLCPFGEVFNATRFASVYAWNRKRISNCVADYSVLYNSASFSTFKCYGVSPTKLNDLCFTNVYADSFVIRGDEVRQIAPGQTGKIADYNYKLPDDFTGCVIAWNSNNLDSKVGGNYNYLYRLFRKSNLKPFERDISTEIYQAGSTPCNGVEGFNCYFPLQSYGFQPTNGVGYQPYRVVVLSFELLHAPATVCGPKKSTNLVKNKCVNFNFNGLTGTGVLTESNKKFLPFQQFGRDIADTTDAVRDPQTLEILDITPCSFGGVSVITPGTNTSNQVAVLYQGVNCTEVPVAIHADQLTPTWRVYSTGSNVFQTRAGCLIGAEHVNNSYECDIPIGAGICASYQTQTNSPRRARSVASQSIIAYTMSLGAENSVAYSNNSIAIPTNFTISVTTEILPVSMTKTSVDCTMYICGDSTECSNLLLQYGSFCTQLNRALTGIAVEQDKNTQEVFAQVKQIYKTPPIKDFGGFNFSQILPDPSKPSKRSFIEDLLFNKVTLADAGFIKQYGDCLGDIAARDLICAQKFNGLTVLPPLLTDEMIAQYTSALLAGTITSGWTFCAGAALQIPFAMQMAYRFNGIGVTQNVLYENQKLIANQFNSAIGKIQDSLSSTATALGKLQDVVNQNAQALNTLVKQLSSNFGAISSVLNDILSRLDKVEAEVQIDRLITGRLQSLQTYVTQQLIRAAEIRASANLAATKMSECVCGQSKRVDFCGKGYHLMSFPQSAPHGVVFLHVTYVPAQEKNFTTAPAICHDGKAHFPREGVFVSNGTHWFVTQRNFYEPQIITTDNTFVSGNCDVVIGIVNNTVYDPLQPELDSGGGGSDIDPYKEFGSSYQLLNFLPLDFFPDLNALVDTATALYEEELTGREHCSPHHTAIRQALVCWDELTKLIAWMSSNITSEQVRTIIVNHVNDTWGLKVRQSLWFHLSCLTFGQHTVQEFLVSFGVWIRTPAPYRPPNAPILSTLPEHTVIC

SEQ ID NO: 11221 - protein, 1301 aa, Artificial Sequence
  SARS-CoV-2/Belgium/BC-03016/2020__EPI_ISL_415157 spike protein (1-1147)(G889C_L1034C) WhcAg construct
MFVFLVLLPLVSSQCVNLTTRTQLPPAYTNSFTRGVYYPDKVFRSSVLHSTQDLFLPFFSNVTWFHAIHVSGTNGTKRFDNPVLPFNDGVYFASTEKSNIIRGWIFGTTLDSKTQSLLIVNNATNVVIKVCEFQFCNDPFLGVYYHKNNKSWMESEFRVYSSANNCTFEYVSQPFLMDLEGKQGNFKNLREFVFKNIDGYFKIYSKHTPINLVRDLPQGFSALEPLVDLPIGINITRFQTLLALHRSYLTPGDSSSGWTAGAAAYYVGYLQPRTFLLKYNENGTITDAVDCALDPLSETKCTLKSFTVEKGIYQTSNFRVQPTESIVRFPNITNLCPFGEVFNATRFASVYAWNRKRISNCVADYSVLYNSASFSTFKCYGVSPTKLNDLCFTNVYADSFVIRGDEVRQIAPGQTGKIADYNYKLPDDFTGCVIAWNSNNLDSKVGGNYNYLYRLFRKSNLKPFERDISTEIYQAGSTPCNGVEGFNCYFPLQSYGFQPTNGVGYQPYRVVVLSFELLHAPATVCGPKKSTNLVKNKCVNFNFNGLTGTGVLTESNKKFLPFQQFGRDIADTTDAVRDPQTLEILDITPCSFGGVSVITPGTNTSNQVAVLYQGVNCTEVPVAIHADQLTPTWRVYSTGSNVFQTRAGCLIGAEHVNNSYECDIPIGAGICASYQTQTNSPRRARSVASQSIIAYTMSLGAENSVAYSNNSIAIPTNFTISVTTEILPVSMTKTSVDCTMYICGDSTECSNLLLQYGSFCTQLNRALTGIAVEQDKNTQEVFAQVKQIYKTPPIKDFGGFNFSQILPDPSKPSKRSFIEDLLFNKVTLADAGFIKQYGDCLGDIAARDLICAQKFNGLTVLPPLLTDEMIAQYTSALLAGTITSGWTFCAGAALQIPFAMQMAYRFNGIGVTQNVLYENQKLIANQFNSAIGKIQDSLSSTAPALGKLQDVVNQNAQALNTLVKQLSSNFGAISSVLNDILSRLDKVEAEVQIDRLITGRLQSLQTYVTQQLIRAAEIRASANLAATKMSECVCGQSKRVDFCGKGYHLMSFPQSAPHGVVFLHVTYVPAQEKNFTTAPAICHDGKAHFPREGVFVSNGTHWFVTQRNFYEPQIITTDNTFVSGNCDVVIGIVNNTVYDPLQPELDSGGGGSDIDPYKEFGSSYQLLNFLPLDFFPDLNALVDTATALYEEELTGREHCSPHHTAIRQALVCWDELTKLIAWMSSNITSEQVRTIIVNHVNDTWGLKVRQSLWFHLSCLTFGQHTVQEFLVSFGVWIRTPAPYRPPNAPILSTLPEHTVIC

SEQ ID NO: 11222 - protein, 1301 aa, Artificial Sequence
  SARS-CoV-2/Germany/BavPat3/2020__EPI_ISL_414521 spike protein (1-1147)(G889C_L1034C) WhcAg construct
MFVFLVLLPLVSSQCVNLTTRTQLPPAYTNSFTRGVYYPDKVFRSSVLHSTQDLFLPFFSNVTWFHAIHVSGTNGTKRFDNPVLPFNDGVYFASTEKSNIIRGWIFGTTLDSKTQSLLIVNNATNVVIKVCEFQFCNDPFLGVYYHKNNKSWMESEFRVYSSANNCTFEYVSQPFLMDLEGKQGNFKNLREFVFKNIDGYFKIYSKHTPINLVRDLPQGFSALEPLVDLPIGINITRFQTLLALHRSYLTPGDSSSGWTAGAAAYYVGYLQPRTFLLKYNENGTITDAVDCALDPLSETKCTLKSFTVEKGIYQTSNFRVQPTESIVRFPNITNLCPFGEVFNATRFASVYAWNRKRISNCVADYSVLYNSASFSTFKCYGVSPTKLNDLCFTNVYADSFVIRGDEVRQIAPGQTGKIADYNYKLPDDFTGCVIAWNSNNLDSKVGGNYNYLYRLFRKSNLKPFERDISTEIYQAGSTPCNGVEGFNCYFPLQSYGFQPTNGVGYQPYRVVVLSFELLHAPATVCGPKKSTNLVKNKCVNFNFNGLTGTGVLTESNKKFLPFQQFGRDIADTTDAVRDPQTLEILDITPCSFGGVSVITPGTNTSNQVAVLYQDVNCTEVPVAIHADQLTPTWRVYSTGSNVFQTRAGCLIGAEHVNNSYECDIPIGAGICASYQTQTNSPRRARSVASQSIIAYTMSLGAENSVAYSNNSIAIPTNFTISVTTEILPVSMTKTSVDCTMYICGDSTECSNLLLQYGSFCTQLNRALTGIAVEQDKNTQQVFAQVKQIYKTPPIKDFGGFNFSQILPDPSKPSKRSFIEDLLFNKVTLADAGFIKQYGDCLGDIAARDLICAQKFNGLTVLPPLLTDEMIAQYTSALLAGTITSGWTFCAGAALQIPFAMQMAYRFNGIGVTQNVLYENQKLIANQFNSAIGKIQDSLSSTASALGKLQDVVNQNAQALNTLVKQLSSNFGAISSVLNDILSRLDKVEAEVQIDRLITGRLQSLQTYVTQQLIRAAEIRASANLAATKMSECVCGQSKRVDFCGKGYHLMSFPQSAPHGVVFLHVTYVPAQEKNFTTAPAICHDGKAHFPREGVFVSNGTHWFVTQRNFYEPQIITTDNTFVSGNCDVVIGIVNNTVYDPLQPELDSGGGGSDIDPYKEFGSSYQLLNFLPLDFFPDLNALVDTATALYEEELTGREHCSPHHTAIRQALVCWDELTKLIAWMSSNITSEQVRTIIVNHVNDTWGLKVRQSLWFHLSCLTFGQHTVQEFLVSFGVWIRTPAPYRPPNAPILSTLPEHTVIC

SEQ ID NO: 11223 - protein, 1301 aa, Artificial Sequence
  SARS-CoV-2/France/HF1805/2020__EPI_ISL_414628 spike protein (1-1147)(G889C_L1034C) WhcAg construct
MFVFLVLLPLVSSQCVNLTTRTQLPPAYTNSFTRGVYYPDKVFRSSVLHSTQDLFLPFFSNVTWFHAIHVSGTNGTKRFDNPVLPFNDGVYFASTEKSNIIRGWIFGTTLDSKTQSLLIVNNATNVVIKVCEFQFCNDPFLGVYYHKNNKSWMESEFRVYSSANNCTFEYVSQPFLMDLEGKQGNFKNLREFVFKNIDGYFKIYSKHTPINLVRDLPQGFSALEPLVDLPIGINITRFQTLLALHRSYLTPGDSSSGWTAGAAAYYVGYLQPRTFLLKYNENGTITDAVDCALDPLSETKCTLKSFTVEKGIYQTSNFRVQPTESIVRFPNITNLCPFGEVFNATRFASVYAWNRKRISNCVADYSVLYNSASFSTFKCYGVSPTKLNDLCFTNVYADSFVIRGDEVRQIAPGQTGKIADYNYKLPDDFTGCVIAWNSNNLDSKVGGNYNYLYRLFRKSNLKPFERDISTEIYQAGSTPCNGVEGFNCYFPLQSYGFQPTNGVGYQPYRVVVLSFELLHAPATVCGPKKSTNLVKNKCVNFNFNGLTGTGVLTESNKKFLPFQQFGRDIADTTDAVRDPQTLEILDITPCSFGGVSVITPGTNTSNQVAVLYQGVNCTEVPVAIHADQLTPTWRVYSTGSNVFQTRAGCLIGAEHVNNSYECDIPIGAGICASYQTQTNSPRRARSVASQSIIAYTMSLGAENSVAYSNNSIAIPTNFTISVTTEILPVSMTKTSVDCTMYICGDSTECSNLLLQYGSFCTQLNRALTGIAVEQDKNTQEVFAQVKQIYKTPPIKDFGGFNFSQILPDPSKPSKRSFIEDLLFNKVTLADAGFIKQYGDCLGDIAARDLICAQKFNGLTVLPPLLTDEMIAQYTSALLAGTITSGWTFCAGAALQIPFAMQMAYRFNGIGVTQNVLYENQKLIANQFNSAIGKIQDSLSSTASALGKLQDVVNQNAQALNTLVKQLSSNFGAISSVLNDILSRLDKVEAEVQIDRLITGRLQSLQTYVTQQLIRAAEIRASANLAATKMSECVCGQSKRVDFCGKGYHLMSFPQSAPHGVVFLHVTYVPAQEKNFTTAPAICHDGKAHFPREGVFVSNGTHWFVTQRNFYEPQIITTDNTFVSGNCDVVIGVVNNTVYDPLQPELDSGGGGSDIDPYKEFGSSYQLLNFLPLDFFPDLNALVDTATALYEEELTGREHCSPHHTAIRQALVCWDELTKLIAWMSSNITSEQVRTIIVNHVNDTWGLKVRQSLWFHLSCLTFGQHTVQEFLVSFGVWIRTPAPYRPPNAPILSTLPEHTVIC

SEQ ID NO: 11224 - protein, 1301 aa, Artificial Sequence
  SARS-CoV-2/Netherlands/ZuidHolland_9/2020__EPI_ISL_414445 spike protein (1-1147)(G889C_L1034C) WhcAg construct
MFVFLVLLPLVSSQCVNLTTRTQLPPAYTNSFTRGVYYPDKVFRSSVLHSTQDLFLPFFSNVTWFHAIHVSGTNGTKRFDNPVLPFNDGVYFASTEKSNIIRGWIFGTTLDSKTQSLLIVNNATNVVIKVCEFQFCNDPFLGVYYHKNNKSWMESEFRVYSSANNCTFEYVSQPFLMDLEGKQGNFKNLREFVFKNIDGYFKIYSKHTPINLVRDLPQGFSALEPLVDLPIGINITRFQTLLALHRSYLTPGDSSSGWTAGAAAYYVGYLQPRTFLLKYNENGTITDAVDCALDPLSETKCTLKSFTVEKGIYQTSNFRVQPTESIVRFPNITNLCPFGEVFNATRFASVYAWNRKRISNCVADYSVLYNSASFSTFKCYGVSPTKLNDLCFTNVYADSFVIRGDEVRQIAPGQTGKIADYNYKLPDDFTGCVIAWNSNNLDSKVGGNYNYLYRLFRKSNLKPFERDISTEIYQAGSTPCNGVEGFNCYFPLQSYGFQPTNGVGYQPYRVVVLSFELLHAPATVCGPKKSTNLVKNKCVNFNFNGLTGTGVLTESNKKFLPFQQFGRDIADTTDAVRDPQTLEILDITPCSFGGVSVITPGTNTSNQVAVLYQGVNCTEVPVAIHADQLTPTWRVYSTGSNVFQTRAGCLIGAEHVNNSYECDIPIGAGICASYQTQTNSPRRARSVASQSIIAYTMSLGAENSVAYSNNSIAIPTNFTISVTTEILPVSMTKTSVDCTMYICGDSTECSNLLLQYGSFCTQLNRALTGIAVEQDKNTQEVFAQVKQIYKTPPIKDFGGFNFSQILPDPSKPSKRSFIEDLLFNKVTLADAGFIKQYGDCLGDIAARDLICVQKFNGLTVLPPLLTDEMIAQYTSALLAGTITSGWTFCAGAALQIPFAMQMAYRFNGIGVTQNVLYENQKLIANQFNSAIGKIQDSLSSTASALGKLQDVVNQNAQALNTLVKQLSSNFGAISSVLNDILSRLDKVEAEVQIDRLITGRLQSLQTYVTQQLIRAAEIRASANLAATKMSECVCGQSKRVDFCGKGYHLMSFPQSAPHGVVFLHVTYVPAQEKNFTTAPAICHDGKAHFPREGVFVSNGTHWFVTQRNFYEPQIITTDNTFVSGNCDVVIGIVNNTVYDPLQPELDSGGGGSDIDPYKEFGSSYQLLNFLPLDFFPDLNALVDTATALYEEELTGREHCSPHHTAIRQALVCWDELTKLIAWMSSNITSEQVRTIIVNHVNDTWGLKVRQSLWFHLSCLTFGQHTVQEFLVSFGVWIRTPAPYRPPNAPILSTLPEHTVIC

SEQ ID NO: 11225 - protein, 1301 aa, Artificial Sequence
  SARS-CoV-2/Finland/FIN03032020A/2020__EPI_ISL_413602 spike protein (1-1147)(G889C_L1034C) WhcAg construct
MFVFLVLLPLVSSQCVNLTTRTQLPPAYTNSFTRGVYYPDKVFRSSVLHSTQDLFLPFFSNVTWFHAIHVSGTNGTKRFDNPVLPFNDGVYFASTEKSNIIRGWIFGTTLDSKTQSLLIVNNATNVVIKVCEFQFCNDPFLGVYYHKNNKSWMESEFRVYSSANNCTFEYVSQPFLMDLEGKQGNFKNLREFVFKNIDGYFKIYSKHTPINLVRDLPQGFSALEPLVDLPIGINITRFQTLLALHRSYLTPGDSSSGWTAGAAAYYVGYLQPRTFLLKYNENGTITDAVDCALDPLSETKCTLKSFTVEKGIYQTSNFRVQPTESIVRFPNITNLCPFGEVFNATRFASVYAWNRKRISNCVADYSVLYNSASFSTFKCYGVSPTKLNDLCFTNVYADSFVIRGDEVRQIAPGQTGKIADYNYKLPDDFTGCVISWNSNNLDSKVGGNYNYLYRLFRKSNLKPFERDISTEIYQAGSTPCNGVEGFNCYFPLQSYGFQPTNGVGYQPYRVVVLSFELLHAPATVCGPKKSTNLVKNKCVNFNFNGLTGTGVLTESNKKFLPFQQFGRDIADTTDAVRDPQTLEILDITPCSFGGVSVITPGTNTSNQVAVLYQGVNCTEVPVAIHADQLTPTWRVYSTGSNVFQTRAGCLIGAEHVNNSYECDIPIGAGICASYQTQTNSPRRARSVASQSIIAYTMSLGAENSVAYSNNSIAIPTNFTISVTTEILPVSMTKTSVDCTMYICGDSTECSNLLLQYGSFCTQLNRALTGIAVEQDKNTQEVFAQVKQIYKTPPIKDFGGFNFSQILPDPSKPSKRSFIEDLLFNKVTLADAGFIKQYGDCLGDIAARDLICAQKFNGLTVLPPLLTDEMIAQYTSALLAGTITSGWTFCAGAALQIPFAMQMAYRFNGIGVTQNVLYENQKLIANQFNSAIGKIQDSLSSTASALGKLQDVVNQNAQALNTLVKQLSSNFGAISSVLNDILSRLDKVEAEVQIDRLITGRLQSLQTYVTQQLIRAAEIRASANLAATKMSECVCGQSKRVDFCGKGYHLMSFPQSAPHGVVFLHVTYVPAQEKNFTTAPAICHDGKAHFPREGVFVSNGTHWFVTQRNFYEPQIITTDNTFVSGNCDVVIGIVNNTVYDPLQPELDSGGGGSDIDPYKEFGSSYQLLNFLPLDFFPDLNALVDTATALYEEELTGREHCSPHHTAIRQALVCWDELTKLIAWMSSNITSEQVRTIIVNHVNDTWGLKVRQSLWFHLSCLTFGQHTVQEFLVSFGVWIRTPAPYRPPNAPILSTLPEHTVIC

SEQ ID NO: 11226 - protein, 1301 aa, Artificial Sequence
  SARS-CoV-2/France/GE1977/2020__EPI_ISL_414632 spike protein (1-1147)(G889C_L1034C) WhcAg construct
MFVFLVLLPLVSSQCVNLTTRTQLPPAYTNSFTRGVYYPDKVFRSSVLHSTQDLFLPFFSNVTWFHAIHVSGTNGTKRFDNPVLPFNDGVYFASTEKSNIIRGWIFGTTLDSKTQSLLIVNNATNVVIKVCEFQFCNDPFLGVYYHKNNKSWMESEFRVYSSANNCTFEYVSQPFLMDLEGKQGNFKNLREFVFKNIDGYFKIYSKHTPINLVRDLPQGFSALEPLVDLPIGINITRFQTLLALHRSYLTPGDSSSGWTAGAAAYYVGYLQPRTFLLKYNENGTITDAVDCALDPLSETKCTLKSFTVEKGIYQTSNFRVQPTESIVRFPNITNLCPFGEVFNATRFASVYAWNRKRISNCVADYSVLYNSASFSTFKCYGVSPTKLNDLCFTNVYADSFVIRGDEVRQIAPGQTGKIADYNYKLPDDFTGCVIAWNSNNLDSKVGGNYNYLYRLFRKSNLKPFERDISTEIYQAGSTPCNGVEGFNCYFPLQSYGFQPTNGVGYQPYRVVVLSFELLHAPATVCGPKKSTNLVKNKCVNFNFNGLTGTGVLTESNKKFLPFQQFGRDIADTTDAVRDPQTLEILDITPCSFGGVSVITPGTNTSNQVAVLYQGVNCTEVPVAIHADQLTPTWRVYSTGSNVFQTRAGCLIGAEHVNNSYECDIPIGAGICASYQTQTNSPRRARSVASQSIIAYTMSLGAENSVAYSNNSIAIPTNFTISVTTEILPVSMTKTSVDCTMYICGDSTECSNLLLQYGSFCTQLNRALTGIAVEQDKNTQEVFAQVKQIYKTPPIKDFGGFNFSQILPDPSKPSKRSFIEDLLFNKVTLADAGFIKQYGDCLGDIAARDLICAQKFNGLTVLPPLLTDEMIAQYTSALLAGTITSGWTFCAGAALQIPFAMQMAYRFNGIGVTQNVLYENQKLIANQFNSAIGKIQDSLFSTASALGKLQDVVNQNAQALNTLVKQLSSNFGAISSVLNDILSRLDKVEAEVQIDRLITGRLQSLQTYVTQQLIRAAEIRASANLAATKMSECVCGQSKRVDFCGKGYHLMSFPQSAPHGVVFLHVTYVPAQEKNFTTAPAICHDGKAHFPREGVFVSNGTHWFVTQRNFYEPQIITTDNTFVSGNCDVVIGIVNNTVYDPLQPELDSGGGGSDIDPYKEFGSSYQLLNFLPLDFFPDLNALVDTATALYEEELTGREHCSPHHTAIRQALVCWDELTKLIAWMSSNITSEQVRTIIVNHVNDTWGLKVRQSLWFHLSCLTFGQHTVQEFLVSFGVWIRTPAPYRPPNAPILSTLPEHTVIC

SEQ ID NO: 11227 - protein, 1301 aa, Artificial Sequence
  SARS-CoV-2/Finland/FIN-313/2020__EPI_ISL_414641 spike protein (1-1147)(G889C_L1034C) WhcAg construct
MFVFLVLLPLVSSQCVNLTTRTQLPPAYTNSFTRGVYYPDKVFRSSVLHSTQDLFLPFFSNVTWFHAIHVSGTNGTKRFDNPVLPFNDGVYFASTEKSNIIRGWIFGTTLDSKTQSLLIVNNATNVVIKVCEFQFCNDPFLGVYYHKNNKSWMESEFRVYSSANNCTFEYVSQPFLMDLEGKQGNFKNLREFVFKNIDGYFKIYSKHTPINLVRDLPQGFSALEPLVDLPIGINITRFKTLLALHRSYLTPGDSSSGWTAGAAAYYVGYLQPRTFLLKYNENGTITDAVDCALDPLSETKCTLKSFTVEKGIYQTSNFRVQPTESIVRFPNITNLCPFGEVFNATRFASVYAWNRKRISNCVADYSVLYNSASFSTFKCYGVSPTKLNDLCFTNVYADSFVIRGDEVRQIAPGQTGKIADYNYKLPDDFTGCVIAWNSNNLDSKVGGNYNYLYRLFRKSNLKPFERDISTEIYQAGSTPCNGVEGFNCYFPLQSYGFQPTNGVGYQPYRVVVLSFELLHAPATVCGPKKSTNLVKNKCVNFNFNGLTGTGVLTESNKKFLPFQQFGRDIADTTDAVRDPQTLEILDITPCSFGGVSVITPGTNTSNQVAVLYQGVNCTEVPVAIHADQLTPTWRVYSTGSNVFQTRAGCLIGAEHVNNSYECDIPIGAGICASYQTQTNSPRRARSVASQSIIAYTMSLGAENSVAYSNNSIAIPTNFTISVTTEILPVSMTKTSVDCTMYICGDSTECSNLLLQYGSFCTQLNRALTGIAVEQDKNTQEVFAQVKQIYKTPPIKDFGGFNFSQILPDPSKPSKRSFIEDLLFNKVTLADAGFIKQYGDCLGDIAARDLICAQKFNGLTVLPPLLTDEMIAQYTSALLAGTITSGWTFCAGAALQIPFAMQMAYRFNGIGVTQNVLYENQKLIANQFNSAIGKIQDSLSSTASALGKLQDVVNQNAQALNTLVKQLSSNFGAISSVLNDILSRLDKVEAEVQIDRLITGRLQSLQTYVTQQLIRAAEIRASANLAATKMSECVCGQSKRVDFCGKGYHLMSFPQSAPHGVVFLHVTYVPAQEKNFTTAPAICHDGKAHFPREGVFVSNGTHWFVTQRNFYEPQIITTDNTFVSGNCDVVIGIVNNTVYDPLQPELDSGGGGSDIDPYKEFGSSYQLLNFLPLDFFPDLNALVDTATALYEEELTGREHCSPHHTAIRQALVCWDELTKLIAWMSSNITSEQVRTIIVNHVNDTWGLKVRQSLWFHLSCLTFGQHTVQEFLVSFGVWIRTPAPYRPPNAPILSTLPEHTVIC

SEQ ID NO: 11228 - protein, 1301 aa, Artificial Sequence
  SARS-CoV-2/Netherlands/ZuidHolland_2/2020__EPI_ISL_414556 spike protein (1-1147)(G889C_L1034C) WhcAg construct
MFVFLVLLPLVSSQCVNLTTRTQLPPAYTNSFTRGVYYPDKVFRSSVLHSTQDLFLPFFSNVTWFHAIHVSGTNGTKRFDNPVLPFNDGVYFASTEKSNIIRGWIFGTTLDSKTQSLLIVNNATNVVIKVCEFQFCNDPFLGVYYHKNNKSWMESEFRVYSSANNCTFEYVSQPFLMDLEGKQGNFKNLREFVFKNIDGYFKIYSKHTPINLVRDLPQGFSALEPLVDLPIGINITRFQTLLALHRSYLTPGDSSSGWTAGAAAYYVGYLQPRTFLLKYNENGTITDAVDCALDPLSETKCTLKSFTVEKGIYQTSNFRVQPTESIVRFPNITNLCPFGEVFNATRFASVYAWNRKRISNCVADYSVLYNSASFSTFKCYGVSPTKLNDLCFTNVYADSFVIRGDEVRQIAPGQTGKIADYNYKLPDDFTGCVIAWNSNNLDSKVGGNYNYLYRLFRKSNLKPFERDISTEIYQAGSTPCNGVEGFNCYFPLQSYGFQPTNGVGYQPYRVVVLSFELLHAPATVCGPKKSTNLVKNKCVNFNFNGLTGTGVLTESNKKFLPFQQFGRDIADTTDAVRDPQTLEILDITPCSFGGVSVITPGTNTSNQVAVLYQGVNCTEVPVAIHADQLTPTWRVYSTGSNVFQTRAGCLIGAEHVNNSYECDIPIGAGICASYQTQTNSPRRARSVASQSIIAYTMSLGAENSVAYSNNSIAIPTNFTISVTTEILPVSMTKTSVDCTMYICGDSTECSNLLLQYGSFCTQLNRALTGIALEQDKNTQEVFAQVKQIYKTPPIKDFGGFNFSQILPDPSKPSKRSFIEDLLFNKVTLADAGFIKQYGDCLGDIAARDLICAQKFNGLTVLPPLLTDEMIAQYTSALLAGTITSGWTFCAGAALQIPFAMQMAYRFNGIGVTQNVLYENQKLIANQFNSAIGKIQDSLSSTASALGKLQDVVNQNAQALNTLVKQLSSNFGAISSVLNDILSRLDKVEAEVQIDRLITGRLQSLQTYVTQQLIRAAEIRASANLAATKMSECVCGQSKRVDFCGKGYHLMSFPQSAPHGVVFLHVTYVPAQEKNFTTAPAICHDGKAHFPREGVFVSNGTHWFVTQRNFYEPQIITTDNTFVSGNCDVVIGIVNNTVYDPLQPELDSGGGGSDIDPYKEFGSSYQLLNFLPLDFFPDLNALVDTATALYEEELTGREHCSPHHTAIRQALVCWDELTKLIAWMSSNITSEQVRTIIVNHVNDTWGLKVRQSLWFHLSCLTFGQHTVQEFLVSFGVWIRTPAPYRPPNAPILSTLPEHTVIC

SEQ ID NO: 11229 - protein, 1301 aa, Artificial Sequence
  SARS-CoV-2/USA/WA-UW31/2020__EPI_ISL_414618 spike protein (1-1147)(G889C_L1034C) WhcAg construct
MFVFLVLLPLVSSQCVNLTTRTQLPPAYTNSFTRGVYYPDKVFRSSVLHSTQDLFLPFFSNVTWFHAIHVSGTNGTKRFDNPVLPFNDGVYFASTEKSNIIRGWIFGTTLDSKTQSLLIVNNATNVVIKVCEFQFCNDPFLGVYYHKNNKSWMESEFRVYSSANNCTFEYVSQPFLMDLEGKQGNFKNLREFVFKNIDGYFKIYSKHTPINLVRDLPQGFSALEPLVDLPIGINITRFQTLLALHRSYLTPGDSSSGWTAGAAAYYVGYLQPRTFLLKYNENGTITDAVDCALDPLSETKCTLKSFTVEKGIYQTSNFRVQPTESIVRFPNITNLCPFGEVFNATRFASVYAWNRKRISNCVADYSVLYNSASFSTFKCYGVSPTKLNDLCFTNVYADSFVIRGDEVRQIAPGQTGKIADYNYKLPDDFTGCVIAWNSNNLDSKVGGNYNYLYRLFRKSNLKPFERDISTEIYQAGSTPCNGAEGFNCYFPLQSYGFQPTNGVGYQPYRVVVLSFELLHAPATVCGPKKSTNLVKNKCVNFNFNGLTGTGVLTESNKKFLPFQQFGRDIADTTDAVRDPQTLEILDITPCSFGGVSVITPGTNTSNQVAVLYQDVNCTEVPVAIHADQLTPTWRVYSTGSNVFQTRAGCLIGAEHVNNSYECDIPIGAGICASYQTQTNSPRRARSVASQSIIAYTMSLGAENSVAYSNNSIAIPTNFTISVTTEILPVSMTKTSVDCTMYICGDSTECSNLLLQYGSFCTQLNRALTGIAVEQDKNTQEVFAQVKQIYKTPPIKDFGGFNFSQILPDPSKPSKRSFIEDLLFNKVTLADAGFIKQYGDCLGDIAARDLICAQKFNGLTVLPPLLTDEMIAQYTSALLAGTITSGWTFCAGAALQIPFAMQMAYRFNGIGVTQNVLYENQKLIANQFNSAIGKIQDSLSSTASALGKLQDVVNQNAQALNTLVKQLSSNFGAISSVLNDILSRLDKVEAEVQIDRLITGRLQSLQTYVTQQLIRAAEIRASANLAATKMSECVCGQSKRVDFCGKGYHLMSFPQSAPHGVVFLHVTYVPAQEKNFTTAPAICHDGKAHFPREGVFVSNGTHWFVTQRNFYEPQIITTDNTFVSGNCDVVIGIVNNTVYDPLQPELDSGGGGSDIDPYKEFGSSYQLLNFLPLDFFPDLNALVDTATALYEEELTGREHCSPHHTAIRQALVCWDELTKLIAWMSSNITSEQVRTIIVNHVNDTWGLKVRQSLWFHLSCLTFGQHTVQEFLVSFGVWIRTPAPYRPPNAPILSTLPEHTVIC

SEQ ID NO: 11230 - protein, 1301 aa, Artificial Sequence
  SARS-CoV-2/South Korea/SNU01/2020__EPI_ISL_411929 spike protein (1-1147)(G889C_L1034C) WhcAg construct
MFVFLVLLPLVSSQCVNLTTRTQLPPAYTNSFTRGVYYPDKVFRSSVLHSTQDLFLPFFSNVTWFHAIHVSGTNGTKRFDNPVLPFNDGVYFASTEKSNIIRGWIFGTTLDSKTQSLLIVNNATNVVIKVCEFQFCNDPFLGVYYHKNNKSWMESEFRVYSSANNCTFEYVSQPFLMDLEGKQGNFKNLREFVFKNIDGYFKIYSKHTPINLVRDLPQGFWALEPLVDLPIGINITRFQTLLALHRSYLTPGDSSSGWTAGAAAYYVGYLQPRTFLLKYNENGTITDAVDCALDPLSETKCTLKSFTVEKGIYQTSNFRVQPTESIVRFPNITNLCPFGEVFNATRFASVYAWNRKRISNCVADYSVLYNSASFSTFKCYGVSPTKLNDLCFTNVYADSFVIRGDEVRQIAPGQTGKIADYNYKLPDDFTGCVIAWNSNNLDSKVGGNYNYLYRLFRKSNLKPFERDISTEIYQAGSTPCNGVEGFNCYFPLQSYGFQPTNGVGYQPYRVVVLSFELLHAPATVCGPKKSTNLVKNKCVNFNFNGLTGTGVLTESNKKFLPFQQFGRDIADTTDAVRDPQTLEILDITPCSFGGVSVITPGTNTSNQVAVLYQDVNCTEVPVAIHADQLTPTWRVYSTGSNVFQTRAGCLIGAEHVNNSYECDIPIGAGICASYQTQTNSPRRARSVASQSIIAYTMSLGAENSVAYSNNSIAIPTNFTISVTTEILPVSMTKTSVDCTMYICGDSTECSNLLLQYGSFCTQLNRALTGIAVEQDKNTQEVFAQVKQIYKTPPIKDFGGFNFSQILPDPSKPSKRSFIEDLLFNKVTLADAGFIKQYGDCLGDIAARDLICAQKFNGLTVLPPLLTDEMIAQYTSALLAGTITSGWTFCAGAALQIPFAMQMAYRFNGIGVTQNVLYENQKLIANQFNSAIGKIQDSLSSTASALGKLQDVVNQNAQALNTLVKQLSSNFGAISSVLNDILSRLDKVEAEVQIDRLITGRLQSLQTYVTQQLIRAAEIRASANLAATKMSECVCGQSKRVDFCGKGYHLMSFPQSAPHGVVFLHVTYVPAQEKNFTTAPAICHDGKAHFPREGVFVSNGTHWFVTQRNFYEPQIITTDNTFVSGNCDVVIGIVNNTVYDPLQPELDSGGGGSDIDPYKEFGSSYQLLNFLPLDFFPDLNALVDTATALYEEELTGREHCSPHHTAIRQALVCWDELTKLIAWMSSNITSEQVRTIIVNHVNDTWGLKVRQSLWFHLSCLTFGQHTVQEFLVSFGVWIRTPAPYRPPNAPILSTLPEHTVIC

SEQ ID NO: 11231 - protein, 1301 aa, Artificial Sequence
  SARS-CoV-2/China/WF0004/2020__EPI_ISL_413694 spike protein (1-1147)(G889C_L1034C) WhcAg construct
MFVFLVLLPLVSSQCVNLTTRTQLPPAYTNSFTRGVYYPDKVFRSSVLHSTQDLFLPFFSNVTWFHAIHVSGTNGTKRFDNPVLPFNDGVYFASTEKSNIIRGWIFGTTLDSKTQSLLIVNNATNVVIKVCEFQFCNDPFLGVYYHKNNKSWTESEFRVYSSANNCTFEYVSQPFLMDLEGKQGNFKNLREFVFKNIDGYFKIYSKHTPINLVRDLPQGFSALEPLVDLPIGINITRFQTLLALHRSYLTPGDSSSGWTAGAAAYYVGYLQPRTFLLKYNENGTITDAVDCALDPLSETKCTLKSFTVEKGIYQTSNFRVQPTESIVRFPNITNLCPFGEVFNATRFASVYAWNRKRISNCVADYSVLYNSASFSTFKCYGVSPTKLNDLCFTNVYADSFVIRGDEVRQIAPGQTGKIADYNYKLPDDFTGCVIAWNSNNLDSKVGGNYNYLYRLFRKSNLKPFERDISTEIYQAGSTPCNGVEGFNCYFPLQSYGFQPTNGVGYQPYRVVVLSFELLHAPATVCGPKKSTNLVKNKCVNFNFNGLTGTGVLTESNKKFLPFQQFGRDIADTTDAVRDPQTLEILDITPCSFGGVSVITPGTNTSNQVAVLYQDVNCTEVPVAIHADQLTPTWRVYSTGSNVFQTRAGCLIGAEHVNNSYECDIPIGAGICASYQTQTNSPRRARSVASQSIIAYTMSLGAENSVAYSNNSIAIPTNFTISVTTEILPVSMTKTSVDCTMYICGDSTECSNLLLQYGSFCTQLNRALTGIAVEQDKNTQEVFAQVKQIYKTPPIKDFGGFNFSQILPDPSKPSKRSFIEDLLFNKVTLADAGFIKQYGDCLGDIAARDLICAQKFNGLTVLPPLLTDEMIAQYTSALLAGTITSGWTFCAGAALQIPFAMQMAYRFNGIGVTQNVLYENQKLIANQFNSAIGKIQDSLSSTASALGKLQDVVNQNAQALNTLVKQLSSNFGAISSVLNDILSRLDKVEAEVQIDRLITGRLQSLQTYVTQQLIRAAEIRASANLAATKMSECVCGQSKRFDFCGKGYHLMSFPQSAPHGVVFLHVTYVPAQEKNFTTAPAICHDGKAHFPREGVFVSNGTHWFVTQRNFYEPQIITTDNTFVSGNCDVVIGIVNNTVYDPLQPELDSGGGGSDIDPYKEFGSSYQLLNFLPLDFFPDLNALVDTATALYEEELTGREHCSPHHTAIRQALVCWDELTKLIAWMSSNITSEQVRTIIVNHVNDTWGLKVRQSLWFHLSCLTFGQHTVQEFLVSFGVWIRTPAPYRPPNAPILSTLPEHTVIC

SEQ ID NO: 11232 - protein, 1301 aa, Artificial Sequence
  SARS-CoV-2/China/WF0028/2020__EPI_ISL_413791 spike protein (1-1147)(G889C_L1034C) WhcAg construct
MFVFLVLLPLVSSQCVNLTTRTQLPPAYTNSFTRGVYYPDKVFRSSVLHSTQDLFLPFFSNVTWFHAIHVSGTNGTKRFDNPVLPFNDGVYFASTEKSNIIRGWIFGTTLDSKTQSLLIVNNATNVVIKVCEFQFCNDPFLGVYYHKNNKSWMESEFRVYSSANNCTFEYVSQPFLMDLEGKQGNFKNLREFVFKNIDGYFKIYSKHTPINLVRDLPQGFSALEPLVDLPIGINITRFQTLLALHRSYLTPGDSSSGWTAGAAAYYVGYLQPRTFLLKYNENGTITDAVDCALDPLSETKCTLKSFTVEKGIYQTSNFRVQPTESIVRFPNITNLCPFGEVFNATRFASVYAWNRKRISNCVADYSVLYNSASFSTFKCYGVSPTKLNDLCFTNVYADSFVIRGDEVRQIAPGQTGKIADYNYKLPDDFTGCVIAWNSNNLDSKVGGNYNYLYRLFRKSNLKPFERDISTEIYQAGSTPCNGVEGFNCYFPLQSYGFQPTNGVGYQPYRVVVLSFELLHAPATVCGPKKSTNLVKNKCVNFNFNGLTGTGVLTESNKKFLPFQQFGRDIADTTDAVRDPQTLEILDITPCSFGGVSVITPGTNTSNQVAVLYQDVNCTEVPVAIHADQLTPTWRVYSTGSNVFQTRAGCLIGAEHVNNSYECDIPIGAGICASYQTQTNSPRRARSVASQSIIAYTMSLGAENSVAYSNNSIAIPTNFTISVTTEILPVSMTKTSVDCTMYICGDSTECSNLLLQYGSFCTQLNRALTGIAVEQDKNTQEVFAQVKQIYKTPPIKDFGGFNFSQILPDPSKPSKRSFIEDLLFNKVTLADAGFIKQYGDCLGDIAARDLICAQKFNGLTVLPPLLTDEMIAQYTSALLAGTITSGWTFCAGAALQIPFAMQMAYRFNGIGVTQNVLYENQKLIANQFNSAIGKIQDSLSSTASALGKLQDVVNQNAQALNTLVKQLSSNFGAISSVLNDILSRLDKVEAEVQIDRLITGRLQSLQTYVTQQLIRAAEIRASANLAATKMSECVCGQSKRVDFCGKGYHLMSFPQSAPHGVVFLHVTYVPAQEKNFTTAPAICHDGKAHFPREGVFVSNGTHWFVTQRNFYEPQIITTDNTFVSGNCDVVIGIVNNTVYDPLQPELESGGGGSDIDPYKEFGSSYQLLNFLPLDFFPDLNALVDTATALYEEELTGREHCSPHHTAIRQALVCWDELTKLIAWMSSNITSEQVRTIIVNHVNDTWGLKVRQSLWFHLSCLTFGQHTVQEFLVSFGVWIRTPAPYRPPNAPILSTLPEHTVIC

SEQ ID NO: 11233 - protein, 1301 aa, Artificial Sequence
  SARS-CoV-2/2019-nCoV/USA-CruiseA-18/2020__MT159716.1 spike protein (1-1147)(G889C_L1034C) WhcAg construct
MFVFLVLLPLVSSQCVNLTTRTQLPPAYTNSFTRGVYYPDKVFRSSVLHSTQDLFLPFFSNVTWFHAIHVSGTNGTKRFDNPVLPFNDGVYFASTEKSNIIRGWIFGTTLDSKTQSLLIVNNATNVVIKVCEFQFCNDPFLGVYYHKNNKSWMESELRVYSSANNCTFEYVSQPFLMDLEGKQGNFKNLREFVFKNIDGYFKIYSKHTPINLVRDLPQGFSALEPLVDLPIGINITRFQTLLALHRSYLTPGDSSSGWTAGAAAYYVGYLQPRTFLLKYNENGTITDAVDCALDPLSETKCTLKSFTVEKGIYQTSNFRVQPTESIVRFPNITNLCPFGEVFNATRFASVYAWNRKRISNCVADYSVLYNSASFSTFKCYGVSPTKLNDLCFTNVYADSFVIRGDEVRQIAPGQTGKIADYNYKLPDDFTGCVIAWNSNNLDSKVGGNYNYLYRLFRKSNLKPFERDISTEIYQAGSTPCNGVEGFNCYFPLQSYGFQPTNGVGYQPYRVVVLSFELLHAPATVCGPKKSTNLVKNKCVNFNFNGLTGTGVLTESNKKFLPFQQFGRDIADTTDAVRDPQTLEILDITPCSFGGVSVITPGTNTSNQVAVLYQDVNCTEVPVAIHADQLTPTWRVYSTGSNVFQTRAGCLIGAEHVNNSYECDIPIGAGICASYQTQTNSPRRARSVASQSIIAYTMSLGAENSVAYSNNSIAIPTNFTISVTTEILPVSMTKTSVDCTMYICGDSTECSNLLLQYGSFCTQLNRALTGIAVEQDKNTQEVFAQVKQIYKTPPIKDFGGFNFSQILPDPSKPSKRSFIEDLLFNKVTLADAGFIKQYGDCLGDIAARDLICAQKFNGLTVLPPLLTDEMIAQYTSALLAGTITSGWTFCAGAALQIPFAMQMAYRFNGIGVTQNVLYENQKLIANQFNSAIGKIQDSLSSTASALGKLQDVVNQNAQALNTLVKQLSSNFGAISSVLNDILSRLDKVEAEVQIDRLITGRLQSLQTYVTQQLIRAAEIRASANLAATKMSECVCGQSKRVDFCGKGYHLMSFPQSAPHGVVFLHVTYVPAQEKNFTTAPAICHDGKAHFPREGVFVSNGTHWFVTQRNFYEPQIITTDNTFVSGNCDVVIGIVNNTVYDPLQPELDSGGGGSDIDPYKEFGSSYQLLNFLPLDFFPDLNALVDTATALYEEELTGREHCSPHHTAIRQALVCWDELTKLIAWMSSNITSEQVRTIIVNHVNDTWGLKVRQSLWFHLSCLTFGQHTVQEFLVSFGVWIRTPAPYRPPNAPILSTLPEHTVIC

SEQ ID NO: 11234 - protein, 1301 aa, Artificial Sequence
  SARS-CoV-2/SARS-CoV-2/Yunnan-01/human/2020/CHN__MT049951.1 spike protein (1-1147)(G889C_L1034C) WhcAg construct
MFVFLVLLPLVSSQCVNLTTRTQLPPANTNSFTRGVYYPDKVFRSSVLHSTQDLFLPFFSNVTWFHAIHVSGTNGTKRFDNPVLPFNDGVYFASTEKSNIIRGWIFGTTLDSKTQSLLIVNNATNVVIKVCEFQFCNDPFLGVYYHKNNKSWMESEFRVYSSANNCTFEYVSQPFLMDLEGKQGNFKNLREFVFKNIDGYFKIYSKHTPINLVRDLPQGFSALEPLVDLPIGINITRFQTLLALHRSYLTPGDSSSGWTAGAAAYYVGYLQPRTFLLKYNENGTITDAVDCALDPLSETKCTLKSFTVEKGIYQTSNFRVQPTESIVRFPNITNLCPFGEVFNATRFASVYAWNRKRISNCVADYSVLYNSASFSTFKCYGVSPTKLNDLCFTNVYADSFVIRGDEVRQIAPGQTGKIADYNYKLPDDFTGCVIAWNSNNLDSKVGGNYNYLYRLFRKSNLKPFERDISTEIYQAGSTPCNGVEGFNCYFPLQSYGFQPTNGVGYQPYRVVVLSFELLHAPATVCGPKKSTNLVKNKCVNFNFNGLTGTGVLTESNKKFLPFQQFGRDIADTTDAVRDPQTLEILDITPCSFGGVSVITPGTNTSNQVAVLYQDVNCTEVPVAIHADQLTPTWRVYSTGSNVFQTRAGCLIGAEHVNNSYECDIPIGAGICASYQTQTNSPRRARSVASQSIIAYTMSLGAENSVAYSNNSIAIPTNFTISVTTEILPVSMTKTSVDCTMYICGDSTECSNLLLQYGSFCTQLNRALTGIAVEQDKNTQEVFAQVKQIYKTPPIKDFGGFNFSQILPDPSKPSKRSFIEDLLFNKVTLADAGFIKQYGDCLGDIAARDLICAQKFNGLTVLPPLLTDEMIAQYTSALLAGTITSGWTFCAGAALQIPFAMQMAYRFNGIGVTQNVLYENQKLIANQFNSAIGKIQDSLSSTASALGKLQDVVNQNAQALNTLVKQLSSNFGAISSVLNDILSRLDKVEAEVQIDRLITGRLQSLQTYVTQQLIRAAEIRASANLAATKMSECVCGQSKRVDFCGKGYHLMSFPQSAPHGVVFLHVTYVPAQEKNFTTAPAICHDGKAHFPREGVFVSNGTHWFVTQRNFYEPQIITTDNTFVSGNCDVVIGIVNNTVYDPLQPELDSGGGGSDIDPYKEFGSSYQLLNFLPLDFFPDLNALVDTATALYEEELTGREHCSPHHTAIRQALVCWDELTKLIAWMSSNITSEQVRTIIVNHVNDTWGLKVRQSLWFHLSCLTFGQHTVQEFLVSFGVWIRTPAPYRPPNAPILSTLPEHTVIC

SEQ ID NO: 11235 - protein, 1301 aa, Artificial Sequence
  SARS-CoV-2/USA/WA-UW292/2020__EPI_ISL_418077 spike protein (1-1147)(G889C_L1034C) WhcAg construct
MFVFLVLLPLVSSQCVNLTTRTQLPPAYTNSFTRGVYYPDKVFRSSVLHSTQDLFLPFFSNVTWFHAIHVSGTNGTKRFDNPVLPFNDGVYFASTEKSNIIRGWIFGTTLDSKTQSLLIVNNATNVVIKVCEFQFCNDPFLGVYYHKNNKSWMESEFRVYSSANNCTFEYVSQPFLMDLEGKQGNFKNLREFVFKNIDGYFKIYSKHTPINLVRDLPQGFSALEPLVDLPIGINITRFQTLLALHRSYLTPGDSSSGWTAGAAAYYVGYLQPRTFLLKYNENGTITDAVDCALDPLSETKCTLKSFTVEKGIYQTSNFRVQPTESIVRFPNITNLCPFGEVFNATRFASVYAWNRKRISNCVADYSVLYNSASFSTFKCYGVSPTKLNDLCFTNVYADSFVIRGDEVRQIAPGQTGKIADYNYKLPDDFTGCVIAWNSNNLDSKVGGNYNYLYRLFRKSNLKPFERDISTEIYQASSTPCNGVEGFNCYFPLQSYGFQPTNGVGYQPYRVVVLSFELLHAPATVCGPKKSTNLVKNKCVNFNFNGLTGTGVLTESNKKFLPFQQFGRDIADTTDAVRDPQTLEILDITPCSFGGVSVITPGTNTSNQVAVLYQDVNCTEVPVAIHADQLTPTWRVYSTGSNVFQTRAGCLIGAEHVNNSYECDIPIGAGICASYQTQTNSPRRARSVASQSIIAYTMSLGAENSVAYSNNSIAIPTNFTISVTTEILPVSMTKTSVDCTMYICGDSTECSNLLLQYGSFCTQLNRALTGIAVEQDKNTQEVFAQVKQIYKTPPIKDFGGFNFSQILPDPSKPSKRSFIEDLLFNKVTLADAGFIKQYGDCLGDIAARDLICAQKFNGLTVLPPLLTDEMIAQYTSALLAGTITSGWTFCAGAALQIPFAMQMAYRFNGIGVTQNVLYENQKLIANQFNSAIGKIQDSLSSTASALGKLQDVVNQNAQALNTLVKQLSSNFGAISSVLNDILSRLDKVEAEVQIDRLITGRLQSLQTYVTQQLIRAAEIRASANLAATKMSECVCGQSKRVDFCGKGYHLMSFPQSAPHGVVFLHVTYVPAQEKNFTTAPAICHDGKAHFPREGVFVSNGTHWFVTQRNFYEPQIITTDNTFVSGNCDVVIGIVNNTVYDPLQPELDSGGGGSDIDPYKEFGSSYQLLNFLPLDFFPDLNALVDTATALYEEELTGREHCSPHHTAIRQALVCWDELTKLIAWMSSNITSEQVRTIIVNHVNDTWGLKVRQSLWFHLSCLTFGQHTVQEFLVSFGVWIRTPAPYRPPNAPILSTLPEHTVIC

SEQ ID NO: 11236 - protein, 1301 aa, Artificial Sequence
  SARS-CoV-2/Iceland/192/2020__EPI_ISL_417819 spike protein (1-1147)(G889C_L1034C) WhcAg construct
MFVFFVLLPLVSSQCVNLTTRTQLPPAYTNSFTRGVYYPDKVFRSSVLHSTQDLFLPFFSNVTWFHAIHVSGTNGTKRFDNPVLPFNDGVYFASTEKSNIIRGWIFGTTLDSKTQSLLIVNNATNVVIKVCEFQFCNDPFLGVYYHKNNKSWMESEFRVYSSANNCTFEYVSQPFLMDLEGKQGNFKNLREFVFKNIDGYFKIYSKHTPINLVRDLPQGFSALEPLVDLPIGINITRFQTLLALHRSYLTPGDSSSGWTAGAAAYYVGYLQPRTFLLKYNENGTITDAVDCALDPLSETKCTLKSFTVEKGIYQTSNFRVQPTESIVRFPNITNLCPFGEVFNATRFASVYAWNRKRISNCVADYSVLYNSASFSTFKCYGVSPTKLNDLCFTNVYADSFVIRGDEVRQIAPGQTGKIADYNYKLPDDFTGCVIAWNSNNLDSKVGGNYNYLYRLFRKSNLKPFERDISTEIYQAGSTPCNGVEGFNCYFPLQSYGFQPTNGVGYQPYRVVVLSFELLHAPATVCGPKKSTNLVKNKCVNFNFNGLTGTGVLTESNKKFLPFQQFGRDIADTTDAVRDPQTLEILDITPCSFGGVSVITPGTNTSNQVAVLYQGVNCTEVPVAIHADQLTPTWRVYSTGSNVFQTRAGCLIGAEHVNNSYECDIPIGAGICASYQTQTNSPRRARSVASQSIIAYTMSLGAENSVAYSNNSIAIPTNFTISVTTEILPVSMTKTSVDCTMYICGDSTECSNLLLQYGSFCTQLNRALTGIAVEQDKNTQEVFAQVKQIYKTPPIKDFGGFNFSQILPDPSKPSKRSFIEDLLFNKVTLADAGFIKQYGDCLGDIAARDLICAQKFNGLTVLPPLLTDEMIAQYTSALLAGTITSGWTFCAGAALQIPFAMQMAYRFNGIGVTQNVLYENQKLIANQFNSAIGKIQDSLSSTASALGKLQDVVNQNAQALNTLVKQLSSNFGAISSVLNDILSRLDKVEAEVQIDRLITGRLQSLQTYVTQQLIRAAEIRASANLAATKMSECVCGQSKRVDFCGKGYHLMSFPQSAPHGVVFLHVTYVPAQEKNFTTAPAICHDGKAHFPREGVFVSNGTHWFVTQRNFYEPQIITTDNTFVSGNCDVVIGIVNNTVYDPLQPELDSGGGGSDIDPYKEFGSSYQLLNFLPLDFFPDLNALVDTATALYEEELTGREHCSPHHTAIRQALVCWDELTKLIAWMSSNITSEQVRTIIVNHVNDTWGLKVRQSLWFHLSCLTFGQHTVQEFLVSFGVWIRTPAPYRPPNAPILSTLPEHTVIC

SEQ ID NO: 11237 - protein, 1301 aa, Artificial Sequence
  SARS-CoV-2/Belgium/ULG-6939/2020__EPI_ISL_417020 spike protein (1-1147)(G889C_L1034C) WhcAg construct
MFVFLVLLPLVSSQCVNLTTRTQLPPAYTNSFTRGVYYPDKVFRSSVLHSTQDLFLPFFSNVTWFHAIHVSGTNGTKRFDNPVLPFNDGVYFASTEKSNIIRGWIFGTTLDSKTQSLLIVNNATNVVIKVCEFQFCNDPFLGVYYHKNNKSWMESEFRVYSSANNCTFEYVSQPFLMDLEGKQGNFKNLREFVFKNIDGYFKIYSKHTPINLVRDLPQGFSALEPLVDLPIGINITRFQTLLALHRSYLTPGDSSSGWTAGAAAYYVGYLQPRTFLLKYNENGTITDAVDCALDPLSETKCTLKSFTVEKGIYQTSNFRVQPTESIVRFPNITNLCPFGEVFNATRFASVYAWNRKRISNCVADYSVLYNSASFSTFKCYGVSPTKLNDLCFTNVYADSFVIRGDEVRQIAPGQTGKIADYNYKLPDDFTGCVIAWNSNNLDSKVGGNYNYLYRLFRKSNLKPFERDISTEIYQAGSTPCNGVEGFNCYFPLQSYGFQPTNGVGYQPYRVVVLSFELLHAPATVCGPKKSTNLVKNKCVNFNFNGLTGTGVLTESNKKFLPFQQFGRDIADTTDAVRDPQTLEILDITPCSFGGVSVITPGTNTSNQVAVLYQGVNCTEVPVAIHADQLTPTWRVYSTGSNVFQTRAGCLIGAEHVNNSYECDIPIGAGICASYQTQTNSPRRARSVASQSIIAYTMSLGAENSVVYSNNSIAIPTNFTISVTTEILPVSMTKTSVDCTMYICGDSTECSNLLLQYGSFCTQLNRALTGIAVEQDKNTQEVFAQVKQIYKTPPIKDFGGFNFSQILPDPSKPSKRSFIEDLLFNKVTLADAGFIKQYGDCLGDIAARDLICAQKFNGLTVLPPLLTDEMIAQYTSALLAGTITSGWTFCAGAALQIPFAMQMAYRFNGIGVTQNVLYENQKLIANQFNSAIGKIQDSLSSTASALGKLQDVVNQNAQALNTLVKQLSSNFGAISSVLNDILSRLDKVEAEVQIDRLITGRLQSLQTYVTQQLIRAAEIRASANLAATKMSECVCGQSKRVDFCGKGYHLMSFPQSAPHGVVFLHVTYVPAQEKNFTTAPAICHDGKAHFPREGVFVSNGTHWFVTQRNFYEPQIITTDNTFVSGNCDVVIGIVNNTVYDPLQPELDSGGGGSDIDPYKEFGSSYQLLNFLPLDFFPDLNALVDTATALYEEELTGREHCSPHHTAIRQALVCWDELTKLIAWMSSNITSEQVRTIIVNHVNDTWGLKVRQSLWFHLSCLTFGQHTVQEFLVSFGVWIRTPAPYRPPNAPILSTLPEHTVIC

SEQ ID NO: 11238 - protein, 1301 aa, Artificial Sequence
  SARS-CoV-2/France/HF2496/2020__EPI_ISL_418231 spike protein (1-1147)(G889C_L1034C) WhcAg construct
MFVFLVLLPLVSSQCVNLTTRTQLPPAYTNSFTRGVYYPDKVFRSSVLHSTQDLFLPFFSNVTWFHAIHVSGTNGTKRFDNPVLPFNDGVYFASTEKSNIIRGWIFGTTLDSKTQSLLIVNNATNVVIKVCEFQFCNDPFLGVYYHKNNKSWMESEFRVYSSANNCTFEYVSQPFLMDLEGKQGNFKNLREFVFKNIDGYFKIYSKHTPINLVRDLPQGFSALEPLVDLPIGINITRFQTLLALHRSYLTPGDSSSGWTAGAAAYYVGYLQPRTFLLKYNENGTITDAVDCALDPLSETKCTLKSFTVEKGIYQTSNFRVQPTESIVRFPNITNLCPFGEVFNATRFASVYAWNRKRISNCVADYSVLYNSASFSTFKCYGVSPTKLNDLCFTNVYADSFVIRGDEVRQIAPGQTGKIADYNYKLPDDFTGCVIAWNSNNLDSKVGGNYNYLYRLFRKSNLKPFERDISTEIYQAGSTPCNGVEGFNCYFPLQSYGFQPTNGVGYQPYRVVVLSFELLHAPATVCGPKKSTNLVKNKCVNFNFNGLTGTGVLTESNKKFLPFQQFGRDIADTTDAVRDPQTLEILDITPCSFGGVSVITPGTNTSNQVAVLYQGVNCTEVPVAIHADQLTPTWRVYSTGSNVFQTRAGCLIGAEHVNNSYECDIPIGAGICASYQTQTNSPRRARSVASQSIIAYTMSLGAENSVAYSNNSIAIPTNFTISVTTEILPVSMTKTSVDCTMYICGDSTECSNLLLQYGSFCTQLNRALTGIAVEQDKNTQEVFAQVKQIYKTPPIKDFGGFNFSQILPDPSKPSKRSFIEDLLFNKVTLADAGFIKQYGDCLGDIVARDLICAQKFNGLTVLPPLLTDEMIAQYTSALLAGTITSGWTFCAGAALQIPFAMQMAYRFNGIGVTQNVLYENQKLIANQFNSAIGKIQDSLSSTASALGKLQDVVNQNAQALNTLVKQLSSNFGAISSVLNDILSRLDKVEAEVQIDRLITGRLQSLQTYVTQQLIRAAEIRASANLAATKMSECVCGQSKRVDFCGKGYHLMSFPQSAPHGVVFLHVTYVPAQEKNFTTAPAICHDGKAHFPREGVFVSNGTHWFVTQRNFYEPQIITTDNTFVSGNCDVVIGIVNNTVYDPLQPELDSGGGGSDIDPYKEFGSSYQLLNFLPLDFFPDLNALVDTATALYEEELTGREHCSPHHTAIRQALVCWDELTKLIAWMSSNITSEQVRTIIVNHVNDTWGLKVRQSLWFHLSCLTFGQHTVQEFLVSFGVWIRTPAPYRPPNAPILSTLPEHTVIC

SEQ ID NO: 11239 - protein, 1301 aa, Artificial Sequence
  SARS-CoV-2/USA/WA-UW291/2020__EPI_ISL_418076 spike protein (1-1147)(G889C_L1034C) WhcAg construct
MFVFLVLLPLVSSQCVNLTTRTQLPPAYTNSFTRGVYYPDKVFRSSVLHSTQDLFLPFFSNVTWFHAIHVSGTNGTKRFDNPVLPFNDGVYFASTEKSNIIRGWIFGTTLDSKTQSLLIVNNATNVVIKVCEFQFCNDPFLGVYYHKNNKSWMESEFRVYSSANNCTFEYVSQPFLMDLEGKQGNFKNLREFVFKNIDGYFKIYSKHTPINLVRDLPQGFSALEPLVDLPIGINITRFQTLLALHRSYLTPGDSSSGWTAGAAAYYVGYLQPRTFLLKYNENGTITDAVDCALDPLSETKCTLKSFTVEKGIYQTSNFRVQPTESIVRFPNITNLCPFGEVFNATRFASVYAWNRKRISNCVADYSVLYNSASFSTFKCYGVSPTKLNDLCFTNVYADSFVIRGDEVRQIAPGQTGKIADYNYKLPDDFTGCVIAWNSNNLDSKVGGNYNYLYRLFRKSNLKPFERDISTEIYQAGSTPCNGVEGFNCYFPLQSYGFQPTNGVGYQPYRVVVLSFELLHAPATVCGPKKSTNLVKNKCVNFNFNGLTGTGVLTESNKKFLPFQQFGRDIADTTDAVRDPQTLEILDITPCSFGGVSVITPGTNTSNQVAVLYQGVNCTEVPVAIHADQLTPTWRVYSTGSNVFQTRAGCLIGAEHVNNSYECDIPIGAGICASYQTQTNSPRRARSVASQSIIAYTMSLGAENSVAYSNNSIAIPTNFTISVTTEILPVSMTKTSVDCTMYICGDSTECSNLLLQYGSFCTQLNRALTGIAVEQDKNTQEVFAQVKQIYKTPPIKDFGGFNFSQILPDPSKPSKRSFIEDLLFNKVTLADAGFIKQYGDCLGDIAARDLICAQKFNGLTVLPPLLTDEMIAQYTSALLAGTITSGWTFCAGAALQIPFAMQMAYRFNGIGVTQNVLYENQKLIANQFNSAIGKIQYSLSSTASALGKLQDVVNQNAQALNTLVKQLSSNFGAISSVLNDILSRLDKVEAEVQIDRLITGRLQSLQTYVTQQLIRAAEIRASANLAATKMSECVCGQSKRVDFCGKGYHLMSFPQSAPHGVVFLHVTYVPAQEKNFTTAPAICHDGKAHFPREGVFVSNGTHWFVTQRNFYEPQIITTDNTFVSGNCDVVIGIVNNTVYDPLQPELDSGGGGSDIDPYKEFGSSYQLLNFLPLDFFPDLNALVDTATALYEEELTGREHCSPHHTAIRQALVCWDELTKLIAWMSSNITSEQVRTIIVNHVNDTWGLKVRQSLWFHLSCLTFGQHTVQEFLVSFGVWIRTPAPYRPPNAPILSTLPEHTVIC

SEQ ID NO: 11240 - protein, 1301 aa, Artificial Sequence; identical to SEQ ID NO: 11203
  SARS-CoV-2/Portugal/PT0034/2020__EPI_ISL_418019 spike protein (1-1147)(G889C_L1034C) WhcAg construct

SEQ ID NO: 11241 - protein, 1301 aa, Artificial Sequence; identical to SEQ ID NO: 11195
  SARS-CoV-2/Iceland/202/2020__EPI_ISL_417750 spike protein (1-1147)(G889C_L1034C) WhcAg construct

SEQ ID NO: 11242 - protein, 1301 aa, Artificial Sequence
  SARS-CoV-2/USA/WA-UW261/2020__EPI_ISL_418046 spike protein (1-1147)(G889C_L1034C) WhcAg construct
MFVFLVLLPLVSSQCVNLTTRTQLPPAYTNSFTRGVYYPDKVFRSSVLHSTQDLFLPFFSNVTWFHAIHVSGTNGTKRFDNPVLPFNDGVYFASTEKSNIIRGWIFGTTLDSKTQSLLIVNNATNVVIKVCEFQFCNDPFLGVYYHKNNKSWMESEFRVYSSANNCTFEYVSQPFLMDLEGKQGNFKNLREFVFKNIDGYFKIYSKHTPINLVRDLPQGFSALEPLVDLPIGINITRFQTLLALHRSYLTPGDSSSGWTAGAAAYYVGYLQPRTFLLKYNENGTITDAVDCALDPLSETKCTLKSFTVEKGIYQTSNFRVQPTESIVRFPNITNLCPFGEVFNATRFTSVYAWNRKRISNCVADYSVLYNSASFSTFKCYGVSPTKLNDLCFTNVYADSFVIRGDEVRQIAPGQTGKIADYNYKLPDDFTGCVIAWNSNNLDSKVGGNYNYLYRLFRKSNLKPFERDISTEIYQAGSTPCNGVEGFNCYFPLQSYGFQPTNGVGYQPYRVVVLSFELLHAPATVCGPKKSTNLVKNKCVNFNFNGLTGTGVLTESNKKFLPFQQFGRDIADTTDAVRDPQTLEILDITPCSFGGVSVITPGTNTSNQVAVLYQDVNCTEVPVAIHADQLTPTWRVYSTGSNVFQTRAGCLIGAEHVNNSYECDIPIGAGICASYQTQTNSPRRARSVASQSIIAYTMSLGAENSVAYSNNSIAIPTNFTISVTTEILPVSMTKTSVDCTMYICGDSTECSNLLLQYGSFCTQLNRALTGIAVEQDKNTQEVFAQVKQIYKTPPIKDFGGFNFSQILPDPSKPSKRSFIEDLLFNKVTLADAGFIKQYGDCLGDIAARDLICAQKFNGLTVLPPLLTDEMIAQYTSALLAGTITSGWTFCAGAALQIPFAMQMAYRFNGIGVTQNVLYENQKLIANQFNSAIGKIQDSLSSTASALGKLQDVVNQNAQALNTLVKQLSSNFGAISSVLNDILSRLDKVEAEVQIDRLITGRLQSLQTYVTQQLIRAAEIRASANLAATKMSECVCGQSKRVDFCGKGYHLMSFPQSAPHGVVFLHVTYVPAQEKNFTTAPAICHDGKAHFPREGVFVSNGTHWFVTQRNFYEPQIITTDNTFVSGNCDVVIGIVNNTVYDPLQPELDSGGGGSDIDPYKEFGSSYQLLNFLPLDFFPDLNALVDTATALYEEELTGREHCSPHHTAIRQALVCWDELTKLIAWMSSNITSEQVRTIIVNHVNDTWGLKVRQSLWFHLSCLTFGQHTVQEFLVSFGVWIRTPAPYRPPNAPILSTLPEHTVIC

SEQ ID NO: 11243 - protein, 1301 aa, Artificial Sequence
  SARS-CoV-2/Portugal/PT0035/2020__EPI_ISL_418020 spike protein (1-1147)(G889C_L1034C) WhcAg construct
MFVFLVLLPLVSSQCVNLTTRTQLPPAYTNSFTRGVYYPDKVFRSSVLHSTQDLFLPFFSNVTWFHAIHVSGTNGTKRFDNPVLPFNDGVYFASTEKSNIIRGWIFGTTLDSKTQSLLIVNNATNVVIKVCEFQFCNDPFLGVYYHKNNKSWMESEFRVYSSANNCTFEYVSQPFLMDLEGKQGNFKNLREFVFKNIDGYFKIYSKHTPINLVRDLPQGFSALEPLVDLPIGINITRFQTLLALHRSYLTPGDSSSGWTAGAAAYYVGYLQPRTFLLKYNENGTITDAVDCALDPLSETKCTLKSFTVEKGIYQTSNFRVQPTESIVRFPNITNLCPFGEVFNATRFASVYAWNRKRISNCVADYSVLYNSASFSTFKCYGVSPTKLNDLCFTNVYADSFVIRGDEVRQIAPGQTGKIADYNYKLPDDFTGCVIAWNSNNLDSKVGGNYNYLYRLFRKSNLKPFERDISTEIYQAGSTPCNGVEGFNCYFPLQSYGFQPTNGVGYQPYRVVVLSFELLHAPATVCGPKKSTNLVKNKCVNFNFNGLTGTGVLTESNKKFLPFQQFGRDIADTTDAVRDPQTLEILDITPCSFGGVSVITPGTNTSNQVAVLYQDVNCTEVPVAIHADQLTPTWRVYSTGSNVFQTRAGCLIGAEHVNNSYECDIPIGAGICASYQTQTNSPRRARSVASQSIIAYTMSLGAENSVAYSNNSIAIPTNFTISVTTEILPVSMTKTSVDCTMYICGDSTECSNLLLQYGSFCTQLNRALTGIAVEQDKNTQEVFAQVKQIYKTPPIKDFGGFNFSQILPDPSKPSKRSFIEDLLFNKVTLADAGFIKQYGDCLGDISARDLICAQKFNGLTVLPPLLTDEMIAQYTSALLAGTITSGWTFCAGAALQIPFAMQMAYRFNGIGVTQNVLYENQKLIANQFNSAIGKIQDSLSSTASALGKLQDVVNQNAQALNTLVKQLSSNFGAISSVLNDILSRLDKVEAEVQIDRLITGRLQSLQTYVTQQLIRAAEIRASANLAATKMSECVCGQSKRVDFCGKGYHLMSFPQSAPHGVVFLHVTYVPAQEKNFTTAPAICHDGKAHFPREGVFVSNGTHWFVTQRNFYEPQIITTDNTFVSGNCDVVIGIVNNTVYDPLQPELDSGGGGSDIDPYKEFGSSYQLLNFLPLDFFPDLNALVDTATALYEEELTGREHCSPHHTAIRQALVCWDELTKLIAWMSSNITSEQVRTIIVNHVNDTWGLKVRQSLWFHLSCLTFGQHTVQEFLVSFGVWIRTPAPYRPPNAPILSTLPEHTVIC

SEQ ID NO: 11244 - protein, 1301 aa, Artificial Sequence
  SARS-CoV-2/USA/NY-NYUMC7/2020__EPI_ISL_418192 spike protein (1-1147)(G889C_L1034C) WhcAg construct
MFVFLVLLPLVSSQCVNLTTRTQLPPAYTNSFTRGVYYPDKVFRSSVLHSTQDLFLPFFSNVTWFHAIHVSGTNGTKRFDNPVLPFNDGVYFASTEKSNIIRGWIFGTTLDSKTQSLLIVNNATNVVIKVCEFQFCNDPFLGVYHHKNNKSWMESEFRVYSSANNCTFEYVSQPFLMDLEGKQGNFKNLREFVFKNIDGYFKIYSKHTPINLVRDLPQGFSALEPLVDLPIGINITRFQTLLALHRSYLTPGDSSSGWTAGAAAYYVGYLQPRTFLLKYNENGTITDAVDCALDPLSETKCTLKSFTVEKGIYQTSNFRVQPTESIVRFPNITNLCPFGEVFNATRFASVYAWNRKRISNCVADYSVLYNSASFSTFKCYGVSPTKLNDLCFTNVYADSFVIRGDEVRQIAPGQTGKIADYNYKLPDDFTGCVIAWNSNNLDSKVGGNYNYLYRLFRKSNLKPFERDISTEIYQAGSTPCNGVEGFNCYFPLQSYGFQPTNGVGYQPYRVVVLSFELLHAPATVCGPKKSTNLVKNKCVNFNFNGLTGTGVLTESNKKFLPFQQFGRDIADTTDAVRDPQTLEILDITPCSFGGVSVITPGTNTSNQVAVLYQGVNCTEVPVAIHADQLTPTWRVYSTGSNVFQTRAGCLIGAEHVNNSYECDIPIGAGICASYQTQTNSPRRARSVASQSIIAYTMSLGAENSVAYSNNSIAIPTNFTISVTTEILPVSMTKTSVDCTMYICGDSTECSNLLLQYGSFCTQLNRALTGIAVEQDKNTQEVFAQVKQIYKTPPIKDFGGFNFSQILPDPSKPSKRSFIEDLLFNKVTLADAGFIKQYGDCLGDIAARDLICAQKFNGLTVLPPLLTDEMIAQYTSALLAGTITSGWTFCAGAALQIPFAMQMAYRFNGIGVTQNVLYENQKLIANQFNSAIGKIQDSLSSTASALGKLQDVVNQNAQALNTLVKQLSSNFGAISSVLNDILSRLDKVEAEVQIDRLITGRLQSLQTYVTQQLIRAAEIRASANLAATKMSECVCGQSKRVDFCGKGYHLMSFPQSAPHGVVFLHVTYVPAQEKNFTTAPAICHDGKAHFPREGVFVSNGTHWFVTQRNFYEPQIITTDNTFVSGNCDVVIGIVNNTVYDPLQPELDSGGGGSDIDPYKEFGSSYQLLNFLPLDFFPDLNALVDTATALYEEELTGREHCSPHHTAIRQALVCWDELTKLIAWMSSNITSEQVRTIIVNHVNDTWGLKVRQSLWFHLSCLTFGQHTVQEFLVSFGVWIRTPAPYRPPNAPILSTLPEHTVIC

SEQ ID NO: 11245 - protein, 1301 aa, Artificial Sequence
  SARS-CoV-2/Iceland/189/2020__EPI_ISL_417709 spike protein (1-1147)(G889C_L1034C) WhcAg construct
MFVFLVLLPLVSSQCVNLTTRTQLPPAYTNSFTRGVYYPDKVFRSSVLHSTQDLFLPFFSNVTWFHAIHVSGTNGTKRFDNPVLPFNDGVYFASTEKSNIIRGWIFGTTLDSKTQSLLIVNNATNVVIKVCEFQFCNDPFLGVYYHKNNKSWMESEFRVYSSANNCTFEYVSQPFLMDLEGKQGNFKNLREFVFKNIDGYFKIYSKHTPINLVRDLPQGFSALEPLVDLPIGINITRFQTLLALHRSYLTPGDSSSGWTAGAAAYYVGYLQPRTFLLKYNENGTITDAVDCALDPLSETKCTLKSFTVEKGIYQTSNFRVQPTESIVRFPNITNLCPFGEVFNATRFASVYAWNRKRISNCVADYSVLYNSASFSTFKCYGVSPTKLNDLCFTNVYADSFVIRGDEVRQIAPGQTGKIADYNYKLPDDFTGCVIAWNSNNLDSKVGGNYNYLYRLFRKSNLKPFERDISTEIYQAGSTPCNGVEGFNCYFPLQSYGFQPTNGVGYQPYRVVVLSFELLHAPATVCGPKKSTNLVKNKCVNFNFNGLTGTGVLTESNKKFLPFQQFGRDIADTTDAVRDPQTLEILDITPCSFGGVSVITPGTNTSNQVAVLYQGVNCTEVPVAIHADQLTPTWRVYSTGSNVFQTRAGCLIGAEHVNNSYECDIPIGAGICASYQTQTNSPRRARSVASQSIIAYTMSLGAENSVAYSNNSIAIPTNFTISVTTEILPVSMTKTSVDCTMYICGDSTECSNLLLQYGSFCTQLNRALTGIAVEQDKNTQEVFAQVKQIYKTPPIKDFGGFNFSQILPDPSKPSKRSFIEDLLFNKVTLADAGFTKQYGDCLGDIAARDLICAQKFNGLTVLPPLLTDEMIAQYTSALLAGTITSGWTFCAGAALQIPFAMQMAYRFNGIGVTQNVLYENQKLIANQFNSAIGKIQDSLSSTASALGKLQDVVNQNAQALNTLVKQLSSNFGAISSVLNDILSRLDKVEAEVQIDRLITGRLQSLQTYVTQQLIRAAEIRASANLAATKMSECVCGQSKRVDFCGKGYHLMSFPQSAPHGVVFLHVTYVPAQEKNFTTAPAICHDGKAHFPREGVFVSNGTHWFVTQRNFYEPQIITTDNTFVSGNCDVVIGIVNNTVYDPLQPELDSGGGGSDIDPYKEFGSSYQLLNFLPLDFFPDLNALVDTATALYEEELTGREHCSPHHTAIRQALVCWDELTKLIAWMSSNITSEQVRTIIVNHVNDTWGLKVRQSLWFHLSCLTFGQHTVQEFLVSFGVWIRTPAPYRPPNAPILSTLPEHTVIC

SEQ ID NO: 11246 - protein, 1301 aa, Artificial Sequence
  SARS-CoV-2/Australia/NSW56/2020__EPI_ISL_417408 spike protein (1-1147)(G889C_L1034C) WhcAg construct
MFVFLVLLPLVSSQCVNLTTRTQLPPAYTNSFTRGVYYPDKVFRSSVLHSTQDLFLPFFSNVTWFHAIHVSGTNGTKRFDNPVLPFNDGVYFASTEKSNIIRGWIFGTTLDSKTQSLLIVNNATNVVIKVCEFQFCNDPFLGVYYHKNNKSWMESEFRVYSSANNCTFEYVSQPFLMDLEGKQGNFKNLREFVFKNIDGYFKIYSKHTPINLVRDLPQGFSALEPLVDLPIGINITRFQTLLALHRSYLTPGDSSSGWTAGAAAYYVGYLQPRTFLLKYNENGTITDAVDCALDPLSETKCTLKSFTVEKGIYQTSNFRVQPTESIVRFPNITNLCPFGEVFNATRFASVYAWNRKRISNCVADYSVLYNSASFSTFKCYGVSPTKLNDLCFTNVYADSFVIRGDEVRQIAPGQTGKIADYNYKLPDDFTGCVIAWNSNNLDSKVGGNYNYLYRLFRKSNLKPFERDISTEIYQAGSTPCNGVEGFNCYFPLQSYGFQPTNGVGYQPYRVVVLSFELLHAPATVCGPKKSTNLVKNKCVNFNFNGLTGTGVLTESNKKFLPFQQFGRDIADTTDAVRDPQTLEILDITPCSFGGVSVITPGTNTSNQVAVLYQDVNCTEVPVAIHADQLTPTWRVYSTGSNVFQTRAGCLIGAEHVNNSYECDIPIGAGICASYQTQTNSPRRARSVASQSIIAYTMSLGAENSVAYSNNSIAIPTNFTISVTTEILPVSMTKTSVDCTMYICGDSTECSNLLLQYGSFCTQLNRALTGIAVEQDKNTQEVFAQVKQIYKTPPIKDFGGFNFSQILPDSSKPSKRSFIEDLLFNKVTLADAGFIKQYGDCLGDIAARDLICAQKFNGLTVLPPLLTDEMIAQYTSALLAGTITSGWTFCAGAALQIPFAMQMAYRFNGIGVTQNVLYENQKLIANQFNSAIGKIQDSLSSTASALGKLQDVVNQNAQALNTLVKQLSSNFGAISSVLNDILSRLDKVEAEVQIDRLITGRLQSLQTYVTQQLIRAAEIRASANLAATKMSECVCGQSKRVDFCGKGYHLMSFPQSAPHGVVFLHVTYVPAQEKNFTTAPAICHDGKAHFPREGVFVSNGTHWFVTQRNFYEPQIITTDNTFVSGNCDVVIGIVNNTVYDPLQPELDSGGGGSDIDPYKEFGSSYQLLNFLPLDFFPDLNALVDTATALYEEELTGREHCSPHHTAIRQALVCWDELTKLIAWMSSNITSEQVRTIIVNHVNDTWGLKVRQSLWFHLSCLTFGQHTVQEFLVSFGVWIRTPAPYRPPNAPILSTLPEHTVIC

SEQ ID NO: 11247 - protein, 1301 aa, Artificial Sequence
  SARS-CoV-2/Iceland/280/2020__EPI_ISL_417608 spike protein (1-1147)(G889C_L1034C) WhcAg construct
MFVFLVLLPLVSSQCVNLTTRTQLPPAYTNSFTRGVYYPDKVFRSSVLHSTQDLFLPFFSNVTWFHAIHVSGTNGTKRFDNPVLPFNDGVYFASTEKSNIIRGWIFGTTLDSKTQSLLIVNNATNVVIKVCEFQFCNDPFLGVYYHKNNKSWMESEFRVYSSANNCTFEYVSQPFLMDLEGKQGNFKNLREFVFKNIDGYFKIYSKHTPINLVRDLPQGFSALEPLVDLPIGINITRFQTLLALHRSYLTPGDSSSGWTAGAAAYYVGYLQPRTFLLKYNENGTITDAVDCALDPLSETKCTLKSFTVEKGIYQTSNFRVQPTESIVRFPNITNLCPFGEVFNATRFASVYAWNRKRISNCVADYSVLYNSASFSTFKCYGVSPTKLNDLCFTNVYADSFVIRGDEVRQIAPGQTGKIADYNYKLPDDFTGCVIAWNSNNLDSKVGGNYNYLYRLFRKSNLKPFERDISTEIYQAGSTPCNGVEGFNCYFPLQSYGFQPTNGVGYQPYRVVVLSFELLHAPATVCGPKKSTNLVKNKCVNFNFNGLTGTGVLTESNKKFLPFQQFGRDIADTTDAVRDPQTLEILDITPCSFGGVSVITPGTNTSNQVAVLYQGVNCTEVPVAIHADQLTPTWRVYSTGSNVFQTRAGCLIGAEHVNNSYECDIPIGAGICASYHTQTNSPRRARSVASQSIIAYTMSLGAENSVAYSNNSIAIPTNFTISVTTEILPVSMTKTSVDCTMYICGDSTECSNLLLQYGSFCTQLNRALTGIAVEQDKNTQEVFAQVKQIYKTPPIKDFGGFNFSQILPDPSKPSKRSFIEDLLFNKVTLADAGFIKQYGDCLGDIAARDLICAQKFNGLTVLPPLLTDEMIAQYTSALLAGTITSGWTFCAGAALQIPFAMQMAYRFNGIGVTQNVLYENQKLIANQFNSAIGKIQDSLSSTASALGKLQDVVNQNAQALNTLVKQLSSNFGAISSVLNDILSRLDKVEAEVQIDRLITGRLQSLQTYVTQQLIRAAEIRASANLAATKMSECVCGQSKRVDFCGKGYHLMSFPQSAPHGVVFLHVTYVPAQEKNFTTAPAICHDGKAHFPREGVFVSNGTHWFVTQRNFYEPQIITTDNTFVSGNCDVVIGIVNNTVYDPLQPELDSGGGGSDIDPYKEFGSSYQLLNFLPLDFFPDLNALVDTATALYEEELTGREHCSPHHTAIRQALVCWDELTKLIAWMSSNITSEQVRTIIVNHVNDTWGLKVRQSLWFHLSCLTFGQHTVQEFLVSFGVWIRTPAPYRPPNAPILSTLPEHTVIC

SEQ ID NO: 11248 - protein, 1301 aa, Artificial Sequence; identical to SEQ ID NO: 11203
  SARS-CoV-2/Iceland/247/2020__EPI_ISL_417575 spike protein (1-1147)(G889C_L1034C) WhcAg construct

SEQ ID NO: 11249 - protein, 1301 aa, Artificial Sequence
  SARS-CoV-2/Iceland/238/2020__EPI_ISL_417566 spike protein (1-1147)(G889C_L1034C) WhcAg construct
MFVFLVLLPLVSSQCVNLTTRTQLPPAYTNSFTRGVYYPDKVFRSSVLHSTQDLFLPFFSNVTWFHAIHVSGTNGTKRFDNPVLPFNDGVYFASTEKSNIIRGWIFGTTLDSKTQSLLIVNNATNVVIKVCEFQFCNDPFLGVYYHKNNKSWMESEFRVYSSANNCTFEYVSQPFLMDLEGKQGNFKNLREFVFKNIDGYFKIYSKHTPINLVRDLPQGFSALEPLVDLPIGINITRFQTLLALHRSYLTPGDSSSGWTAGAAAYYVGYLQPRTFLLKYNENGTITDAVDCALDPLSETKCTLKSFTVEKGIYQTSNFRVQPTESIVRFPNITNLCPFGEVFNATRFASVYAWNRKRISNCVADYSVLYNSASFSTFKCYGVSPTKLNDLCFTNVYADSFVIRGDEVRQIAPGQTGKIADYNYKLPDDFTGCVIAWNSNNLDSKVGGNYNYLYRLFRKSNLKPFERDISTEIYQAGSTPCNGVEGFNCYFPLQSYGFQPTNGVGYQPYRVVVLSFELLHAPATVCGPKKSTNLVKNKCVNFNFNGLTGTGVLTESNKKFLPFQQFGRDIADTTDAVRDPQTLEILDITPCSFGGVSVITPGTNTSNQVAVLYQGVNCTEVPVAIHADQLTPTWRVYSTGSNVFQTRAGCLIGAEHVNNSYECDIPIGAGICASYQTQTNSPRRARSVASQSIIAYTMSLGAENSVAYSNNSIAIPTNFTISVTTEILPVSMTKTSVDCTMYICGDSTECSNLLLQYGSFCTQLNRALTGIAVEQDKNTQEVFAQVKQIYKTPPIKDFGGFNFSQILPDPSKPSKRSFIEDLLFNKVTLADVGFIKQYGDCLGDIAARDLICAQKFNGLTVLPPLLTDEMIAQYTSALLAGTITSGWTFCAGAALQIPFAMQMAYRFNGIGVTQNVLYENQKLIANQFNSAIGKIQDSLSSTASALGKLQDVVNQNAQALNTLVKQLSSNFGAISSVLNDILSRLDKVEAEVQIDRLITGRLQSLQTYVTQQLIRAAEIRASANLAATKMSECVCGQSKRVDFCGKGYHLMSFPQSAPHGVVFLHVTYVPAQEKNFTTAPAICHDGKAHFPREGVFVSNGTHWFVTQRNFYEPQIITTDNTFVSGNCDVVIGIVNNTVYDPLQPELDSGGGGSDIDPYKEFGSSYQLLNFLPLDFFPDLNALVDTATALYEEELTGREHCSPHHTAIRQALVCWDELTKLIAWMSSNITSEQVRTIIVNHVNDTWGLKVRQSLWFHLSCLTFGQHTVQEFLVSFGVWIRTPAPYRPPNAPILSTLPEHTVIC

SEQ ID NO: 11250 - protein, 1301 aa, Artificial Sequence
  SARS-CoV-2/Greece/16/2020__EPI_ISL_418265 spike protein (1-1147)(G889C_L1034C) WhcAg construct
MFVFLVLLPLVSSQCVNLTTRTQLPPAYTNSFTRGVYYPDKVFRSSVLHSTQDLFLPFFSNVTWFHAIHVSGTNGTKRFDNPVLPFNDGVYFASTEKSNIIRGWIFGTTLDSKTQSLLIVNNATNVVIKVCEFQFCNDPFLGVYYHKNNKSWMESEFRVYSSANNCTFEYVSQPFLMDLEGKQGNFKNLREFVFKNVDGYFKIYSKHTPINLVRDLPQGFSALEPLVDLPIGINITRFQTLLALHRSYLTPGDSSSGWTAGAAAYYVGYLQPRTFLLKYNENGTITDAVDCALDPLSETKCTLKSFTVEKGIYQTSNFRVQPTESIVRFPNITNLCPFGEVFNATRFASVYAWNRKRISNCVADYSVLYNSASFSTFKCYGVSPTKLNDLCFTNVYADSFVIRGDEVRQIAPGQTGKIADYNYKLPDDFTGCVIAWNSNNLDSKVGGNYNYLYRLFRKSNLKPFERDISTEIYQAGSTPCNGVEGFNCYFPLQSYGFQPTNGVGYQPYRVVVLSFELLHAPATVCGPKKSTNLVKNKCVNFNFNGLTGTGVLTESNKKFLPFQQFGRDIADTTDAVRDPQTLEILDITPCSFGGVSVITPGTNTSNQVAVLYQDVNCTEVPVAIHADQLTPTWRVYSTGSNVFQTRAGCLIGAEHVNNSYECDIPIGAGICASYQTQTNSPRRARSVASQSIIAYTMSLGAENSVAYSNNSIAIPTNFTISVTTEILPVSMTKTSVDCTMYICGDSTECSNLLLQYGSFCTQLNRALTGIAVEQDKNTQEVFAQVKQIYKTPPIKDFGGFNFSQILPDPSKPSKRSFIEDLLFNKVTLADAGFIKQYGDCLGDIAARDLICAQKFNGLTVLPPLLTDEMIAQYTSALLAGTITSGWTFCAGAALQIPFAMQMAYRFNGIGVTQNVLYENQKLIANQFNSAIGKIQDSLSSTASALGKLQDVVNQNAQALNTLVKQLSSNFGAISSVLNDILSRLDKVEAEVQIDRLITGRLQSLQTYVTQQLIRAAEIRASANLAATKMSECVCGQSKRVDFCGKGYHLMSFPQSAPHGVVFLHVTYVPAQEKNFTTAPAICHDGKAHFPREGVFVSNGTHWFVTQRNFYEPQIITTDNTFVSGNCDVVIGIVNNTVYDPLQPELDSGGGGSDIDPYKEFGSSYQLLNFLPLDFFPDLNALVDTATALYEEELTGREHCSPHHTAIRQALVCWDELTKLIAWMSSNITSEQVRTIIVNHVNDTWGLKVRQSLWFHLSCLTFGQHTVQEFLVSFGVWIRTPAPYRPPNAPILSTLPEHTVIC

SEQ ID NO: 11251 - protein, 1301 aa, Artificial Sequence
  SARS-CoV-2/Iceland/319/2020__EPI_ISL_417648 spike protein (1-1147)(G889C_L1034C) WhcAg construct
MFVFLVLLPLVSSQCVNLTTRTQLPPAYTNSFTRGVYYPDKVFRSSVLHSTQDLFLPFFSNVTWFHAIHVSGTNGTKRFDNPVLPFNDGVYFASTEKSNIIRGWIFGTTLDSKTQSLLIVNNATNVVIKVCEFQFCNDPFLGVYYHKNNKSWMESEFRVYSSANNCTFEYVSQPFLIDLEGKQGNFKNLREFVFKNIDGYFKIYSKHTPINLVRDLPQGFSALEPLVDLPIGINITRFQTLLALHRSYLTPGDSSSGWTAGAAAYYVGYLQPRTFLLKYNENGTITDAVDCALDPLSETKCTLKSFTVEKGIYQTSNFRVQPTESIVRFPNITNLCPFGEVFNATRFASVYAWNRKRISNCVADYSVLYNSASFSTFKCYGVSPTKLNDLCFTNVYADSFVIRGDEVRQIAPGQTGKIADYNYKLPDDFTGCVIAWNSNNLDSKVGGNYNYLYRLFRKSNLKPFERDISTEIYQAGSTPCNGVEGFNCYFPLQSYGFQPTNGVGYQPYRVVVLSFELLHAPATVCGPKKSTNLVKNKCVNFNFNGLTGTGVLTESNKKFLPFQQFGRDIADTTDAVRDPQTLEILDITPCSFGGVSVITPGTNTSNQVAVLYQGVNCTEVPVAIHADQLTPTWRVYSTGSNVFQTRAGCLIGAEHVNNSYECDIPIGAGICASYQTQTNSPRRARSVASQSIIAYTMSLGAENSVAYSNNSIAIPTNFTISVTTEILPVSMTKTSVDCTMYICGDSTECSNLLLQYGSFCTQLNRALTGIAVEQDKNTQEVFAQVKQIYKTPPIKDFGGFNFSQILPDPSKPSKRSFIEDLLFNKVTLADAGFIKQYGDCLGDIAARDLICAQKFNGLTVLPPLLTDEMIAQYTSALLAGTITSGWTFCAGAALQIPFAMQMAYRFNGIGVTQNVLYENQKLIANQFNSAIGKIQDSLSSTASALGKLQDVVNQNAQALNTLVKQLSSNFGAISSVLNDILSRLDKVEAEVQIDRLITGRLQSLQTYVTQQLIRAAEIRASANLAATKMSECVCGQSKRVDFCGKGYHLMSFPQSAPHGVVFLHVTYVPAQEKNFTTAPAICHDGKAHFPREGVFVSNGTHWFVTQRNFYEPQIITTDNTFVSGNCDVVIGIVNNTVYDPLQPELDSGGGGSDIDPYKEFGSSYQLLNFLPLDFFPDLNALVDTATALYEEELTGREHCSPHHTAIRQALVCWDELTKLIAWMSSNITSEQVRTIIVNHVNDTWGLKVRQSLWFHLSCLTFGQHTVQEFLVSFGVWIRTPAPYRPPNAPILSTLPEHTVIC

SEQ ID NO: 11252 - protein, 1301 aa, Artificial Sequence
  SARS-CoV-2/Congo/94/2020__EPI_ISL_417947 spike protein (1-1147)(G889C_L1034C) WhcAg construct
MFVFLVLLPLVSSQCVNLTTRTQLPPAYTNSFTRGVYYPDKVFRSSVLHSTQDLFLPFFSNVTWFHAIHVSGTNGTKRFDNPVLPFNDGVYFASTEKSNIIRGWIFGTTLDSKTQSLLIVNNATNVVIKVCEFQFCNDPFLGVYYHKNNKSWMESEFRVYSSANNCTFEYVSQPFLMDLEGKQGNFKNLREFVFKNIDGYFKIYSKHTPINLVRDLPQGFSALEPLVDLPIGINITRFQTLLALHRSYLTPGDSSSGWTAGAAAYYVGYLQPRTFLLKYNENGTITDAVDCALDPLSETKCTLKSFTVEKGIYQTSNFRVQPTESIVRFPNITNLCPFGEVFNATRFASVYAWNRKRISNCVADYSVLYNSASFSTFKCYGVSPTKLNDLCFTNVYADSFVIRGDEVRQIAPGQTGKIADYNYKLPDDFTGCVIAWNSNNLDSKVGGNYNYLYRLFRKSNLKPFERDISTEIYQAGSTPCNGVEGFNCYFPLQSYGFQPTNGVGYQPYRVVVLSFELLHAPATVCGPKKSTNLVKNKCVNFNFNGLTGTGVLTESNKKFLPFQQFGRDIADTTDAVRDPQTLEILDITPCSFGGVSVITPGTNTSNQVAVLYQGVNCTEVPVAIHADQLTPTWRVYSTGSNVFQTRAGCLIGAEHVNNSYECDIPIGAGICASYQTQTNSPRRARSVASQSIIAYTMSLGAENSVAYSNNSIAIPTNFTISVTTEILPVSMTKTSVDCTMYICGDSTECSNLLLQYGSFCTQLNRALTGIAVEQDKNTQEVFAQVKQIYKTPPIKDFGGFNFSQILPDPSKPSKRSFIEDILFNKVTLADAGFIKQYGDCLGDIAARDLICAQKFNGLTVLPPLLTDEMIAQYTSALLAGTITSGWTFCAGAALQIPFAMQMAYRFNGIGVTQNVLYENQKLIANQFNSAIGKIQDSLSSTASALGKLQDVVNQNAQALNTLVKQLSSNFGAISSVLNDILSRLDKVEAEVQIDRLITGRLQSLQTYVTQQLIRAAEIRASANLAATKMSECVCGQSKRVDFCGKGYHLMSFPQSAPHGVVFLHVTYVPAQEKNFTTAPAICHDGKAHFPREGVFVSNGTHWFVTQRNFYEPQIITTDNTFVSGNCDVVIGIVNNTVYDPLQPELDSGGGGSDIDPYKEFGSSYQLLNFLPLDFFPDLNALVDTATALYEEELTGREHCSPHHTAIRQALVCWDELTKLIAWMSSNITSEQVRTIIVNHVNDTWGLKVRQSLWFHLSCLTFGQHTVQEFLVSFGVWIRTPAPYRPPNAPILSTLPEHTVIC

SEQ ID NO: 11253 - protein, 1301 aa, Artificial Sequence
  SARS-CoV-2/Congo/158/2020__EPI_ISL_417950 spike protein (1-1147)(G889C_L1034C) WhcAg construct
MFVFLVLLPLVSSQCVNLTTRTQLPPAYTNSFTRGVYYPDKVFRSSVLHSTQDLFLPFFSNVTWFHAIHVSGTNGTKRFDNPVLPFNDGVYFASTEKSNIIRGWIFGTTLDSKTQSLLIVNNATNVVIKVCEFQFCNDPFLGVYYHKNNKSWMESEFRVYSSANNCTFEYVSQPFLMDLEGKQGNFKNLREFVFKNIDGYFKIYSKHTPINLVRDLPQGFSALEPLVDLPIGINITRFQTLLALHRSYLTPGDSSSGWTAGAAAYYVGYLQPRTFLLKYNENGTITDAVDCALDPLSETKCTLKSFTVEKGIYQTSNFRVQPTESIVRFPNITNLCPFGEVFNATRFASVYAWNRKRISNCVADYSVLYNSASFSTFKCYGVSPTKLNDLCFTNVYADSFVIRGDEVRQIAPGQTGKIADYNYKLPDDFTGCVIAWNSNNLDSKVGGNYNYLYRLFRKSNLKPFERDISTEIYQAGSTPCNGVEGFNCYFPLQSYGFQPTNGVGYQPYRVVVLSFELLHAPATVCGPKKSTNLVKNKCVNFNFNGLTGTGVLTESNKKFLPFQQFGRDIADTTDAVRDPQTLEILDITPCSFGGVSVITPGTNTSNQVAVLYQDVNCTEVPVAIHADQLTPTWRVYSTGSNVFQTRAGCLIGAEHVNNSYECDIPIGAGICASYQTQTNSPRRARSVASQSIIAYTMSLGAENSVAYSNNSIAIPTNFTISVTTEILPVSMTKTSVDCTMYICGDSTECSNLLLQYGSFCTQLNRALTGIAVEQDKNTQEVFAQVKQIYKTPPIKDFGGFNFSQILPDPSKPSKRSFIEDLLFNKVTLADAGFIKQYGDCLGDIAARDLICAQKFNGLTVLPPLLTDEMIAQYTSALLAGTITSGWTFCAGAALQIPFAMQMAYRFNGIGVTQNVLYENQKLIANQFNSAIGKIQDSLSSTASALGKLQDVVNQNAQALNTLVKQLSSNFGAISSVLNDILSRLDKVEAEVQIDRLITGRLQSLQTYVTQQLIRAAEIRASANLAATKMSECVCGQSKRVDFCGKGYHLMSFPQSAPHGVVFLHVTYVPAQEKNFTTAPAICHDGKAHFPREGVFVSNGTHWFVTQRNFYEPQIITTDNTFLSGNCDVVIGIVNNTVYDPLQPELDSGGGGSDIDPYKEFGSSYQLLNFLPLDFFPDLNALVDTATALYEEELTGREHCSPHHTAIRQALVCWDELTKLIAWMSSNITSEQVRTIIVNHVNDTWGLKVRQSLWFHLSCLTFGQHTVQEFLVSFGVWIRTPAPYRPPNAPILSTLPEHTVIC

SEQ ID NO: 11254 - protein, 1301 aa, Artificial Sequence
  SARS-CoV-2/USA/UT-00034/2020__EPI_ISL_417977 spike protein (1-1147)(G889C_L1034C) WhcAg construct
MFVFLVLLPLVSSQCVNLTTRTQLPPAYTNSFTRGVYYPDKVFRSSVLHSTQDLFLPFFSNVTWFHAIHVSGTNGTKRFDNPVLPFNDGVYFASTEKSNIIRGWIFGTTLDSKTQSLLIVNNATNVVIKVCEFQFCNDPFLGVYYYKNNKSWMESEFRVYSSANNCTFEYVSQPFLMDLEGKQGNFKNLREFVFKNIDGYFKIYSKHTPINLVRDLPQGFSALEPLVDLPIGINITRFQTLLALHRSYLTPGDSSSGWTAGAAAYYVGYLQPRTFLLKYNENGTITDAVDCALDPLSETKCTLKSFTVEKGIYQTSNFRVQPTESIVRFPNITNLCPFGEVFNATRFASVYAWNRKRISNCVADYSVLYNSASFSTFKCYGVSPTKLNDLCFTNVYADSFVIRGDEVRQIAPGQTGKIADYNYKLPDDFTGCVIAWNSNNLDSKVGGNYNYLYRLFRKSNLKPFERDISTEIYQAGSTPCNGVEGFNCYFPLQSYGFQPTNGVGYQPYRVVVLSFELLHAPATVCGPKKSTNLVKNKCVNFNFNGLTGTGVLTESNKKFLPFQQFGRDIADTTDAVRDPQTLEILDITPCSFGGVSVITPGTNTSNQVAVLYQGVNCTEVPVAIHADQLTPTWRVYSTGSNVFQTRAGCLIGAEHVNNSYECDIPIGAGICASYQTQTNSPRRARSVASQSIIAYTMSLGAENSVAYSNNSIAIPTNFTISVTTEILPVSMTKTSVDCTMYICGDSTECSNLLLQYGSFCTQLNRALTGIAVEQDKNTQEVFAQVKQIYKTPPIKDFGGFNFSQILPDPSKPSKRSFIEDLLFNKVTLADAGFIKQYGDCLGDIAARDLICAQKFNGLTVLPPLLTDEMIAQYTSALLAGTITSGWTFCAGAALQIPFAMQMAYRFNGIGVTQNVLYENQKLIANQFNSAIGKIQDSLSSTASALGKLQDVVNQNAQALNTLVKQLSSNFGAISSVLNDILSRLDKVEAEVQIDRLITGRLQSLQTYVTQQLIRAAEIRASANLAATKMSECVCGQSKRVDFCGKGYHLMSFPQSAPHGVVFLHVTYVPAQEKNFTTAPAICHDGKAHFPREGVFVSNGTHWFVTQRNFYEPQIITTDNTFVSGNCDVVIGIVNNTVYDPLQPELDSGGGGSDIDPYKEFGSSYQLLNFLPLDFFPDLNALVDTATALYEEELTGREHCSPHHTAIRQALVCWDELTKLIAWMSSNITSEQVRTIIVNHVNDTWGLKVRQSLWFHLSCLTFGQHTVQEFLVSFGVWIRTPAPYRPPNAPILSTLPEHTVIC

SEQ ID NO: 11255 - protein, 1301 aa, Artificial Sequence
  SARS-CoV-2/USA/UT-00033/2020__EPI_ISL_417976 spike protein (1-1147)(G889C_L1034C) WhcAg construct
MFVFLVLLPLVSSQCVNLTTRTQLPPAYTNSFTRGVYYPDKVFRSSVLHSTQDLFLPFFSNVTWFHAIHVSGTNGTKRFDNPVLPFNDGVYFASTEKSNIIRGWIFGTTLDSKTQSLLIVNNATNVVIKVCEFQFCNDPFLGVYYHKNNKSWMESEFRVYSSANNCTFEYVSQPFLMDLEGKQGNFKNLREFVFKNIDGYFKIYSKHTPINLVRDLPQGFSALEPLVDLPIGINITRFQTLLALHRSYLTPGDSSSGLTAGAAAYYVGYLQPRTFLLKYNENGTITDAVDCALDPLSETKCTLKSFTVEKGIYQTSNFRVQPTESIVRFPNITNLCPFGEVFNATRFASVYAWNRKRISNCVADYSVLYNSASFSTFKCYGVSPTKLNDLCFTNVYADSFVIRGDEVRQIAPGQTGKIADYNYKLPDDFTGCVIAWNSNNLDSKVGGNYNYLYRLFRKSNLKPFERDISTEIYQAGSTPCNGVEGFNCYFPLQSYGFQPTNGVGYQPYRVVVLSFELLHAPATVCGPKKSTNLVKNKCVNFNFNGLTGTGVLTESNKKFLPFQQFGRDIADTTDAVRDPQTLEILDITPCSFGGVSVITPGTNTSNQVAVLYQGVNCTEVPVAIHADQLTPTWRVYSTGSNVFQTRAGCLIGAEHVNNSYECDIPIGAGICASYQTQTNSPRRARSVASQSIIAYTMSLGAENSVAYSNNSIAIPTNFTISVTTEILPVSMTKTSVDCTMYICGDSTECSNLLLQYGSFCTQLNRALTGIAVEQDKNTQEVFAQVKQIYKTPPIKDFGGFNFSQILPDPSKPSKRSFIEDLLFNKVTLADAGFIKQYGDCLGDIAARDLICAQKFNGLTVLPPLLTDEMIAQYTSALLAGTITSGWTFCAGAALQIPFAMQMAYRFNGIGVTQNVLYENQKLIANQFNSAIGKIQDSLSSTASALGKLQDVVNQNAQALNTLVKQLSSNFGAISSVLNDILSRLDKVEAEVQIDRLITGRLQSLQTYVTQQLIRAAEIRASANLAATKMSECVCGQSKRVDFCGKGYHLMSFPQSAPHGVVFLHVTYVPAQEKNFTTAPAICHDGKAHFPREGVFVSNGTHWFVTQRNFYEPQIITTDNTFVSGNCDVVIGIVNNTVYDPLQPELDSGGGGSDIDPYKEFGSSYQLLNFLPLDFFPDLNALVDTATALYEEELTGREHCSPHHTAIRQALVCWDELTKLIAWMSSNITSEQVRTIIVNHVNDTWGLKVRQSLWFHLSCLTFGQHTVQEFLVSFGVWIRTPAPYRPPNAPILSTLPEHTVIC

SEQ ID NO: 11256 - protein, 1301 aa, Artificial Sequence
  SARS-CoV-2/USA/WI-13/2020__EPI_ISL_417516 spike protein (1-1147)(G889C_L1034C) WhcAg construct
MFVFLVLLPLVSSQCVNLTTRTQLPPAYTNSFTRGVYYPDKVFRSSVLHSTQDLFLPFFSNVTWFHAIHVSGTNGTKRFDNPVLPFNDGVYFASTEKSNIIRGWIFGTTLDSKTQSLLIVNNATNVVIKVCEFQFCNDPFLGVYYHKNNKSWMESEFRVYSSANNCTFEYVSQPFLMDLEGKQGNFKNLREFVFKNIDGYFKIYSKHTPINLVRDLPQGFSALEPLVDLPIGINITRFQTLLALHRSYLTPGDSSSGWTAGAAAYYVGYLQPRTFLLKYNENGTITDAVDCALDPLSETKCTLKSFTVEKGIYQTSNFRVLPTESIVRFPNITNLCPFGEVFNATRFASVYAWNRKRISNCVADYSVLYNSASFSTFKCYGVSPTKLNDLCFTNVYADSFVIRGDEVRQIAPGQTGKIADYNYKLPDDFTGCVIAWNSNNLDSKVGGNYNYLYRLFRKSNLKPFERDISTEIYQAGSTPCNGVEGFNCYFPLQSYGFQPTNGVGYQPYRVVVLSFELLHAPATVCGPKKSTNLVKNKCVNFNFNGLTGTGVLTESNKKFLPFQQFGRDIADTTDAVRDPQTLEILDITPCSFGGVSVITPGTNTSNQVAVLYQGVNCTEVPVAIHADQLTPTWRVYSTGSNVFQTRAGCLIGAEHVNNSYECDIPIGAGICASYQTQTNSPRRARSVASQSIIAYTMSLGAENSVAYSNNSIAIPTNFTISVTTEILPVSMTKTSVDCTMYICGDSTECSNLLLQYGSFCTQLNRALTGIAVEQDKNTQEVFAQVKQIYKTPPIKDFGGFNFSQILPDPSKPSKRSFIEDLLFNKVTLADAGFIKQYGDCLGDIAARDLICAQKFNGLTVLPPLLTDEMIAQYTSALLAGTITSGWTFCAGAALQIPFAMQMAYRFNGIGVTQNVLYENQKLIANQFNSAIGKIQDSLSSTASALGKLQDVVNQNAQALNTLVKQLSSNFGAISSVLNDILSRLDKVEAEVQIDRLITGRLQSLQTYVTQQLIRAAEIRASANLAATKMSECVCGQSKRVDFCGKGYHLMSFPQSAPHGVVFLHVTYVPAQEKNFTTAPAICHDGKAHFPREGVFVSNGTHWFVTQRNFYEPQIITTDNTFVSGNCDVVIGIVNNTVYDPLQPELDSGGGGSDIDPYKEFGSSYQLLNFLPLDFFPDLNALVDTATALYEEELTGREHCSPHHTAIRQALVCWDELTKLIAWMSSNITSEQVRTIIVNHVNDTWGLKVRQSLWFHLSCLTFGQHTVQEFLVSFGVWIRTPAPYRPPNAPILSTLPEHTVIC

SEQ ID NO: 11257 - protein, 1300 aa, Artificial Sequence
  SARS-CoV-2/India/1-27/2020__EPI_ISL_413522 spike protein (1-1146)(G888C_L1033C) WhcAg construct
MFVFLVLLPLVSSQCVNLTTRTQLPPAYTNSFTRGVYYPDKVFRSSVLHSTQDLFLPFFSNVTWFHAIHVSGTNGTKRFDNPVLPFNDGVYFASTEKSNIIRGWIFGTTLDSKTQSLLIVNNATNVVIKVCEFQFCNDPFLGVYHKNNKSWMESEFRVYSSANNCTFEYVSQPFLMDLEGKQGNFKNLREFVFKNIDGYFKIYSKHTPINLVRDLPQGFSALEPLVDLPIGINITRFQTLLALHRSYLTPGDSSSGWTAGAAAYYVGYLQPRTFLLKYNENGTITDAVDCALDPLSETKCTLKSFTVEKGIYQTSNFRVQPTESIVRFPNITNLCPFGEVFNATRFASVYAWNRKRISNCVADYSVLYNSASFSTFKCYGVSPTKLNDLCFTNVYADSFVIRGDEVIQIAPGQTGKIADYNYKLPDDFTGCVIAWNSNNLDSKVGGNYNYLYRLFRKSNLKPFERDISTEIYQAGSTPCNGVEGFNCYFPLQSYGFQPTNGVGYQPYRVVVLSFELLHAPATVCGPKKSTNLVKNKCVNFNFNGLTGTGVLTESNKKFLPFQQFGRDIADTTDAVRDPQTLEILDITPCSFGGVSVITPGTNTSNQVAVLYQDVNCTEVPVAIHADQLTPTWRVYSTGSNVFQTRAGCLIGAEHVNNSYECDIPIGAGICASYQTQTNSPRRARSVASQSIIAYTMSLGAENSVAYSNNSIAIPTNFTISVTTEILPVSMTKTSVDCTMYICGDSTECSNLLLQYGSFCTQLNRALTGIAVEQDKNTQEVFAQVKQIYKTPPIKDFGGFNFSQILPDPSKPSKRSFIEDLLFNKVTLADAGFIKQYGDCLGDIAARDLICAQKFNGLTVLPPLLTDEMIAQYTSALLAGTITSGWTFCAGAALQIPFAMQMAYRFNGIGVTQNVLYENQKLIANQFNSAIGKIQDSLSSTASALGKLQDVVNQNAQALNTLVKQLSSNFGAISSVLNDILSRLDKVEAEVQIDRLITGRLQSLQTYVTQQLIRAAEIRASANLAATKMSECVCGQSKRVDFCGKGYHLMSFPQSAPHGVVFLHVTYVPAQEKNFTTAPAICHDGKAHFPREGVFVSNGTHWFVTQRNFYEPQIITTDNTFVSGNCDVVIGIVNNTVYDPLQPELDSGGGGSDIDPYKEFGSSYQLLNFLPLDFFPDLNALVDTATALYEEELTGREHCSPHHTAIRQALVCWDELTKLIAWMSSNITSEQVRTIIVNHVNDTWGLKVRQSLWFHLSCLTFGQHTVQEFLVSFGVWIRTPAPYRPPNAPILSTLPEHTVIC

SEQ ID NO: 11258 - protein, 1295 aa, Artificial Sequence
  SARS-CoV-2/pangolin/Guangxi/P4L/2017__EPI_ISL_410538 spike protein (1-1141)(G883C_L1028C) WhcAg construct
MFVFLFVLPLVSSQCVNLTTRTGIPPGYTNSSTRGVYYPDKVFRSSILHLTQDLFLPFFSNVTWFNTINYQGGFKKFDNPVLPFNDGVYFASTEKSNIIRGWIFGTTLDARTQSLLIVNNATNVVIKVCEFQFCTDPFLGVYYHNNNKTWVENEFRVYSSANNCTFEYISQPFLMDLEGKQGNFKNLREFVFKNVDGYFKIYSKHTPIDLVRDLPRGFAALEPLVDLPIGINITRFQTLLALHRSYLTPGNLESGWTTGAAAYYVGYLQQRTFLLSYNQNGTITDAVDCSLDPLSETKCTLKSLTVEKGIYQTSNFRVQPTISIVRFPNITNLCPFGEVFNASKFASVYAWNRKRISNCVADYSVLYNSTSFSTFKCYGVSPTKLNDLCFTNVYADSFVVKGDEVRQIAPGQTGVIADYNYKLPDDFTGCVIAWNSVKQDALTGGNYGYLYRLFRKSKLKPFERDISTEIYQAGSTPCNGQVGLNCYYPLERYGFHPTTGVNYQPFRVVVLSFELLNGPATVCGPKLSTTLVKDKCVNFNFNGLTGTGVLTTSKKQFLPFQQFGRDISDTTDAVRDPQTLEILDITPCSFGGVSVITPGTNTSNQVAVLYQDVNCTEVPMAIHAEQLTPAWRVYSAGANVFQTRAGCLVGAEHVNNSYECDIPVGAGICASYHSMSSLRSVNQRSIIAYTMSLGAENSVAYSNNSIAIPTNFTISVTTEILPVSMTKTSVDCTMYICGDSIECSNLLLQYGSFCTQLNRALTGIAVEQDKNTQEVFAQVKQIYKTPPIKDFGGFNFSQILPDPSKPSKRSFIEDLLFNKVTLADAGFIKQYGDCLGDIAARDLICAQKFNGLTVLPPLLTDEMIAQYTSALLAGTITSGWTFCAGAALQIPFAMQMAYRFNGIGVTQNVLYENQKLIANQFNSAIGKIQDSLSSTASALGKLQDVVNQNAQALNTLVKQLSSNFGAISSVLNDILSRLDKVEAEVQIDRLITGRLQSLQTYVTQQLIRAAEIRASANLAATKMSECVCGQSKRVDFCGKGYHLMSFPQSAPHGVVFLHVTYVPAQEKNFTTAPAICHEGKAHFPREGVFVSNGTHWFITQRNFYEPQIITTDNTFVSGSCDVVIGIVNNTVYDPLQPELDSGGGGSDIDPYKEFGSSYQLLNFLPLDFFPDLNALVDTATALYEEELTGREHCSPHHTAIRQALVCWDELTKLIAWMSSNITSEQVRTIIVNHVNDTWGLKVRQSLWFHLSCLTFGQHTVQEFLVSFGVWIRTPAPYRPPNAPILSTLPEHTVIC

SEQ ID NO: 11259 - protein, 1295 aa, Artificial Sequence
  SARS-CoV-2/pangolin/Guangxi/P5L/2017__EPI_ISL_410540 spike protein (1-1141)(G883C_L1028C) WhcAg construct
MFVFLFVLPLVSSQCVNLTTRTGIPPGYTNSSTRGVYYPDKVFRSSILHLTQDLFLPFFSNVTWFNTINYQGGFKKFDNPVLPFNDGVYFASTEKSNIIRGWIFGTTLDARTQSLLIVNNATNVVIKVCEFQFCTDPFLGVYYHNNNKTWVENEFRVYSSANNCTFEYISQPFLMDLEGKQGNFKNLREFVFKNVDGYFKIYSKHTPIDLVRDLPRGFAALEPLVDLPIGINITRFQTLLALHRSYLTPGKLESGWTTGAAAYYVGYLQQRTFLLSYNQNGTITDAVDCSLDPLSETKCTLKSLTVEKGIYQTSNFRVQPTISIVRFPNITNLCPFGEVFNASKFASVYAWNRKRISNCVADYSVLYNSTSFSTFKCYGVSPTKLNDLCFTNVYADSFVVKGDEVRQIAPGQTGVIADYNYKLPDDFTGCVIAWNSVKQDALTGGNYGYLYRLFRKSKLKPFERDISTEIYQAGSTPCNGQVGLNCYYPLERYGFHPTTGVNYQPFRVVVLSFELLNGPATVCGPKLSTTLVKDKCVNFNFNGLTGTGVLTTSKKQFLPFQQFGRDISDTTDAVRDPQTLEILDITPCSFGGVSVITPGTNTSNQVAVLYQDVNCTEVPMAIHAEQLTPAWRVYSAGANVFQTRAGCLVGAEHVNNSYECDIPVGAGICASYHSMSSFRSVNQRSIIAYTMSLGAENSVAYSNNSIAIPTNFTISVTTEILPVSMTKTSVDCTMYICGDSIECSNLLLQYGSFCTQLNRALTGIAVEQDKNTQEVFAQVKQIYKTPPIKDFGGFNFSQILPDPSKPSKRSFIEDLLFNKVTLADAGFIKQYGDCLGDIAARDLICAQKFNGLTVLPPLLTDEMIAQYTSALLAGTITSGWTFCAGAALQIPFAMQMAYRFNGIGVTQNVLYENQKLIANQFNSAIGKIQDSLSSTASALGKLQDVVNQNAQALNTLVKQLSSNFGAISSVLNDILSRLDKVEAEVQIDRLITGRLQSLQTYVTQQLIRAAEIRASANLAATKMSECVCGQSKRVDFCGKGYHLMSFPQSAPHGVVFLHVTYVPAQEKNFTTAPAICHEGKAHFPREGVFVSNGTHWFITQRNFYEPQIITTDNTFVSGSCDVVIGIVNNTVYDPLQPELDSGGGGSDIDPYKEFGSSYQLLNFLPLDFFPDLNALVDTATALYEEELTGREHCSPHHTAIRQALVCWDELTKLIAWMSSNITSEQVRTIIVNHVNDTWGLKVRQSLWFHLSCLTFGQHTVQEFLVSFGVWIRTPAPYRPPNAPILSTLPEHTVIC

SEQ ID NO: 11260 - protein, 1295 aa, Artificial Sequence
  SARS-CoV-2/pangolin/Guangxi/P5E/2017__EPI_ISL_410541 spike protein (1-1141)(G883C_L1028C) WhcAg construct
MFVFLFVLPLVSSQCVNLTTRTGIPPGYTNSSTRGVYYPDKVFRSSILHLTQDLFLPFFSNVTWFNTITYQGGSKKFDNPVLPFNDGVYFASTEKSNIIRGWIFGTTLDARTQSLLIVNNATNVVIKVCEFQFCTDPFLGVYYHNNNKTWVENEFRVYSSANNCTFEYISQPFLMDLEGKQGNFKNLREFVFKNVDGYFKIYSKHTPIDLVRDLPRGFAALEPLVDLPIGINITRFQTLLALHRSYLTPGKLESGWTTGAAAYYVGYLQQRTFLLSYNQNGTITDAVDCSLDPLSETKCTLKSLTVEKGIYQTSNFRVQPTISIVRFPNITNLCPFGEVFNASKFASVYAWNRKRISNCVADYSVLYNSTSFSTFKCYGVSPTKLNDLCFTNVYADSFVVKGDEVRQIAPGQTGVIADYNYKLPDDFTGCVIAWNSVKQDALTGDNYGYLYRLFRKSKLKPFERDISTEIYQAGSTPCNGQVGLNCYYPLERYGFHPTTGVNYQPFRVVVLSFELLNGPATVCGPKLSTTLVKDKCVNFNFNGLTGTGVLTTSKKQFLPFQQFGRDISDTTDAVRDPQTLEILDITPCSFGGVSVITPGTNTSNQVAVLYQDVNCTEVPMAIHAEQLTPAWRVYSAGANVFQTRAGCLVGAEHVNNSYECDIPVGAGICASYHSMSSFRSVNQRSIIAYTMSLGAENSVAYSNNSIAIPTNFTISVTTEILPVSMTKTSVDCTMYICGDSIECSNLLLQYGSFCTQLNRALTGIAVEQDKNTQEVFAQVKQIYKTPPIKDFGGFNFSQILPDPSKPSKRSFIEDLLFNKVTLADAGFIKQYGDCLGDIAARDLICAQKFNGLTVLPPLLTDEMIAQYTSALLAGTITSGWTFCAGAALQIPFAMQMAYRFNGIGVTQNVLYENQKLIANQFNSAIGKIQDSLSSTASALGKLQDVVNQNAQALNTLVKQLSSNFGAISSVLNDILSRLDKVEAEVQIDRLITGRLQSLQTYVTQQLIRAAEIRASANLAATKMSECVCGQSKRVDFCGKGYHLMSFPQSAPHGVVFLHVTYVPAQEKNFTTAPAICHEGKAHFPREGVFVSNGTHWFITQRNFYEPQIITTDNTFVSGSCDVVIGIVNNTVYDPLQPELDSGGGGSDIDPYKEFGSSYQLLNFLPLDFFPDLNALVDTATALYEEELTGREHCSPHHTAIRQALVCWDELTKLIAWMSSNITSEQVRTIIVNHVNDTWGLKVRQSLWFHLSCLTFGQHTVQEFLVSFGVWIRTPAPYRPPNAPILSTLPEHTVIC

SEQ ID NO: 11261 - protein, 1293 aa, Artificial Sequence
  SARS-CoV-2/pangolin/Guangxi/P1E/2017__EPI_ISL_410539 spike protein (1-1139)(G881C_L1026C) WhcAg construct
MFVFLFVLPLVSSQCVNLTTRTGIQPGYTNSSTRGVYYPDKVFRSSILHLTQDLFLPFFSNVTWFNTINYQGGFKKFDNPVLPFNDGVYFASTEKSNIIRGWIFGTTLDARTQSLLIVNNATNVVIKVCEFQFCTDPFLGVYYHNNNKTWVENEFRVYSSANNCTFEYISQPFLMDLEGKQGNFKNLREFVFKNVDGYFKIYSKHTPIDLVRDLPRGFAALEPLVDLPIGINITRFQTLLALHRSYLTPGKLESGWTTGAAAYYVGYLQQRTFLLSYNQNGTITDAVDCSLDPLSETKCTLKSLTVEKGIYQTSNFRVQPTISIVRFPNITNLCPFGEVFNASKFASVYAWNRKRISNCVADYSVLYNSTSFSTFKCYGVSPTKLNDLCFTNVYADSFVVKGDEVRQIAPGQTGVIADYNYKLPDDFTGCVIAWNSVKQDALTGGNYLYRLFRKSKLKPFERDISTEIYQAGSTPCNGQVGLNCYYPLERYGFHPTTGVNYQPFRVVVLSFELLNGPATVCGPKLSTTLVKDKCVNFNFNGLTGTGVLTTSKKQFLPFQQFGRDISDTTDAVRDPQTLEILDITPCSFGGVSVITPGTNTSNQVAVLYQDVNCTEVPMAIHAEQLTPAWRVYSAGANVFQTRAGCLVGAEHVNNSYECDIPVGAGICASYHSMSSLRSVNQRSIIAYTMSLGAENSVAYSNNSIAIPTNFTISVTTEILPVSMTKTSVDCTMYICGDSIECSNLLLQYGSFCTQLNRALTGIAVEQDKNTQEVFAQVKQIYKTPPIKDFGGFNFSQILPDPSKPSKRSFIEDLLFNKVTLADAGFIKQYGDCLGDIAARDLICAQKFNGLTVLPPLLTDEMIAQYTSALLAGTITSGWTFCAGAALQIPFAMQMAYRFNGIGVTQNVLYENQKLIANQFNSAIGKIQDSLSSTASALGKLQDVVNQNAQALNTLVKQLSSNFGAISSVLNDILSRLDKVEAEVQIDRLITGRLQSLQTYVTQQLIRAAEIRASANLAATKMSECVCGQSKRVDFCGKGYHLMSFPQSAPHGVVFLHVTYVPAQEKNFTTAPAICHEGKAHFPREGVFVSNGTHWFITQRNFYEPQIITTDNTFVSGSCDVVIGIVNNTVYDPLQPELDSGGGGSDIDPYKEFGSSYQLLNFLPLDFFPDLNALVDTATALYEEELTGREHCSPHHTAIRQALVCWDELTKLIAWMSSNITSEQVRTIIVNHVNDTWGLKVRQSLWFHLSCLTFGQHTVQEFLVSFGVWIRTPAPYRPPNAPILSTLPEHTVIC

SEQ ID NO: 11262 - protein, 1301 aa, Artificial Sequence
  SARS-CoV-2/Wuhan/WIV05/2019__EPI_ISL_402128 spike protein (1-1147)(I909C_Y1047C) WhcAg construct
MFVFLVLLPLVSSQCVNLTTRTQLPPAYTNSFTRGVYYPDKVFRSSVLHSTQDLFLPFFSNVTWFHAIHVSGTNGTKRFDNPVLPFNDGVYFASTEKSNIIRGWIFGTTLDSKTQSLLIVNNATNVVIKVCEFQFCNDPFLGVYYHKNNKSWMESEFRVYSSANNCTFEYVSQPFLMDLEGKQGNFKNLREFVFKNIDGYFKIYSKHTPINLVRDLPQGFSALEPLVDLPIGINITRFQTLLALHRSYLTPGDSSSGWTAGAAAYYVGYLQPRTFLLKYNENGTITDAVDCALDPLSETKCTLKSFTVEKGIYQTSNFRVQPTESIVRFPNITNLCPFGEVFNATRFASVYAWNRKRISNCVADYSVLYNSASFSTFKCYGVSPTKLNDLCFTNVYADSFVIRGDEVRQIAPGQTGKIADYNYKLPDDFTGCVIAWNSNNLDSKVGGNYNYLYRLFRKSNLKPFERDISTEIYQAGSTPCNGVEGFNCYFPLQSYGFQPTNGVGYQPYRVVVLSFELLHAPATVCGPKKSTNLVKNKCVNFNFNGLTGTGVLTESNKKFLPFQQFGRDIADTTDAVRDPQTLEILDITPCSFGGVSVITPGTNTSNQVAVLYQDVNCTEVPVAIHADQLTPTWRVYSTGSNVFQTRAGCLIGAEHVNNSYECDIPIGAGICASYQTQTNSPRRARSVASQSIIAYTMSLGAENSVAYSNNSIAIPTNFTISVTTEILPVSMTKTSVDCTMYICGDSTECSNLLLQYGSFCTQLNRALTGIAVEQDKNTQEVFAQVKQIYKTPPIKDFGGFNFSQILPDPSKPSKRSFIEDLLFNKVTLADAGFIKQYGDCLGDIAARDLICAQKFNGLTVLPPLLTDEMIAQYTSALLAGTITSGWTFGAGAALQIPFAMQMAYRFNGCGVTQNVLYENQKLIANQFNSAIGKIQDSLSSTASALGKLQDVVNQNAQALNTLVKQLSSNFGAISSVLNDILSRLDKVEAEVQIDRLITGRLQSLQTYVTQQLIRAAEIRASANLAATKMSECVLGQSKRVDFCGKGCHLMSFPQSAPHGVVFLHVTYVPAQEKNFTTAPAICHDGKAHFPREGVFVSNGTHWFVTQRNFYEPQIITTDNTFVSGNCDVVIGIVNNTVYDPLQPELDSGGGGSDIDPYKEFGSSYQLLNFLPLDFFPDLNALVDTATALYEEELTGREHCSPHHTAIRQALVCWDELTKLIAWMSSNITSEQVRTIIVNHVNDTWGLKVRQSLWFHLSCLTFGQHTVQEFLVSFGVWIRTPAPYRPPNAPILSTLPEHTVIC

SEQ ID NO: 11263 - protein, 1297 aa, Artificial Sequence
  SARS-CoV-2/bat/Yunnan/RaTG13/2013__EPI_ISL_402131 spike protein (1-1143)(I905C_Y1043C) WhcAg construct
MFVFLVLLPLVSSQCVNLTTRTQLPPAYTNSSTRGVYYPDKVFRSSVLHLTQDLFLPFFSNVTWFHAIHVSGTNGIKRFDNPVLPFNDGVYFASTEKSNIIRGWIFGTTLDSKTQSLLIVNNATNVVIKVCEFQFCNDPFLGVYYHKNNKSWMESEFRVYSSANNCTFEYVSQPFLMDLEGKQGNFKNLREFVFKNIDGYFKIYSKHTPINLVRDLPPGFSALEPLVDLPIGINITRFQTLLALHRSYLTPGDSSSGWTAGAAAYYVGYLQPRTFLLKYNENGTITDAVDCALDPLSETKCTLKSFTVEKGIYQTSNFRVQPTDSIVRFPNITNLCPFGEVFNATTFASVYAWNRKRISNCVADYSVLYNSTSFSTFKCYGVSPTKLNDLCFTNVYADSFVITGDEVRQIAPGQTGKIADYNYKLPDDFTGCVIAWNSKHIDAKEGGNFNYLYRLFRKANLKPFERDISTEIYQAGSKPCNGQTGLNCYYPLYRYGFYPTDGVGHQPYRVVVLSFELLNAPATVCGPKKSTNLVKNKCVNFNFNGLTGTGVLTESNKKFLPFQQFGRDIADTTDAVRDPQTLEILDITPCSFGGVSVITPGTNASNQVAVLYQDVNCTEVPVAIHADQLTPTWRVYSTGSNVFQTRAGCLIGAEHVNNSYECDIPIGAGICASYQTQTNSRSVASQSIIAYTMSLGAENSVAYSNNSIAIPTNFTISVTTEILPVSMTKTSVDCTMYICGDSTECSNLLLQYGSFCTQLNRALTGIAVEQDKNTQEVFAQVKQIYKTPPIKDFGGFNFSQILPDPSKPSKRSFIEDLLFNKVTLADAGFIKQYGDCLGDIAARDLICAQKFNGLTVLPPLLTDEMIAQYTSALLAGTITSGWTFGAGAALQIPFAMQMAYRFNGCGVTQNVLYENQKLIANQFNSAIGKIQDSLSSTASALGKLQDVVNQNAQALNTLVKQLSSNFGAISSVLNDILSRLDKVEAEVQIDRLITGRLQSLQTYVTQQLIRAAEIRASANLAATKMSECVLGQSKRVDFCGKGCHLMSFPQSAPHGVVFLHVTYVPAQEKNFTTAPAICHDGKAHFPREGVFVSNGTHWFVTQRNFYEPQIITTDNTFVSGSCDVVIGIVNNTVYDPLQPELDSGGGGSDIDPYKEFGSSYQLLNFLPLDFFPDLNALVDTATALYEEELTGREHCSPHHTAIRQALVCWDELTKLIAWMSSNITSEQVRTIIVNHVNDTWGLKVRQSLWFHLSCLTFGQHTVQEFLVSFGVWIRTPAPYRPPNAPILSTLPEHTVIC

SEQ ID NO: 11264 - protein, 1301 aa, Artificial Sequence
  SARS-CoV-2/Wuhan/HBCDC-HB-01/2019__EPI_ISL_402132 spike protein (1-1147)(I909C_Y1047C) WhcAg construct
MFVFLVLLPLVSSQCVNLTTRTQLPPAYTNSITRGVYYPDKVFRSSVLHSTQDLFLPFFSNVTWFHAIHVSGTNGTKRFDNPVLPFNDGVYFASTEKSNIIRGWIFGTTLDSKTQSLLIVNNATNVVIKVCEFQFCNDPFLGVYYHKNNKSWMESEFRVYSSANNCTFEYVSQPFLMDLEGKQGNFKNLREFVFKNIDGYFKIYSKHTPINLVRDLPQGFSALEPLVDLPIGINITRFQTLLALHRSYLTPGDSSSGWTAGAAAYYVGYLQPRTFLLKYNENGTITDAVDCALDPLSETKCTLKSFTVEKGIYQTSNFRVQPTESIVRFPNITNLCPFGEVFNATRFASVYAWNRKRISNCVADYSVLYNSASFSTFKCYGVSPTKLNDLCFTNVYADSFVIRGDEVRQIAPGQTGKIADYNYKLPDDFTGCVIAWNSNNLDSKVGGNYNYLYRLFRKSNLKPFERDISTEIYQAGSTPCNGVEGFNCYFPLQSYGFQPTNGVGYQPYRVVVLSFELLHAPATVCGPKKSTNLVKNKCVNFNFNGLTGTGVLTESNKKFLPFQQFGRDIADTTDAVRDPQTLEILDITPCSFGGVSVITPGTNTSNQVAVLYQDVNCTEVPVAIHADQLTPTWRVYSTGSNVFQTRAGCLIGAEHVNNSYECDIPIGAGICASYQTQTNSPRRARSVASQSIIAYTMSLGAENSVAYSNNSIAIPTNFTISVTTEILPVSMTKTSVDCTMYICGDSTECSNLLLQYGSFCTQLNRALTGIAVEQDKNTQEVFAQVKQIYKTPPIKDFGGFNFSQILPDPSKPSKRSFIEDLLFNKVTLADAGFIKQYGDCLGDIAARDLICAQKFNGLTVLPPLLTDEMIAQYTSALLAGTITSGWTFGAGAALQIPFAMQMAYRFNGCGVTQNVLYENQKLIANQFNSAIGKIQDSLSSTASALGKLQDVVNQNAQALNTLVKQLSSNFGAISSVLNDILSRLDKVEAEVQIDRLITGRLQSLQTYVTQQLIRAAEIRASANLAATKMSECVLGQSKRVDFCGKGCHLMSFPQSAPHGVVFLHVTYVPAQEKNFTTAPAICHDGKAHFPREGVFVSNGTHWFVTQRNFYEPQIITTDNTFVSGNCDVVIGIVNNTVYDPLQPELDSGGGGSDIDPYKEFGSSYQLLNFLPLDFFPDLNALVDTATALYEEELTGREHCSPHHTAIRQALVCWDELTKLIAWMSSNITSEQVRTIIVNHVNDTWGLKVRQSLWFHLSCLTFGQHTVQEFLVSFGVWIRTPAPYRPPNAPILSTLPEHTVIC

SEQ ID NO: 11265 - protein, 1301 aa, Artificial Sequence
  SARS-CoV-2/Guangdong/20SF028/2020__EPI_ISL_403936 spike protein (1-1147)(I909C_Y1047C) WhcAg construct
MFVFLVLLPLVSSQCVNLTTRTQLPPAYTNSFTRGVYYPDKVFRSSVLYSTQDLFLPFFSNVTWFHAIHVSGTNGTKRFDNPVLPFNDGVYFASTEKSNIIRGWIFGTTLDSKTQSLLIVNNATNVVIKVCEFQFCNDPFLGVYYHKNNKSWMESEFRVYSSANNCTFEYVSQPFLMDLEGKQGNFKNLREFVFKNIDGYFKIYSKHTPINLVRDLPQGFSALEPLVDLPIGINITRFQTLLALHRSYLTPGDSSSGWTAGAAAYYVGYLQPRTFLLKYNENGTITDAVDCALDPLSETKCTLKSFTVEKGIYQTSNFRVQPTESIVRFPNITNLCPFGEVFNATRFASVYAWNRKRISNCVADYSVLYNSASFSTFKCYGVSPTKLNDLCFTNVYADSFVIRGDEVRQIAPGQTGKIADYNYKLPDDFTGCVIAWNSNNLDSKVGGNYNYLYRLFRKSNLKPFERDISTEIYQAGSTPCNGVEGFNCYFPLQSYGFQPTNGVGYQPYRVVVLSFELLHAPATVCGPKKSTNLVKNKCVNFNFNGLTGTGVLTESNKKFLPFQQFGRDIADTTDAVRDPQTLEILDITPCSFGGVSVITPGTNTSNQVAVLYQDVNCTEVPVAIHADQLTPTWRVYSTGSNVFQTRAGCLIGAEHVNNSYECDIPIGAGICASYQTQTNSPRRARSVASQSIIAYTMSLGAENSVAYSNNSIAIPTNFTISVTTEILPVSMTKTSVDCTMYICGDSTECSNLLLQYGSFCTQLNRALTGIAVEQDKNTQEVFAQVKQIYKTPPIKDFGGFNFSQILPDPSKPSKRSFIEDLLFNKVTLADAGFIKQYGDCLGDIAARDLICAQKFNGLTVLPPLLTDEMIAQYTSALLAGTITSGWTFGAGAALQIPFAMQMAYRFNGCGVTQNVLYENQKLIANQFNSAIGKIQDSLSSTASALGKLQDVVNQNAQALNTLVKQLSSNFGAISSVLNDILSRLDKVEAEVQIDRLITGRLQSLQTYVTQQLIRAAEIRASANLAATKMSECVLGQSKRVDFCGKGCHLMSFPQSAPHGVVFLHVTYVPAQEKNFTTAPAICHDGKAHFPREGVFVSNGTHWFVTQRNFYEPQIITTDNTFVSGNCDVVIGIVNNTVYDPLQPELDSGGGGSDIDPYKEFGSSYQLLNFLPLDFFPDLNALVDTATALYEEELTGREHCSPHHTAIRQALVCWDELTKLIAWMSSNITSEQVRTIIVNHVNDTWGLKVRQSLWFHLSCLTFGQHTVQEFLVSFGVWIRTPAPYRPPNAPILSTLPEHTVIC

SEQ ID NO: 11266 - protein, 1301 aa, Artificial Sequence
  SARS-CoV-2/Shenzhen/SZTH-001/2020__EPI_ISL_406592 spike protein (1-1147)(I909C_Y1047C) WhcAg construct
MFVFLVLLPLVSSQCVNLTTRTQLPPAYTNSFTRGVYYPDKVFRSSVLHSTQDLFLPFFSNVTWFHAIHVSGTNGTKRFDNPVLPFNDGVYFASTEKSNIIRGWIFGTTLDSKTQSLLIVNNATNVVIKVCEFQFCNDPFLGVYYHKNNKSWMESEFRVYSSANNCTFEYVSQPFLMDLEGKQGNFKNLREFVFKNIDGYFKIYSKHTPINLVRDLPQGFSALEPLVDLPIGINITRFQTLLALHRSYLTPGDSSSGWTAGAAAYYVGYLQPRTFLLKYNENGTITDAVDCALDPLSETKCTLKSFTVEKGIYQTSNFRVQPTESIVRFPNITNLCPFGEVFNATRFASVYAWNRKRISNCVADYSVLYNSASFSTFKCYGVSPTKLNDLCFTNVYADSFVIRGDEVRQIAPGQTGKIADYNYKLPDDFTGCVIAWNSNNLDSKVGGNYNYLYRLFRKSNLKPFERDISTEIYQAGSTPCNGVEGFNCYFPLQSYGFQPTNGVGYQPYRVVVLSFELLHAPATVCGPKKSTNLVKNKCVNFNFNGLTGTGVLTESNKKFLPFQQFGRDIADTTDAVRDPQTLEILDITPCSFGGVSVITPGTNTSNQVAVLYQDVNCTEVPVAIHADQLTPTWRVYSTGSNVFQTRAGCLIGAEHVNNSYECDIPIGAGICASYQTQTNSPRRARSVASQSIIAYTMSLGAENSVAYSNNSIAIPTNFTISVTTEILPVSMTKTSVDCTMYICGDSTECSNLLLQYGSFCTQLNRALTGIAVEQDKNTQEVFAQVKQIYKTPPIKDFGGFNFSQILPDPSKPSKRSFIEDLLFNKVTLADAGFIKQYGDCLGDIAARDLICAQKFNGLTVLPPLLTDEMIAQYTSALLAGTITSGWTFGAGAALQIPFAMQMAYRFNGCGVTQNVLYENQKLIANQFNSAIGKIQDSLSSTASALGKLQDVVNQNAQALNTLVKQLSSNFGAISSVLNDILSRLDKVEAEVQIDRLITGRLQSLQTYVTQQLIRAAEIRASANLAATKMSECVLGQSKRVDFCGKGCHLMSFPQSAPHGVVFLHVTYVPAQEKNFTTAPAICHDGKAHFPREGVFVSNGTHWFVTQRNFYEPQIITTDNTFVSGNCDVLIGIVNNTVYDPLQPELDSGGGGSDIDPYKEFGSSYQLLNFLPLDFFPDLNALVDTATALYEEELTGREHCSPHHTAIRQALVCWDELTKLIAWMSSNITSEQVRTIIVNHVNDTWGLKVRQSLWFHLSCLTFGQHTVQEFLVSFGVWIRTPAPYRPPNAPILSTLPEHTVIC

SEQ ID NO: 11267 - protein, 1301 aa, Artificial Sequence
  SARS-CoV-2/Shenzhen/SZTH-004/2020__EPI_ISL_406595 spike protein (1-1147)(I909C_Y1047C) WhcAg construct
MFVFLVLLPLVSSQCVNLTTRTQLPPAYTNSFTRGVYYPDKVFRSSVLHSTQDLFLPFFSNVTWFHAIHVSGTNGTKRFDNPVLPFNDGVYFASTEKSNIIRGWIFGTTLDSKTQSLLIVNNATNVVIKVCEFQFCNDPFLGVYYHKNNKSWMESEFRVYSSANNCTFEYVSQPFLMDLEGKQGNFKNLREFVFKNIDGYFKIYSKHTPINLVRDLPQGFSALEPLVDLPIGINITRFQTLLALHRSYLTPGDSSSGWTAGAAAYYVGYLQPRTFLLKYNENGTITDAVDCALDPLSETKCTLKSFTVEKGIYQTSNFRVQPTESIVRFPNITNLCPFGEVFNATRFASVYAWDRKRISNCVAYYSVLYNSASFSTFKCYGVSPTKLNDLCFTNVYADSFVIRGDEVRQIAPGQTGKIADYNYKLPDDFTGCVIAWNSNNLDSKVGGNYNYLYRLFRKSNLKPFERDISTEIYQAGSTPCNGVEGFNCYFPLQSYGFQPTNGVGYQPYRVVVLSFELLHAPATVCGPKKSTNLVKNKCVNFNFNGLTGTGVLTESNKKFLPFQQFGRDIADTTDAVRDPQTLEILDITPCSFGGVSVITPGTNTSNQVAVLYQDVNCTEVPVAIHADQLTPTWRVYSTGSNVFQTRAGCLIGAEHVNNSYECDIPIGAGICASYQTQTNSPRRARSVASQSIIAYTMSLGAENSVAYSNNSIAIPTNFTISVTTEILPVSMTKTSVDCTMYICGDSTECSNLLLQYGSFCTQLNRALTGIAVEQDKNTQEVFAQVKQIYKTPPIKDFGGFNFSQILPDPSKPSKRSFIEDLLFNKVTLADAGFIKQYGDCLGDIAARDLICAQKFNGLTVLPPLLTDEMIAQYTSALLAGTITSGWTFGAGAALQIPFAMQMAYRFNGCGVTQNVLYENQKLIANQFNSAIGKIQDSLSSTASALGKLQDVVNQNAQALNTLVKQLSSNFGAISSVLNDILSRLDKVEAEVQIDRLITGRLQSLQTYVTQQLIRAAEIRASANLAATKMSECVLGQSKRVDFCGKGCHLMSFPQSAPHGVVFLHVTYVPAQEKNFTTAPAICHDGKAHFPREGVFVSNGTHWFVTQRNFYEPQIITTDNTFVSGNCDVVIGIVNNTVYDPLQPELDSGGGGSDIDPYKEFGSSYQLLNFLPLDFFPDLNALVDTATALYEEELTGREHCSPHHTAIRQALVCWDELTKLIAWMSSNITSEQVRTIIVNHVNDTWGLKVRQSLWFHLSCLTFGQHTVQEFLVSFGVWIRTPAPYRPPNAPILSTLPEHTVIC

SEQ ID NO: 11268 - protein, 1301 aa, Artificial Sequence
  SARS-CoV-2/France/IDF0372/2020__EPI_ISL_406596 spike protein (1-1147)(I909C_Y1047C) WhcAg construct
MFVFLVLLPLVSSQCVNLTTRTQLPPAYTNSFTRGVYYPDKVFRSSVLHSTQDLFLPFFSNVTWFHAIHVSGTNGTKRFDNPVLPFNDGVYFASTEKSNIIRGWIFGTTLDSKTQSLLIVNNATNVVIKVCEFQFCNDPFLGVYYHKNNKSWMESEFRVYSSANNCTFEYVSQPFLMDLEGKQGNFKNLREFVFKNIDGYFKIYSKHTPINLVRDLPQGFSALEPLVDLPIGINITRFQTLLALHRSYLTPGDSSSGWTAGAAAYYVGYLQPRTFLLKYNENGTITDAVDCALDPLSETKCTLKSFTVEKGIYQTSNFRVQPTESIVRFPNITNLCPFGEVFNATRFASVYAWNRKRISNCVADYSFLYNSASFSTFKCYGVSPTKLNDLCFTNVYADSFVIRGDEVRQIAPGQTGKIADYNYKLPDDFTGCVIAWNSNNLDSKVGGNYNYLYRLFRKSNLKPFERDISTEIYQAGSTPCNGVEGFNCYFPLQSYGFQPTNGVGYQPYRVVVLSFELLHAPATVCGPKKSTNLVKNKCVNFNFNGLTGTGVLTESNKKFLPFQQFGRDIADTTDAVRDPQTLEILDITPCSFGGVSVITPGTNTSNQVAVLYQDVNCTEVPVAIHADQLTPTWRVYSTGSNVFQTRAGCLIGAEHVNNSYECDIPIGAGICASYQTQTNSPRRARSVASQSIIAYTMSLGAENSVAYSNNSIAIPTNFTISVTTEILPVSMTKTSVDCTMYICGDSTECSNLLLQYGSFCTQLNRALTGIAVEQDKNTQEVFAQVKQIYKTPPIKDFGGFNFSQILPDPSKPSKRSFIEDLLFNKVTLADAGFIKQYGDCLGDIAARDLICAQKFNGLTVLPPLLTDEMIAQYTSALLAGTITSGWTFGAGAALQIPFAMQMAYRFNGCGVTQNVLYENQKLIANQFNSAIGKIQDSLSSTASALGKLQDVVNQNAQALNTLVKQLSSNFGAISSVLNDILSRLDKVEAEVQIDRLITGRLQSLQTYVTQQLIRAAEIRASANLAATKMSECVLGQSKRVDFCGKGCHLMSFPQSAPHGVVFLHVTYVPAQEKNFTTAPAICHDGKAHFPREGVFVSNGTHWFVTQRNFYEPQIITTDNTFVSGNCDVVIGIVNNTVYDPLQPELDSGGGGSDIDPYKEFGSSYQLLNFLPLDFFPDLNALVDTATALYEEELTGREHCSPHHTAIRQALVCWDELTKLIAWMSSNITSEQVRTIIVNHVNDTWGLKVRQSLWFHLSCLTFGQHTVQEFLVSFGVWIRTPAPYRPPNAPILSTLPEHTVIC

SEQ ID NO: 11269 - protein, 1301 aa, Artificial Sequence
  SARS-CoV-2/Australia/VIC01/2020__EPI_ISL_406844 spike protein (1-1147)(I909C_Y1047C) WhcAg construct
MFVFLVLLPLVSSQCVNLTTRTQLPPAYTNSFTRGVYYPDKVFRSSVLHSTQDLFLPFFSNVTWFHAIHVSGTNGTKRFDNPVLPFNDGVYFASTEKSNIIRGWIFGTTLDSKTQSLLIVNNATNVVIKVCEFQFCNDPFLGVYYHKNNKSWMESEFRVYSSANNCTFEYVSQPFLMDLEGKQGNFKNLREFVFKNIDGYFKIYSKHTPINLVRDLPQGFSALEPLVDLPIGINITRFQTLLALHRRYLTPGDSSSGWTAGAAAYYVGYLQPRTFLLKYNENGTITDAVDCALDPLSETKCTLKSFTVEKGIYQTSNFRVQPTESIVRFPNITNLCPFGEVFNATRFASVYAWNRKRISNCVADYSVLYNSASFSTFKCYGVSPTKLNDLCFTNVYADSFVIRGDEVRQIAPGQTGKIADYNYKLPDDFTGCVIAWNSNNLDSKVGGNYNYLYRLFRKSNLKPFERDISTEIYQAGSTPCNGVEGFNCYFPLQSYGFQPTNGVGYQPYRVVVLSFELLHAPATVCGPKKSTNLVKNKCVNFNFNGLTGTGVLTESNKKFLPFQQFGRDIADTTDAVRDPQTLEILDITPCSFGGVSVITPGTNTSNQVAVLYQDVNCTEVPVAIHADQLTPTWRVYSTGSNVFQTRAGCLIGAEHVNNSYECDIPIGAGICASYQTQTNSPRRARSVASQSIIAYTMSLGAENSVAYSNNSIAIPTNFTISVTTEILPVSMTKTSVDCTMYICGDSTECSNLLLQYGSFCTQLNRALTGIAVEQDKNTQEVFAQVKQIYKTPPIKDFGGFNFSQILPDPSKPSKRSFIEDLLFNKVTLADAGFIKQYGDCLGDIAARDLICAQKFNGLTVLPPLLTDEMIAQYTSALLAGTITSGWTFGAGAALQIPFAMQMAYRFNGCGVTQNVLYENQKLIANQFNSAIGKIQDSLSSTASALGKLQDVVNQNAQALNTLVKQLSSNFGAISSVLNDILSRLDKVEAEVQIDRLITGRLQSLQTYVTQQLIRAAEIRASANLAATKMSECVLGQSKRVDFCGKGCHLMSFPQSAPHGVVFLHVTYVPAQEKNFTTAPAICHDGKAHFPREGVFVSNGTHWFVTQRNFYEPQIITTDNTFVSGNCDVVIGIVNNTVYDPLQPELDSGGGGSDIDPYKEFGSSYQLLNFLPLDFFPDLNALVDTATALYEEELTGREHCSPHHTAIRQALVCWDELTKLIAWMSSNITSEQVRTIIVNHVNDTWGLKVRQSLWFHLSCLTFGQHTVQEFLVSFGVWIRTPAPYRPPNAPILSTLPEHTVIC

SEQ ID NO: 11270 - protein, 1301 aa, Artificial Sequence
  SARS-CoV-2/Germany/BavPat1/2020__EPI_ISL_406862 spike protein (1-1147)(I909C_Y1047C) WhcAg construct
MFVFLVLLPLVSSQCVNLTTRTQLPPAYTNSFTRGVYYPDKVFRSSVLHSTQDLFLPFFSNVTWFHAIHVSGTNGTKRFDNPVLPFNDGVYFASTEKSNIIRGWIFGTTLDSKTQSLLIVNNATNVVIKVCEFQFCNDPFLGVYYHKNNKSWMESEFRVYSSANNCTFEYVSQPFLMDLEGKQGNFKNLREFVFKNIDGYFKIYSKHTPINLVRDLPQGFSALEPLVDLPIGINITRFQTLLALHRSYLTPGDSSSGWTAGAAAYYVGYLQPRTFLLKYNENGTITDAVDCALDPLSETKCTLKSFTVEKGIYQTSNFRVQPTESIVRFPNITNLCPFGEVFNATRFASVYAWNRKRISNCVADYSVLYNSASFSTFKCYGVSPTKLNDLCFTNVYADSFVIRGDEVRQIAPGQTGKIADYNYKLPDDFTGCVIAWNSNNLDSKVGGNYNYLYRLFRKSNLKPFERDISTEIYQAGSTPCNGVEGFNCYFPLQSYGFQPTNGVGYQPYRVVVLSFELLHAPATVCGPKKSTNLVKNKCVNFNFNGLTGTGVLTESNKKFLPFQQFGRDIADTTDAVRDPQTLEILDITPCSFGGVSVITPGTNTSNQVAVLYQGVNCTEVPVAIHADQLTPTWRVYSTGSNVFQTRAGCLIGAEHVNNSYECDIPIGAGICASYQTQTNSPRRARSVASQSIIAYTMSLGAENSVAYSNNSIAIPTNFTISVTTEILPVSMTKTSVDCTMYICGDSTECSNLLLQYGSFCTQLNRALTGIAVEQDKNTQEVFAQVKQIYKTPPIKDFGGFNFSQILPDPSKPSKRSFIEDLLFNKVTLADAGFIKQYGDCLGDIAARDLICAQKFNGLTVLPPLLTDEMIAQYTSALLAGTITSGWTFGAGAALQIPFAMQMAYRFNGCGVTQNVLYENQKLIANQFNSAIGKIQDSLSSTASALGKLQDVVNQNAQALNTLVKQLSSNFGAISSVLNDILSRLDKVEAEVQIDRLITGRLQSLQTYVTQQLIRAAEIRASANLAATKMSECVLGQSKRVDFCGKGCHLMSFPQSAPHGVVFLHVTYVPAQEKNFTTAPAICHDGKAHFPREGVFVSNGTHWFVTQRNFYEPQIITTDNTFVSGNCDVVIGIVNNTVYDPLQPELDSGGGGSDIDPYKEFGSSYQLLNFLPLDFFPDLNALVDTATALYEEELTGREHCSPHHTAIRQALVCWDELTKLIAWMSSNITSEQVRTIIVNHVNDTWGLKVRQSLWFHLSCLTFGQHTVQEFLVSFGVWIRTPAPYRPPNAPILSTLPEHTVIC

SEQ ID NO: 11271 - protein, 1301 aa, Artificial Sequence
  SARS-CoV-2/Wuhan/HBCDC-HB-02/2020__EPI_ISL_412978 spike protein (1-1147)(I909C_Y1047C) WhcAg construct
MFVFLVLLPLVSSQCVNLTTRTQLPPAYTNSFTRGVYYPDKVFRSSVLHSTQDLFLPFFSNVTWFHAIHVSGTNGTKRFDNPVLPFNDGVYFASTEKSNIIRGWIFGTTLDSKTQSLLIVNNATNVVIKVCEFQFCNDPFLGVYYHKNNKSWMESEFRVYSSANNCTFEYVSQPFLMDLEGKQGNFKNLREFVFKNIDGYFKIYSKHTPINLVRDLPQGFSALEPLVDLPIGINITRFQTLLALHRSYLTPGDSSSGWTAGAAAYYVGYLQPRTFLLKYNENGTITDAVDCALDPLSETKCTLKSFTVEKGIYQTSNFRVQPTESIVRFPNITNLCPFGEVFNATRFASVYAWNRKRISNCVADYSVLYNSASFSTFKCYGVSPTKLNDLCFTNVYADSFVIRGDEVRQIAPGQTGKIADYNYKLPDDFTGCVIAWNSNNLDSKVGGNYNYLYRLFRKSNLKPFERDISTEIYQAGSTPCNGVEGFNCYFPLQSYGFQPTNGVGYQPYRVVVLSFELLHAPATVCGPKKSTNLVKNKCVNFNFNGLTGTGVLTESNKKFLPFQQFGRDIADTTDAVRDPQTLEILDITPCSFGGVSVITPGTNTSNQVAVLYQDVNCTEVPVAIHADQLTPTWRVYSTGSNVFQTRAGCLIGAEHVNNSYECDIPIGAGICASYQTQTNSPRRARSVASQSIIAYTMSLGAENSVAYSNNSIAIPTNFTISVTTEILPVSMTKTSVDCTMYICGDSTECSNFLLQYGSFCTQLNRALTGIAVEQDKNTQEVFAQVKQIYKTPPIKDFGGFNFSQILPDPSKPSKRSFIEDLLFNKVTLADAGFIKQYGDCLGDIAARDLICAQKFNGLTVLPPLLTDEMIAQYTSALLAGTITSGWTFGAGAALQIPFAMQMAYRFNGCGVTQNVLYENQKLIANQFNSAIGKIQDSLSSTASALGKLQDVVNQNAQALNTLVKQLSSNFGAISSVLNDILSRLDKVEAEVQIDRLITGRLQSLQTYVTQQLIRAAEIRASANLAATKMSECVLGQSKRVDFCGKGCHLMSFPQSAPHGVVFLHVTYVPAQEKNFTTAPAICHDGKAHFPREGVFVSNGTHWFVTQRNFYEPQIITTDNTFVSGNCDVVIGIVNNTVYDPLQPELDSGGGGSDIDPYKEFGSSYQLLNFLPLDFFPDLNALVDTATALYEEELTGREHCSPHHTAIRQALVCWDELTKLIAWMSSNITSEQVRTIIVNHVNDTWGLKVRQSLWFHLSCLTFGQHTVQEFLVSFGVWIRTPAPYRPPNAPILSTLPEHTVIC

SEQ ID NO: 11272 - protein, 1301 aa, Artificial Sequence
  SARS-CoV-2/Australia/QLD02/2020__EPI_ISL_407896 spike protein (1-1147)(I909C_Y1047C) WhcAg construct
MFVFLVLLPLVSSQCVNLTTRTQLPPAYTNSFTRGVYYPDKVFRSSVLHSTQDLFLPFFSNVTWFHAIHVSGTNGTKRFDNPVLPFNDGVYFASTEKSNIIRGWIFGTTLDSKTQSLLIVNNATNVVIKVCEFQFCNDPFLGVYYHKNNKSWMESEFRVYSSANNCTFEYVSQPFLMDLEGKQGNFKNLREFVFKNIDGYFKIYSKHTPINLVRDLPQGFSALEPLVDLPIGINITRFQTLLALHRSYLTPGDSSSGWTAGAAAYYVGYLQPRTFLLKYNENGTITDAVDCALDPLSETKCTLKSFTVEKGIYQTSNFRVQPTESIVRFPNITNLCPFGEVFNATRFASVYAWNRKRISNCVADYSVLYNSASFSTFKCYGVSPTKLNDLCFTNVYADSFVIRGDEVRQIAPGQTGKIADYNYKLPDDFTGCVIAWNSNNLDSKVGGNYNYLYRLFRKSNLKPFERDISTEIYQAGSTPCNGVEGFNCYFPLQSYGFQPTNGVGYQPYRVVVLSFELLHAPATVCGPKKSTNLVKNKCVNFNFNGLTGTGVLTESNKKFLPFQQFGRDIADTTDAVRDPQTLEILDITPCSFGGVSVITPGTNTSNQVAVLYQDVNCTEVPVAIHADQLTPTWRVYSTGSNVFQTRAGCLIGAEHVNNSYECDIPIGAGICASYQTQTNSPRRARSVASQSIIAYTMSLGAENSVAYSNNSIAIPTNFTISVTTEILPVSMTKTSVDCTMYICGDSTECSNLLLQYGSFCTQLNRALTGIAVEQDKNTQEVFAQVKQIYKTPPIKDFGGFNFSQILPDPSKPSKRSFIEDLLFNKVTLADAGFIKQYGDCLGDIAARDLICAQKFNGLTVLPPLLTDEMIAQYTSALLAGTITSGWTFGAGAALQIPFAMQMAYRFNGCGVTQNVLYENQKLIANQFNSAIGKIQDSLSSTASALGKLQDVVNQNAQALNTLVKQLSSNFGAISSVLNDILSRLDKVEAEVQIDRLITGRLQSLQTYVTQQLIRAAEIRASANLAATKMSECVLGQSKRVDFCGKGCHLMSFPQSAPHGVVFLHVTYVPAQEKNFTTAPAICHDGKAHFPREGVFVSNGTHWFVTQRNFYEPQIITTDNTFVSGNCDVVIGIVNNTVYDPLQLELDSGGGGSDIDPYKEFGSSYQLLNFLPLDFFPDLNALVDTATALYEEELTGREHCSPHHTAIRQALVCWDELTKLIAWMSSNITSEQVRTIIVNHVNDTWGLKVRQSLWFHLSCLTFGQHTVQEFLVSFGVWIRTPAPYRPPNAPILSTLPEHTVIC

SEQ ID NO: 11273 - protein, 1301 aa, Artificial Sequence
  SARS-CoV-2/India/1-31/2020__EPI_ISL_413523 spike protein (1-1147)(I909C_Y1047C) WhcAg construct
MFVFLVLLPLVSSQCVNLTTRTQLPPAYTNSFTRGVYYPDKVFRSSVLHSTQDLFLPFFSNVTWFHAIHVSGTNGTKRFDNPVLPFNDGVYFASTEKSNIIRGWIFGTTLDSKTQSLLIVNNATNVVIKVCEFQFCNDPFLGVYYHKNNKSWMESEFRVYSSANNCTFEYVSQPFLMDLEGKQGNFKNLREFVFKNIDGYFKIYSKHTPINLVRDLPQGFSALEPLVDLPIGINITRFQTLLALHRSYLTPGDSSSGWTAGAAAYYVGYLQPRTFLLKYNENGTITDAVDCALDPLSETKCTLKSFTVEKGIYQTSNFRVQPTESIVRFPNITNLCPFGEVFNATRFASVYAWNRKRISNCVADYSVLYNSASFSTFKCYGVSPTKLNDLCFTNVYADSFVIRGDEVRQIAPGQTGKIADYNYKLPDDFTGCVIAWNSNNLDSKVGGNYNYLYRLFRKSNLKPFERDISTEIYQAGSTPCNGVEGFNCYFPLQSYGFQPTNGVGYQPYRVVVLSFELLHAPATVCGPKKSTNLVKNKCVNFNFNGLTGTGVLTESNKKFLPFQQFGRDIADTTDAVRDPQTLEILDITPCSFGGVSVITPGTNTSNQVAVLYQDVNCTEVPVAIHADQLTPTWRVYSTGSNVFQTRAGCLIGAEHVNNSYECDIPIGAGICASYQTQTNSPRRARSVASQSIIAYTMSLGAENSVAYSNNSIAIPTNFTISVTTEILPVSMTKTSVDCTMYICGDSTECSNLLLQYGSFCTQLNRALTGIAVEQDKNTQEVFAQVKQIYKTPPIKDFGGFNFSQILPDPSKPSKRSFIEDLLFNKVTLADAGFIKQYGDCLGDIAARDLICAQKFNGLTVLPPLLTDEMIAQYTSALLAGTITSGWTFGAGAALQIPFAMQMAYRFNGCGVTQNVLYENQKLIANQFNSVIGKIQDSLSSTASALGKLQDVVNQNAQALNTLVKQLSSNFGAISSVLNDILSRLDKVEAEVQIDRLITGRLQSLQTYVTQQLIRAAEIRASANLAATKMSECVLGQSKRVDFCGKGCHLMSFPQSAPHGVVFLHVTYVPAQEKNFTTAPAICHDGKAHFPREGVFVSNGTHWFVTQRNFYEPQIITTDNTFVSGNCDVVIGIVNNTVYDPLQPELDSGGGGSDIDPYKEFGSSYQLLNFLPLDFFPDLNALVDTATALYEEELTGREHCSPHHTAIRQALVCWDELTKLIAWMSSNITSEQVRTIIVNHVNDTWGLKVRQSLWFHLSCLTFGQHTVQEFLVSFGVWIRTPAPYRPPNAPILSTLPEHTVIC

SEQ ID NO: 11274 - protein, 1301 aa, Artificial Sequence
  SARS-CoV-2/Guangdong/GD2020087-P0008/2020__EPI_ISL_413863 spike protein (1-1147)(I909C_Y1047C) WhcAg construct
MFVFLVLLPLVSSQCVNLTTRTQLPPAYTNSFTRGVYYPDKVFRSSVLHSTQDLFLPFFSNVTWFHAIHVSGTNGTKRFDNPVLPFNDGVYFASTEKSNIIRGWIFGTTLDSKTQSLLIVNNATNVVIKVCEFQFCNDPFLGVYYHKNNKSWMESEFRVYSSANNCTFEYVSQPFLMDLEGKQGNFKNLREFVFKNIDGYFKIYSKHTPINLVRDLPQGFSALEPLVDLPIGINITRFQTLLALHRSYLTPGDSSSGWTAGAAAYYVGYLQPRTFLLKYNENGTITDAVDCALDPLSETKCTLKSFTVEKGIYQTSNFRVQPTESIVRFPNITNLCPFGEVFNATRFASVYAWNRKRISNCVADYSVLYNSASFSTFKCYGVSPTKLNDLCFTNVYADSFVIRGDEVREIAPGQTGKIADYNYKLPDDFTGCVIAWNSNNLDSKVGGNYNYLYRLFRKSNLKPFERDISTEIYQAGSTPCNGVEGFNCYFPLQSYGFQPTNGVGYQPYRVVVLSFELLHAPATVCGPKKSTNLVKNKCVNFNFNGLTGTGVLTESNKKFLPFQQFGRDIADTTDAVRDPQTLEILDITPCSFGGVSVITPGTNTSNQVAVLYQDVNCTEVPVAIHADQLTPTWRVYSTGSNVFQTRAGCLIGAEHVNNSYECDIPIGAGICASYQTQTNSPRRARSVASQSIIAYTMSLGAENSVAYSNNSIAIPTNFTISVTTEILPVSMTKTSVDCTMYICGDSTECSNLLLQYGSFCTQLNRALTGIAVEQDKNTQEVFAQVKQIYKTPPIKDFGGFNFSQILPDPSKPSKRSFIEDLLFNKVTLADAGFIKQYGDCLGDIAARDLICAQKFNGLTVLPPLLTDEMIAQYTSALLAGTITSGWTFGAGAALQIPFAMQMAYRFNGCGVTQNVLYENQKLIANQFNSAIGKIQDSLSSTASALGKLQDVVNQNAQALNTLVKQLSSNFGAISSVLNDILSRLDKVEAEVQIDRLITGRLQSLQTYVTQQLIRAAEIRASANLAATKMSECVLGQSKRVDFCGKGCHLMSFPQSAPHGVVFLHVTYVPAQEKNFTTAPAICHDGKAHFPREGVFVSNGTHWFVTQRNFYEPQIITTDNTFVSGNCDVVIGIVNNTVYDPLQPELDSGGGGSDIDPYKEFGSSYQLLNFLPLDFFPDLNALVDTATALYEEELTGREHCSPHHTAIRQALVCWDELTKLIAWMSSNITSEQVRTIIVNHVNDTWGLKVRQSLWFHLSCLTFGQHTVQEFLVSFGVWIRTPAPYRPPNAPILSTLPEHTVIC

SEQ ID NO: 11275 - protein, 1301 aa, Artificial Sequence
  SARS-CoV-2/Sweden/01/2020__EPI_ISL_411951 spike protein (1-1147)(I909C_Y1047C) WhcAg construct
MFVFLVLLPLVSSQCVNLTTRTQLPPAYTNSFTRGVYYPDKVFRSSVLHSTQDLFLPFFSNVTWFHAIHVSGTNGTKRFDNPVLPFNDGVYFASTEKSNIIRGWIFGTTLDSKTQSLLIVNNATNVVIKVCEFQFCNDPFLGVYYHKNNKSWMESEFRVYSSANNCTFEYVSQPFLMDLEGKQGNFKNLREFVFKNIDGYFKIYSKHTPINLVRDLPQGFSALEPLVDLPIGINITRFQTLLALHRSYLTPGDSSSGWTAGAAAYYVGYLQPRTFLLKYNENGTITDAVDCALDPLSETKCTLKSFTVEKGIYQTSNFRVQPTESIVRFPNITNLCPFGEVFNATRFASVYAWNRKRISNCVADYSVLYNSASFSTFKCYGVSPTKLNDLCFTNVYADSFVIRGDEVRQIAPGQTGKIADYNYKLPDDFTGCVIAWNSNNLDSKVGGNYNYLYRLFRKSNLKPFERDISTEIYQAGSTPCNGVEGFNCYFPLQSYGFQPTNGVGYQPYRVVVLSFELLHAPATVCGPKKSTNLVKNKCVNFNFNGLTGTGVLTESNKKFLPFQQFGRDIADTTDAVRDPQTLEILDITPCSFGGVSVITPGTNTSNQVAVLYQDVNCTEVPVAIHADQLTPTWRVYSTGSNVFQTRAGCLIGAEHVNNSYECDIPIGAGICASYQTQTNSPRRARSVASQSIIAYTMSLGAENSVAYSNNSIAIPTNFTISVTTEILPVSMTKTSVDCTMYICGDSTECSNLLLQYGSFCTQLNRALTGIAVEQDKNTQEVFAQVKQIYKTPPIKDCGGFNFSQILPDPSKPSKRSFIEDLLFNKVTLADAGFIKQYGDCLGDIAARDLICAQKFNGLTVLPPLLTDEMIAQYTSALLAGTITSGWTFGAGAALQIPFAMQMAYRFNGCGVTQNVLYENQKLIANQFNSAIGKIQDSLSSTASALGKLQDVVNQNAQALNTLVKQLSSNFGAISSVLNDILSRLDKVEAEVQIDRLITGRLQSLQTYVTQQLIRAAEIRASANLAATKMSECVLGQSKRVDFCGKGCHLMSFPQSAPHGVVFLHVTYVPAQEKNFTTAPAICHDGKAHFPREGVFVSNGTHWFVTQRNFYEPQIITTDNTFVSGNCDVVIGIVNNTVYDPLQPELDSGGGGSDIDPYKEFGSSYQLLNFLPLDFFPDLNALVDTATALYEEELTGREHCSPHHTAIRQALVCWDELTKLIAWMSSNITSEQVRTIIVNHVNDTWGLKVRQSLWFHLSCLTFGQHTVQEFLVSFGVWIRTPAPYRPPNAPILSTLPEHTVIC

SEQ ID NO: 11276 - protein, 1301 aa, Artificial Sequence
  SARS-CoV-2/Tianmen/HBCDC-HB-07/2020__EPI_ISL_412983 spike protein (1-1147)(I909C_Y1047C) WhcAg construct
MFVFLVLLPLVSSQCVNLTTRTQLPPAYTNSFTRGVYYPDKVFRSSVLHSTQDLFLPFFSNVTWFHAIHVSGTNGTKRFDNPVLPFNDGVYFASTEKSNIIRGWIFGTTLDSKTQSLLIVNNATNVVIKVCEFQFCNDPFLGVYYHKNNKSWMESEFRVYSSANNCTFEYVSQPFLMDLEGKQGNFKNLREFVFKNIDGYFKIYSKHTPINLVRDLPQGFSALEPLVDLPIGINITRFQTLLALHRSYLTPGDSSSGWTAGAAAYYVGYLQPRTFLLKYNENGTITDAVDCALDPLSETKCTLKSFTVEKGIYQTSNFRVQPTESIVRFPNITNLCPFGEVFNATRFASVYAWNRKRISNCVADYSVLYNSASFSTFKCYGVSPTKLNDLCFTNVYADSFVIRGDEVRQIAPGQTGKIADYNYKLPDDFTGCVIAWNSNNLDSKVGGNYNYLYRLFRKSNLKPFERDISTEIYQAGSTPCNGVEGFNCYFPLQSYGFQPTNGVGYQPYRVVVLSFELLHAPATVCGPKKSTNLVKNKCVNFNFNGLTGTGVLTESNKKFLPFQQFGRDIADTTDAVRDPQTLEILDITPCSFGGVSVITPGTNTSNQVAVLYQDLNCTEVPVAIHADQLTPTWRVYSTGSNVFQTRAGCLIGAEHVNNSYECDIPIGAGICASYQTQTNSPRRARSVASQSIIAYTMSLGAENSVAYSNNSIAIPTNFTISVTTEILPVSMTKTSVDCTMYICGDSTECSNLLLQYGSFCTQLNRALTGIAVEQDKNTQEVFAQVKQIYKTPPIKDFGGFNFSQILPDPSKPSKRSFIEDLLFNKVTLADAGFIKQYGDCLGDIAARDLICAQKFNGLTVLPPLLTDEMIAQYTSALLAGTITSGWTFGAGAALQIPFAMQMAYRFNGCGVTQNVLYENQKLIANQFNSAIGKIQDSLSSTASALGKLQDVVNQNAQALNTLVKQLSSNFGAISSVLNDILSRLDKVEAEVQIDRLITGRLQSLQTYVTQQLIRAAEIRASANLAATKMSECVLGQSKRVDFCGKGCHLMSFPQSAPHGVVFLHVTYVPAQEKNFTTAPAICHDGKAHFPREGVFVSNGTHWFVTQRNFYEPQIITTDNTFVSGNCDVVIGIVNNTVYDPLQPELDSGGGGSDIDPYKEFGSSYQLLNFLPLDFFPDLNALVDTATALYEEELTGREHCSPHHTAIRQALVCWDELTKLIAWMSSNITSEQVRTIIVNHVNDTWGLKVRQSLWFHLSCLTFGQHTVQEFLVSFGVWIRTPAPYRPPNAPILSTLPEHTVIC

SEQ ID NO: 11277 - protein, 1301 aa, Artificial Sequence
  SARS-CoV-2/Hong Kong/case42_VM20002493/2020__EPI_ISL_414527 spike protein (1-1147)(I909C_Y1047C) WhcAg construct
MFVFLVLLPLVSSQCVNLTTRTQLPPAYTNSFTRGVYYPDKVFRSSVLHSTQDLFLPFFSNVTWFHAIHVSGTNGTKRFDNPVLPFNDGVYFASTEKSNIIRGWIFGTTLDSKTQSLLIVNNATNVVIKVCEFQFCNDPFLGVYYHKNNKSWMESEFRVYSSANNCTFEYVSQPFLMDLEGKQGNFKNLREFVFKNIDGYFKIYSKHTPINLVRDLPQGFSALEPLVDLPIGINITRFQTLLALHRSYLTPGDSSSGWTAGAAAYYVGYLQPRTFLLKYNENGTITDAVDCALDPLSETKCTLKSFTVEKGIYQTSNFRVQPTESIVRFPNITNLCPFGEVFNATRFASVYAWNRKRISNCVADYSVLYNSASFSTFKCYGVSPTKLNDLCFTNVYADSFVIRGDEVRQIAPGQTGKIADYNYKLPDDFTGCVIAWNSNNLDSKVGGNYNYLYRLFRKSNLKPFERDISTEIYQAGSTPCNGVEGFNCYFPLQSYGFQPTNGVGYQPYRVVVLSFELLHAPATVCGPKKSTNLVKNKCVNFNFNGLTGTGVLTESNKKFLPFQQFGRDIADTTDAVRDPQTLEILDITPCSFGGVSVITPGTNTSNQVAVLYQDVNCTEVPVAIHADQLTPTWRVYSTGSNVFQTRAGCLIGAEHVNNSYECDIPIGAGICASYQTQTNSPRRARSVASQSIIAYTMSLGAENSVAYSNNSIAIPTNFAISVTTEILPVSMTKTSVDCTMYICGDSTECSNLLLQYGSFCTQLNRALTGIAVEQDKNTQEVFAQVKQIYKTPPIKDFGGFNFSQILPDPSKPSKRSFIEDLLFNKVTLADAGFIKQYGDCLGDIAARDLICAQKFNGLTVLPPLLTDEMIAQYTSALLAGTITSGWTFGAGAALQIPFAMQMAYRFNGCGVTQNVLYENQKLIANQFNSAIGKIQDSLSSTASALGKLQDVVNQNAQALNTLVKQLSSNFGAISSVLNDILSRLDKVEAEVQIDRLITGRLQSLQTYVTQQLIRAAEIRASANLAATKMSECVLGQSKRVDFCGKGCHLMSFPQSAPHGVVFLHVTYVPAQEKNFTTAPAICHDGKAHFPREGVFVSNGTHWFVTQRNFYEPQIITTDNTFVSGNCDVVIGIVNNTVYDPLQPELDSGGGGSDIDPYKEFGSSYQLLNFLPLDFFPDLNALVDTATALYEEELTGREHCSPHHTAIRQALVCWDELTKLIAWMSSNITSEQVRTIIVNHVNDTWGLKVRQSLWFHLSCLTFGQHTVQEFLVSFGVWIRTPAPYRPPNAPILSTLPEHTVIC

SEQ ID NO: 11278 - protein, 1301 aa, Artificial Sequence
  SARS-CoV-2/USA/CruiseA-23/2020__EPI_ISL_414482 spike protein (1-1147)(I909C_Y1047C) WhcAg construct
MFVFLVLLPLVSSQCVNLTTRTQLPPAYTNSFTRGVYYPDKVFRSSVLHSTQDLFLPFFSNVTWFHAIHVSGTNGTKRFDNPVLPFNDGVYFASTEKSNIIRGWIFGTTLDSKTQSLLIVNNATNVVIKVCEFQFCNDPFLGVYYHKNNKSWMESEFRVYSSANNCTFEYVSQPFLMDLEVKQGNFKNLREFVFKNIDGYFKIYSKHTPINLVRDLPQGFSALEPLVDLPIGINITRFQTLLALHRSYLTPGDSSSGWTAGAAAYYVGYLQPRTFLLKYNENGTITDAVDCALDPLSETKCTLKSFTVEKGIYQTSNFRVQPTESIVRFPNITNLCPFGEVFNATRFASVYAWNRKRISNCVADYSVLYNSASFSTFKCYGVSPTKLNDLCFTNVYADSFVIRGDEVRQIAPGQTGKIADYNYKLPDDFTGCVIAWNSNNLDSKVGGNYNYLYRLFRKSNLKPFERDISTEIYQAGSTPCNGVEGFNCYFPLQSYGFQPTNGVGYQPYRVVVLSFELLHAPATVCGPKKSTNLVKNKCVNFNFNGLTGTGVLTESNKKFLPFQQFGRDIADTTDAVRDPQTLEILDITPCSFGGVSVITPGTNTSNQVAVLYQDVNCTEVPVAIHADQLTPTWRVYSTGSNVFQTRAGCLIGAEHVNNSYECDIPIGAGICASYQTQTNSPRRARSVASQSIIAYTMSLGAENSVAYSNNSIAIPTNFTISVTTEILPVSMTKTSVDCTMYICGDSTECSNLLLQYGSFCTQLNRALTGIAVEQDKNTQEVFAQVKQIYKTPPIKDFGGFNFSQILPDPSKPSKRSFIEDLLFNKVTLADAGFIKQYGDCLGDIAARDLICAQKFNGLTVLPPLLTDEMIAQYTSALLAGTITSGWTFGAGAALQIPFAMQMAYRFNGCGVTQNVLYENQKLIANQFNSAIGKIQDSLSSTASALGKLQDVVNQNAQALNTLVKQLSSNFGAISSVLNDILSRLDKVEAEVQIDRLITGRLQSLQTYVTQQLIRAAEIRASANLAATKMSECVLGQSKRVDFCGKGCHLMSFPQSAPHGVVFLHVTYVPAQEKNFTTAPAICHDGKAHFPREGVFVSNGTHWFVTQRNFYEPQIITTDNTFVSGNCDVVIGIVNNTVYDPLQPELDSGGGGSDIDPYKEFGSSYQLLNFLPLDFFPDLNALVDTATALYEEELTGREHCSPHHTAIRQALVCWDELTKLIAWMSSNITSEQVRTIIVNHVNDTWGLKVRQSLWFHLSCLTFGQHTVQEFLVSFGVWIRTPAPYRPPNAPILSTLPEHTVIC

SEQ ID NO: 11279 - protein, 1301 aa, Artificial Sequence
  SARS-CoV-2/Hong Kong/case85_VM20002868/2020__EPI_ISL_414519 spike protein (1-1147)(I909C_Y1047C) WhcAg construct
MFVFLVLVPLVSSQCVNLTTRTQLPPAYTNSFTRGVYYPDKVFRSSVLHSTQDLFLPFFSNVTWFHAIHVSGTNGTKRFDNPVLPFNDGVYFASTEKSNIIRGWIFGTTLDSKTQSLLIVNNATNVVIKVCEFQFCNDPFLGVYYHKNNKSWMESEFRVYSSANNCTFEYVSQPFLMDLEGKQGNFKNLREFVFKNIDGYFKIYSKHTPINLVRDLPQGFSALEPLVDLPIGINITRFQTLLALHRSYLTPGDSSSGWTAGAAAYYVGYLQPRTFLLKYNENGTITDAVDCALDPLSETKCTLKSFTVEKGIYQTSNFRVQPTESIVRFPNITNLCPFGEVFNATRFASVYAWNRKRISNCVADYSVLYNSASFSTFKCYGVSPTKLNDLCFTNVYADSFVIRGDEVRQIAPGQTGKIADYNYKLPDDFTGCVIAWNSNNLDSKVGGNYNYLYRLFRKSNLKPFERDISTEIYQAGSTPCNGVEGFNCYFPLQSYGFQPTNGVGYQPYRVVVLSFELLHAPATVCGPKKSTNLVKNKCVNFNFNGLTGTGVLTESNKKFLPFQQFGRDIADTTDAVRDPQTLEILDITPCSFGGVSVITPGTNTSNQVAVLYQDVNCTEVPVAIHADQLTPTWRVYSTGSNVFQTRAGCLIGAEHVNNSYECDIPIGAGICASYQTQTNSPRRARSVASQSIIAYTMSLGAENSVAYSNNSIAIPTNFTISVTTEILPVSMTKTSVDCTMYICGDSTECSNLLLQYGSFCTQLNRALTGIAVEQDKNTQEVFAQVKQIYKTPPIKDFGGFNFSQILPDPSKPSKRSFIEDLLFNKVTLADAGFIKQYGDCLGDIAARDLICAQKFNGLTVLPPLLTDEMIAQYTSALLAGTITSGWTFGAGAALQIPFAMQMAYRFNGCGVTQNVLYENQKLIANQFNSAIGKIQDSLSSTASALGKLQDVVNQNAQALNTLVKQLSSNFGAISSVLNDILSRLDKVEAEVQIDRLITGRLQSLQTYVTQQLIRAAEIRASANLAATKMSECVLGQSKRVDFCGKGCHLMSFPQSAPHGVVFLHVTYVPAQEKNFTTAPAICHDGKAHFPREGVFVSNGTHWFVTQRNFYEPQIITTDNTFVSGNCDVVIGIVNNTVYDPLQPELDSGGGGSDIDPYKEFGSSYQLLNFLPLDFFPDLNALVDTATALYEEELTGREHCSPHHTAIRQALVCWDELTKLIAWMSSNITSEQVRTIIVNHVNDTWGLKVRQSLWFHLSCLTFGQHTVQEFLVSFGVWIRTPAPYRPPNAPILSTLPEHTVIC

SEQ ID NO: 11280 - protein, 1301 aa, Artificial Sequence; identical to SEQ ID NO: 11270
  SARS-CoV-2/England/200990660/2020__EPI_ISL_414523 spike protein (1-1147)(I909C_Y1047C) WhcAg construct

SEQ ID NO: 11281 - protein, 1301 aa, Artificial Sequence
  SARS-CoV-2/Australia/NSW09/2020__EPI_ISL_413595 spike protein (1-1147)(I909C_Y1047C) WhcAg construct
MFVFLVLLPLVSSQCVNLTTRTQLPPAYTNSFTRGVYYPDKVFRSSVLHSTQDLFLPFFSNVTWFHAIHVSGTNGTKRFDNPVLPFNDGVYFASTEKSNIIRGWIFGTTLDSKTQSLLIVNNATNVVIKVCEFQFCNDPFLGVYYHKNNKSWMESEFRVYSSANNCTFEYVSQPFLMDLEGKQGNFKNLREFVFKNIDGYFKIYSKHTPINLVRDLPQGFSALEPLVDLPIGINITRFQTLLALHRSYLTPGDSSSGWTAGAAAYYVGYLQPRTFLLKYNENGTITDAVDCALDPLSETKCTLKSFTVEKGIYQTSNFRVQPTESIVRFPNITNLCPFGEVFNATRFASVYAWNRKRISNCVADYSVLYNSASFSTFKCYGVSPTKLNDLCFTNVYADSFVIRGDEVRQIAPGQTGKIADYNYKLPDDFTGCVIAWNSNNLDSKVGGNYNYLYRLFRKSNLKPFERDISTEIYQAGSTPCNGVEGFNCYFPLQSYGFQPTNGVGYQPYRVVVLSFELLHAPATVCGPKKSTNLVKNKCVNFNFNGLTGTGVLTESNKKFLPFQQFGRDIADTTDAVRDPQTLEILDITPCSFGGVSVITPGTNTSNQVAVLYQDVNCTEVPVAIHADQLTPTWRVYSTGSNVFQTRAGCLIGAEHVNNSYECDIPIGAGICASYQTQTNSPRRARSVASQSIIAYTMSLGAENSVAYSNNSIAIPTNFTISVTTEILPVSMTKTSVDCTMYICGDSTECSNLLLQYGSFCTQLNRALTGIAVEQDKNTQEVFAQVKQIYKTPPIKDFGGFNFSQILPDPSKPSKRSFIEDLLFNKVTLADAGFIKQYGDCLGDIAARDLICAQKFNGLTVLPPLLTDEMIAQYTSALLAGTITSGWTFGAGAALQIPFAMQMAYRFNGCGVTQNVLYENQKLIANQFNSAIGKIQDSLSFTASALGKLQDVVNQNAQALNTLVKQLSSNFGAISSVLNDILSRLDKVEAEVQIDRLITGRLQSLQTYVTQQLIRAAEIRASANLAATKMSECVLGQSKRVDFCGKGCHLMSFPQSAPHGVVFLHVTYVPAQEKNFTTAPAICHDGKAHFPREGVFVSNGTHWFVTQRNFYEPQIITTDNTFVSGNCDVVIGIVNNTVYDPLQPELDSGGGGSDIDPYKEFGSSYQLLNFLPLDFFPDLNALVDTATALYEEELTGREHCSPHHTAIRQALVCWDELTKLIAWMSSNITSEQVRTIIVNHVNDTWGLKVRQSLWFHLSCLTFGQHTVQEFLVSFGVWIRTPAPYRPPNAPILSTLPEHTVIC

SEQ ID NO: 11282 - protein, 1301 aa, Artificial Sequence; identical to SEQ ID NO: 11262
  SARS-CoV-2/Australia/NSW10/2020__EPI_ISL_413596 spike protein (1-1147)(I909C_Y1047C) WhcAg construct

SEQ ID NO: 11283 - protein, 1301 aa, Artificial Sequence
  SARS-CoV-2/Switzerland/1000477797/2020__EPI_ISL_413023 spike protein (1-1147)(I909C_Y1047C) WhcAg construct
MFVFLVLLPLVSSQCVNLTTRTQLPPAYTNSFTRGVYYPDKVFRSSVLHSTQDLFLPFFSNVTWFHAIHVSGTNGTKRFDNPVLPFNDGVYFASTEKSNIIRGWIFGTTLDSKTQSLLIVNNATNVVIKVCEFQFCNDPFLGVYYHKNNKSWMESEFRVYSSANNCTFEYVSQPFLMDLEGKQGNFKNLREFVFKNIDGYFNIYSKHTPINLVRDLPQGFSALEPLVDLPIGINITRFQTLLALHRSYLTPGDSSSGWTAGAAAYYVGYLQPRTFLLKYNENGTITDAVDCALDPLSETKCTLKSFTVEKGIYQTSNFRVQPTESIVRFPNITNLCPFGEVFNATRFASVYAWNRKRISNCVADYSVLYNSASFSTFKCYGVSPTKLNDLCFTNVYADSFVIRGDEVRQIAPGQTGKIADYNYKLPDDFTGCVIAWNSNNLDSKVGGNYNYLYRLFRKSNLKPFERDISTEIYQAGSTPCNGVEGFNCYFPLQSYGFQPTNGVGYQPYRVVVLSFELLHAPATVCGPKKSTNLVKNKCVNFNFNGLTGTGVLTESNKKFLPFQQFGRDIADTTDAVRDPQTLEILDITPCSFGGVSVITPGTNTSNQVAVLYQGVNCTEVPVAIHADQLTPTWRVYSTGSNVFQTRAGCLIGAEHVNNSYECDIPIGAGICASYQTQTNSPRRARSVASQSIIAYTMSLGAENSVAYSNNSIAIPTNFTISVTTEILPVSMTKTSVDCTMYICGDSTECSNLLLQYGSFCTQLNRALTGIAVEQDKNTQEVFAQVKQIYKTPPIKDFGGFNFSQILPDPSKPSKRSFIEDLLFNKVTLADAGFIKQYGDCLGDIAARDLICAQKFNGLTVLPPLLTDEMIAQYTSALLAGTITSGWTFGAGAALQIPFAMQMAYRFNGCGVTQNVLYENQKLIANQFNSAIGKIQDSLSSTASALGKLQDVVNQNAQALNTLVKQLSSNFGAISSVLNDILSRLDKVEAEVQIDRLITGRLQSLQTYVTQQLIRAAEIRASANLAATKMSECVLGQSKRVDFCGKGCHLMSFPQSAPHGVVFLHVTYVPAQEKNFTTAPAICHDGKAHFPREGVFVSNGTHWFVTQRNFYEPQIITTDNTFVSGNCDVVIGIVNNTVYDPLQPELDSGGGGSDIDPYKEFGSSYQLLNFLPLDFFPDLNALVDTATALYEEELTGREHCSPHHTAIRQALVCWDELTKLIAWMSSNITSEQVRTIIVNHVNDTWGLKVRQSLWFHLSCLTFGQHTVQEFLVSFGVWIRTPAPYRPPNAPILSTLPEHTVIC

SEQ ID NO: 11284 - protein, 1301 aa, Artificial Sequence
  SARS-CoV-2/Belgium/BA-02291/2020__EPI_ISL_415159 spike protein (1-1147)(I909C_Y1047C) WhcAg construct
MFVFLVLLPLVSSQCVNLTTRTQLPPAYTNSFTRGVYYPDKVFRSSVLHSTQDLFLPFFSNVTWFHAIHVSGTNGTKRFDNPVLPFNDGVYFASTEKSNIIRGWIFGTTLDSKTQSLLIVNNATNVVIKVCEFQFCNDPFLGVYYHKNNKSWMESEFRVYSSANNCTFEYVSQPFLMDLEGKQGNFKNLREFVFKNIDGYFKIYSKHTPINLVRDLPQGFSALEPLVDLPIGINITRFQTLLALHRSYLTPGDSSSGWTAGAAAYYVGYLQPRTFLLKYNENGTITDAVDCALDPLSETKCTLKSFTVEKGIYQTSNFRVQPTESIVRFPNITNLCPFGEVFNATRFASVYAWNRKRISNCVADYSVLYNSASFSTFKCYGVSPTKLNDLCFTNVYADSFVIRGDEVRQIAPGQTGKIADYNYKLPDDFTGCVIAWNSNNLDSKVGGNYNYLYRLFRRSNLKPFERDISTEIYQAGSTPCNGVEGFNCYFPLQSYGFQPTNGVGYQPYRVVVLSFELLPAPATVCGPKKSTNLVKNKCVNFNFNGLTGTGVLTESNKKFLPFQQFGRDIADTTDAVRDPQTLEILDITPCSFGGVSVITPGTNTSNQVAVLYQGVNCTEVPVAIHADQLTPTWRVYSTGSNVFQTRAGCLIGAEHVNNSYECDIPIGAGICASYQTQTNSPRRARSVASQSIIAYTMSLGAENSVAYSNNSIAIPTNFTISVTTEILPVSMTKTSVDCTMYICGDSTECSNLLLQYGSFCTQLNRALTGIAVEQDKNTQEVFAQVKQIYKTPPIKDFGGFNFSQILPDPSKPSKRSFIEDLLFNKVTLADAGFIKQYGDCLGDIAARDLICAQKFNGLTVLPPLLTDEMIAQYTSALLAGTITSGWTFGAGAALQIPFAMQMAYRFNGCGVTQNVLYENQKLIANQFNSAIGKIQDSLSSAAPALGKLQDVVNQNAQALNTLVKQLSSNFGAISSVLNDILSRLDKVEAEVQIDRLITGRLQSLQTYVTQQLIRAAEIRASANLAATKMSECVLGQSKRVDFCGKGCHLMSFPQSAPHGVVFLHVTYVPAQEKNFTTAPAICHDGKAHFPREGVFVSNGTHWFVTQRNFYEPQIITTDNTFVSGNCDVVIGIVNNTVYDPLQPELDSGGGGSDIDPYKEFGSSYQLLNFLPLDFFPDLNALVDTATALYEEELTGREHCSPHHTAIRQALVCWDELTKLIAWMSSNITSEQVRTIIVNHVNDTWGLKVRQSLWFHLSCLTFGQHTVQEFLVSFGVWIRTPAPYRPPNAPILSTLPEHTVIC

SEQ ID NO: 11285 - protein, 1301 aa, Artificial Sequence
  SARS-CoV-2/USA/WA8-UW5/2020__EPI_ISL_413486 spike protein (1-1147)(I909C_Y1047C) WhcAg construct
MFVFLVLLPLVSSQCVNLTTRTQLPPAYTNSFTRGVYYPDKVFRSSVLHSTQDLFLPFFSNVTWFHAIHVSGTNGTKRFDNPVLPFNDGVYFASTEKSNIIRGWIFGTTLDSKTQSLLIVNNATNVVIKVCEFQFCNDPFLGVYYHKNNKSWMESEFRVYSSANNCTFEYVSQPFLMDLEGKQGNFKNLREFVFKNIDGYFKIYSKHTPINLVRDLPQGFSALEPLVDLPIGINITRFQTLLALHRSYLTPGDSSSGWTAGAAAYYVGYLQPRTFLLKYNENGTITDAVDCALDPLSETKCTLKSFTVEKGIYQTSNFRVQPTESIVRFPNITNLCPFGEVFNATRFASVYAWNRKRISNCVADYSVLYNSASFSTFKCYGVSPTKLNDLCFTNVYADSFVIRGDEVRQIAPGQTGKIADYNYKLPDDFTGCVIAWNSNNLDSKVGGNYNYLYRLFRKSNLKPFERDISTEIYQAGSTPCNGVEGFNCYFPLQSYGFQPTNGVGYQPYRVVVLSFELLHAPATVCGPKKSTNLVKNKCVNFNFNGLTGTGVLTESNKKFLPFQQFGRDIADTTDAVRDPQTLEILDITPCSFGGVSVITPGTNTSNQVAVLYQDVNCTEVPVAIHADQLTPTWRVYSTGSNVFQTRAGCLIGAEYVNNSYECDIPIGAGICASYQTQTNSPRRARSVASQSIIAYTMSLGAENSVAYSNNSIAIPTNFTISVTTEILPVSMTKTSVDCTMYICGDSTECSNLLLQYGSFCTQLNRALTGIAVEQDKNTQEVFAQVKQIYKTPPIKDFGGFNFSQILPDPSKPSKRSFIEDLLFNKVTLADAGFIKQYGDCLGDIAARDLICAQKFNGLTVLPPLLTDEMIAQYTSALLAGTITSGWTFGAGAALQIPFAMQMAYRFNGCGVTQNVLYENQKLIANQFNSAIGKIQDSLSSTASALGKLQDVVNQNAQALNTLVKQLSSNFGAISSVLNDILSRLDKVEAEVQIDRLITGRLQSLQTYVTQQLIRAAEIRASANLAATKMSECVLGQSKRVDFCGKGCHLMSFPQSAPHGVVFLHVTYVPAQEKNFTTAPAICHDGKAHFPREGVFVSNGTHWFVTQRNFYEPQIITTDNTFVSGNCDVVIGIVNNTVYDPLQPELDSGGGGSDIDPYKEFGSSYQLLNFLPLDFFPDLNALVDTATALYEEELTGREHCSPHHTAIRQALVCWDELTKLIAWMSSNITSEQVRTIIVNHVNDTWGLKVRQSLWFHLSCLTFGQHTVQEFLVSFGVWIRTPAPYRPPNAPILSTLPEHTVIC

SEQ ID NO: 11286 - protein, 1301 aa, Artificial Sequence
  SARS-CoV-2/England/20102000506/2020__EPI_ISL_415147 spike protein (1-1147)(I909C_Y1047C) WhcAg construct
MFVFLVLLPLVSSQCVNLTTRTQLPPAYTNSFTRGVYYPDKVFRSSVLHSTQDLFLPFFSNVTWFHAIHVSGTNGTKRFDNPVLPFNDGVYFASTEKSNIIRGWIFGTTLDSKTQSLLIVNNATNVVIKVCEFQFCNDPFLGVYYHKNNKSWMESEFRVYSSANNCTFEYVSQPFLMDLEGKQGNFKNLREFVFKNIDGYFKIYSKHTPINLVRDLPQGFSALEPLVDLPIGINITRFQTLLALHRSYLTPGDSSSGWTAGAAAYYVGYLQPRTFLLKYNENGTITDAVDCALDPLSETKCTLKSFTVEKGIYQTSNFRVQPTESIVRFPNITNLCPFGEVFNATRFASVYAWNRKRISNCVADYSVLYNSASFSTFKCYGVSPTKLNDLCFTNVYADSFVIRGDEVRQIAPGQTGKIADYNYKLPDDFTGCVIAWNSNNLDSKVGGNYNYLYRLFRKSNLKPFERDISTEIYQAGSTPCNGVEGFNCYFPLQSYGFQPTNGVGYQPYRVVVLSFELLHAPATVCGPKKSTNLVKNKCVNFNFNGLTGTGVLTESNKKFLPFQQFGRDIADTTDAVRDPQTLEILDITPCSFGGVSVITPGTNTSNQVAVLYQGVNCTEVPVAIHADQLTPTWRVYSTGSNVFQTRAGCLIGAEHVNNSYECDIPIGAGICASYQTQTNSPRRARSVASQSIIAYTMSLGAENSVAYSNNSIAIPTNFTISVTTEILPVSMTKTSVDCTMYICGDSTECSNLLLQYGSFCTQLNRALTGIAVEQDKNTQEVFAQVKQIYKTPPIKDFGGFNFSQILPDPSKPSKRSFIEDLLFNKVTLADAGFIKQYGYCLGDIAARDLICAQKFNGLTVLPPLLTDEMIAQYTSALLAGTITSGWTFGAGAALQIPFAMQMAYRFNGCGVTQNVLYENQKLIANQFNSAIGKIQDSLSSTASALGKLQDVVNQNAQALNTLVKQLSSNFGAISSVLNDILSRLDKVEAEVQIDRLITGRLQSLQTYVTQQLIRAAEIRASANLAATKMSECVLGQSKRVDFCGKGCHLMSFPQSAPHGVVFLHVTYVPAQEKNFTTAPAICHDGKAHFPREGVFVSNGTHWFVTQRNFYEPQIITTDNTFVSGNCDVVIGIVNNTVYDPLQPELDSGGGGSDIDPYKEFGSSYQLLNFLPLDFFPDLNALVDTATALYEEELTGREHCSPHHTAIRQALVCWDELTKLIAWMSSNITSEQVRTIIVNHVNDTWGLKVRQSLWFHLSCLTFGQHTVQEFLVSFGVWIRTPAPYRPPNAPILSTLPEHTVIC

SEQ ID NO: 11287 - protein, 1301 aa, Artificial Sequence
  SARS-CoV-2/Belgium/VAG-03013/2020__EPI_ISL_415155 spike protein (1-1147)(I909C_Y1047C) WhcAg construct
MFVFLVLLPLVSSQCVNLTTRTQLPPAYTNSFTRGVYYPDKVFRSSVLHSTQDLFLPFFSNVTWFHAIHVSGTNGTKRFDNPVLPFNDGVYFASTEKSNIIRGWIFGTTLDSKTQSLLIVNNATNVVIKVCEFQFCNDPFLGVYYHKNNKSWMESEFRVYSSANNCTFEYVSQPFLMDLEGKQGNFKNLREFVFKNIDGYFKIYSKHTPINLVRDLPQGFSALEPLVDLPIGINITRFQTLLALHRSYLTPGDSSSGWTAGAAAYYVGYLQPRTFLLKYNENGTITDAVDCALDPLSETKCTLKSFTVEKGIYQTSNFRVQPTESIVRFPNITNLCPFGEVFNATRFASVYAWNRKRISNCVADYSVLYNSASFSTFKCYGVSPTKLNDLCFTNVYADSFVIRGDEVRQIAPGQTGKIADYNYKLPDDFTGCVIAWNSNNLDSKVGGNYNYLYRLFRKSNLKPFERDISTEIYQAGSTPCNGVEGFNCYFPLQSYGFQPTNGVGYQPYRVVVLSFELLHAPATVCGPKKSTNLVKNKCVNFNFNGLTGTGVLTESNKKFLPFQQFGRDIADTTDAVRDPQTLEILDITPCSFGGVSVITPGTNTSNQVAVLYQGVNCTEVPVAIHADQLTPTWRVYSTGSNVFQTRAGCLIGAEHVNNSYECDIPIGAGICASYQTQTNSPRRARSVASQSIIAYTMSLGAENSVAYSNNSIAIPTNFTISVTTEILPVSMTKTSVDCTMYICGDSTECSNLLLQYGSFCTQLNRALTGIAVEQDKNTQEVFAQVKQIYKTPPIKDFGGFNFSQILPDPSKPSKRSFIEDLLFNKVTLADAGFIKQYGDCLGDIAARDLICAQKFNGLTVLPPLLTDEMIAQYTSALLAGTITSGWTFGAGAALQIPFAMQMAYRFNGCGVTQNVLYENQKLIANQFNSAIGKIQDSLSSTATALGKLQDVVNQNAQALNTLVKQLSSNFGAISSVLNDILSRLDKVEAEVQIDRLITGRLQSLQTYVTQQLIRAAEIRASANLAATKMSECVLGQSKRVDFCGKGCHLMSFPQSAPHGVVFLHVTYVPAQEKNFTTAPAICHDGKAHFPREGVFVSNGTHWFVTQRNFYEPQIITTDNTFVSGNCDVVIGIVNNTVYDPLQPELDSGGGGSDIDPYKEFGSSYQLLNFLPLDFFPDLNALVDTATALYEEELTGREHCSPHHTAIRQALVCWDELTKLIAWMSSNITSEQVRTIIVNHVNDTWGLKVRQSLWFHLSCLTFGQHTVQEFLVSFGVWIRTPAPYRPPNAPILSTLPEHTVIC

SEQ ID NO: 11288 - protein, 1301 aa, Artificial Sequence
  SARS-CoV-2/Belgium/BC-03016/2020__EPI_ISL_415157 spike protein (1-1147)(I909C_Y1047C) WhcAg construct
MFVFLVLLPLVSSQCVNLTTRTQLPPAYTNSFTRGVYYPDKVFRSSVLHSTQDLFLPFFSNVTWFHAIHVSGTNGTKRFDNPVLPFNDGVYFASTEKSNIIRGWIFGTTLDSKTQSLLIVNNATNVVIKVCEFQFCNDPFLGVYYHKNNKSWMESEFRVYSSANNCTFEYVSQPFLMDLEGKQGNFKNLREFVFKNIDGYFKIYSKHTPINLVRDLPQGFSALEPLVDLPIGINITRFQTLLALHRSYLTPGDSSSGWTAGAAAYYVGYLQPRTFLLKYNENGTITDAVDCALDPLSETKCTLKSFTVEKGIYQTSNFRVQPTESIVRFPNITNLCPFGEVFNATRFASVYAWNRKRISNCVADYSVLYNSASFSTFKCYGVSPTKLNDLCFTNVYADSFVIRGDEVRQIAPGQTGKIADYNYKLPDDFTGCVIAWNSNNLDSKVGGNYNYLYRLFRKSNLKPFERDISTEIYQAGSTPCNGVEGFNCYFPLQSYGFQPTNGVGYQPYRVVVLSFELLHAPATVCGPKKSTNLVKNKCVNFNFNGLTGTGVLTESNKKFLPFQQFGRDIADTTDAVRDPQTLEILDITPCSFGGVSVITPGTNTSNQVAVLYQGVNCTEVPVAIHADQLTPTWRVYSTGSNVFQTRAGCLIGAEHVNNSYECDIPIGAGICASYQTQTNSPRRARSVASQSIIAYTMSLGAENSVAYSNNSIAIPTNFTISVTTEILPVSMTKTSVDCTMYICGDSTECSNLLLQYGSFCTQLNRALTGIAVEQDKNTQEVFAQVKQIYKTPPIKDFGGFNFSQILPDPSKPSKRSFIEDLLFNKVTLADAGFIKQYGDCLGDIAARDLICAQKFNGLTVLPPLLTDEMIAQYTSALLAGTITSGWTFGAGAALQIPFAMQMAYRFNGCGVTQNVLYENQKLIANQFNSAIGKIQDSLSSTAPALGKLQDVVNQNAQALNTLVKQLSSNFGAISSVLNDILSRLDKVEAEVQIDRLITGRLQSLQTYVTQQLIRAAEIRASANLAATKMSECVLGQSKRVDFCGKGCHLMSFPQSAPHGVVFLHVTYVPAQEKNFTTAPAICHDGKAHFPREGVFVSNGTHWFVTQRNFYEPQIITTDNTFVSGNCDVVIGIVNNTVYDPLQPELDSGGGGSDIDPYKEFGSSYQLLNFLPLDFFPDLNALVDTATALYEEELTGREHCSPHHTAIRQALVCWDELTKLIAWMSSNITSEQVRTIIVNHVNDTWGLKVRQSLWFHLSCLTFGQHTVQEFLVSFGVWIRTPAPYRPPNAPILSTLPEHTVIC

SEQ ID NO: 11289 - protein, 1301 aa, Artificial Sequence
  SARS-CoV-2/Germany/BavPat3/2020__EPI_ISL_414521 spike protein (1-1147)(I909C_Y1047C) WhcAg construct
MFVFLVLLPLVSSQCVNLTTRTQLPPAYTNSFTRGVYYPDKVFRSSVLHSTQDLFLPFFSNVTWFHAIHVSGTNGTKRFDNPVLPFNDGVYFASTEKSNIIRGWIFGTTLDSKTQSLLIVNNATNVVIKVCEFQFCNDPFLGVYYHKNNKSWMESEFRVYSSANNCTFEYVSQPFLMDLEGKQGNFKNLREFVFKNIDGYFKIYSKHTPINLVRDLPQGFSALEPLVDLPIGINITRFQTLLALHRSYLTPGDSSSGWTAGAAAYYVGYLQPRTFLLKYNENGTITDAVDCALDPLSETKCTLKSFTVEKGIYQTSNFRVQPTESIVRFPNITNLCPFGEVFNATRFASVYAWNRKRISNCVADYSVLYNSASFSTFKCYGVSPTKLNDLCFTNVYADSFVIRGDEVRQIAPGQTGKIADYNYKLPDDFTGCVIAWNSNNLDSKVGGNYNYLYRLFRKSNLKPFERDISTEIYQAGSTPCNGVEGFNCYFPLQSYGFQPTNGVGYQPYRVVVLSFELLHAPATVCGPKKSTNLVKNKCVNFNFNGLTGTGVLTESNKKFLPFQQFGRDIADTTDAVRDPQTLEILDITPCSFGGVSVITPGTNTSNQVAVLYQDVNCTEVPVAIHADQLTPTWRVYSTGSNVFQTRAGCLIGAEHVNNSYECDIPIGAGICASYQTQTNSPRRARSVASQSIIAYTMSLGAENSVAYSNNSIAIPTNFTISVTTEILPVSMTKTSVDCTMYICGDSTECSNLLLQYGSFCTQLNRALTGIAVEQDKNTQQVFAQVKQIYKTPPIKDFGGFNFSQILPDPSKPSKRSFIEDLLFNKVTLADAGFIKQYGDCLGDIAARDLICAQKFNGLTVLPPLLTDEMIAQYTSALLAGTITSGWTFGAGAALQIPFAMQMAYRFNGCGVTQNVLYENQKLIANQFNSAIGKIQDSLSSTASALGKLQDVVNQNAQALNTLVKQLSSNFGAISSVLNDILSRLDKVEAEVQIDRLITGRLQSLQTYVTQQLIRAAEIRASANLAATKMSECVLGQSKRVDFCGKGCHLMSFPQSAPHGVVFLHVTYVPAQEKNFTTAPAICHDGKAHFPREGVFVSNGTHWFVTQRNFYEPQIITTDNTFVSGNCDVVIGIVNNTVYDPLQPELDSGGGGSDIDPYKEFGSSYQLLNFLPLDFFPDLNALVDTATALYEEELTGREHCSPHHTAIRQALVCWDELTKLIAWMSSNITSEQVRTIIVNHVNDTWGLKVRQSLWFHLSCLTFGQHTVQEFLVSFGVWIRTPAPYRPPNAPILSTLPEHTVIC

SEQ ID NO: 11290 - protein, 1301 aa, Artificial Sequence
  SARS-CoV-2/France/HF1805/2020__EPI_ISL_414628 spike protein (1-1147)(I909C_Y1047C) WhcAg construct
MFVFLVLLPLVSSQCVNLTTRTQLPPAYTNSFTRGVYYPDKVFRSSVLHSTQDLFLPFFSNVTWFHAIHVSGTNGTKRFDNPVLPFNDGVYFASTEKSNIIRGWIFGTTLDSKTQSLLIVNNATNVVIKVCEFQFCNDPFLGVYYHKNNKSWMESEFRVYSSANNCTFEYVSQPFLMDLEGKQGNFKNLREFVFKNIDGYFKIYSKHTPINLVRDLPQGFSALEPLVDLPIGINITRFQTLLALHRSYLTPGDSSSGWTAGAAAYYVGYLQPRTFLLKYNENGTITDAVDCALDPLSETKCTLKSFTVEKGIYQTSNFRVQPTESIVRFPNITNLCPFGEVFNATRFASVYAWNRKRISNCVADYSVLYNSASFSTFKCYGVSPTKLNDLCFTNVYADSFVIRGDEVRQIAPGQTGKIADYNYKLPDDFTGCVIAWNSNNLDSKVGGNYNYLYRLFRKSNLKPFERDISTEIYQAGSTPCNGVEGFNCYFPLQSYGFQPTNGVGYQPYRVVVLSFELLHAPATVCGPKKSTNLVKNKCVNFNFNGLTGTGVLTESNKKFLPFQQFGRDIADTTDAVRDPQTLEILDITPCSFGGVSVITPGTNTSNQVAVLYQGVNCTEVPVAIHADQLTPTWRVYSTGSNVFQTRAGCLIGAEHVNNSYECDIPIGAGICASYQTQTNSPRRARSVASQSIIAYTMSLGAENSVAYSNNSIAIPTNFTISVTTEILPVSMTKTSVDCTMYICGDSTECSNLLLQYGSFCTQLNRALTGIAVEQDKNTQEVFAQVKQIYKTPPIKDFGGFNFSQILPDPSKPSKRSFIEDLLFNKVTLADAGFIKQYGDCLGDIAARDLICAQKFNGLTVLPPLLTDEMIAQYTSALLAGTITSGWTFGAGAALQIPFAMQMAYRFNGCGVTQNVLYENQKLIANQFNSAIGKIQDSLSSTASALGKLQDVVNQNAQALNTLVKQLSSNFGAISSVLNDILSRLDKVEAEVQIDRLITGRLQSLQTYVTQQLIRAAEIRASANLAATKMSECVLGQSKRVDFCGKGCHLMSFPQSAPHGVVFLHVTYVPAQEKNFTTAPAICHDGKAHFPREGVFVSNGTHWFVTQRNFYEPQIITTDNTFVSGNCDVVIGVVNNTVYDPLQPELDSGGGGSDIDPYKEFGSSYQLLNFLPLDFFPDLNALVDTATALYEEELTGREHCSPHHTAIRQALVCWDELTKLIAWMSSNITSEQVRTIIVNHVNDTWGLKVRQSLWFHLSCLTFGQHTVQEFLVSFGVWIRTPAPYRPPNAPILSTLPEHTVIC

SEQ ID NO: 11291 - protein, 1301 aa, Artificial Sequence
  SARS-CoV-2/Netherlands/ZuidHolland_9/2020__EPI_ISL_414445 spike protein (1-1147)(I909C_Y1047C) WhcAg construct
MFVFLVLLPLVSSQCVNLTTRTQLPPAYTNSFTRGVYYPDKVFRSSVLHSTQDLFLPFFSNVTWFHAIHVSGTNGTKRFDNPVLPFNDGVYFASTEKSNIIRGWIFGTTLDSKTQSLLIVNNATNVVIKVCEFQFCNDPFLGVYYHKNNKSWMESEFRVYSSANNCTFEYVSQPFLMDLEGKQGNFKNLREFVFKNIDGYFKIYSKHTPINLVRDLPQGFSALEPLVDLPIGINITRFQTLLALHRSYLTPGDSSSGWTAGAAAYYVGYLQPRTFLLKYNENGTITDAVDCALDPLSETKCTLKSFTVEKGIYQTSNFRVQPTESIVRFPNITNLCPFGEVFNATRFASVYAWNRKRISNCVADYSVLYNSASFSTFKCYGVSPTKLNDLCFTNVYADSFVIRGDEVRQIAPGQTGKIADYNYKLPDDFTGCVIAWNSNNLDSKVGGNYNYLYRLFRKSNLKPFERDISTEIYQAGSTPCNGVEGFNCYFPLQSYGFQPTNGVGYQPYRVVVLSFELLHAPATVCGPKKSTNLVKNKCVNFNFNGLTGTGVLTESNKKFLPFQQFGRDIADTTDAVRDPQTLEILDITPCSFGGVSVITPGTNTSNQVAVLYQGVNCTEVPVAIHADQLTPTWRVYSTGSNVFQTRAGCLIGAEHVNNSYECDIPIGAGICASYQTQTNSPRRARSVASQSIIAYTMSLGAENSVAYSNNSIAIPTNFTISVTTEILPVSMTKTSVDCTMYICGDSTECSNLLLQYGSFCTQLNRALTGIAVEQDKNTQEVFAQVKQIYKTPPIKDFGGFNFSQILPDPSKPSKRSFIEDLLFNKVTLADAGFIKQYGDCLGDIAARDLICVQKFNGLTVLPPLLTDEMIAQYTSALLAGTITSGWTFGAGAALQIPFAMQMAYRFNGCGVTQNVLYENQKLIANQFNSAIGKIQDSLSSTASALGKLQDVVNQNAQALNTLVKQLSSNFGAISSVLNDILSRLDKVEAEVQIDRLITGRLQSLQTYVTQQLIRAAEIRASANLAATKMSECVLGQSKRVDFCGKGCHLMSFPQSAPHGVVFLHVTYVPAQEKNFTTAPAICHDGKAHFPREGVFVSNGTHWFVTQRNFYEPQIITTDNTFVSGNCDVVIGIVNNTVYDPLQPELDSGGGGSDIDPYKEFGSSYQLLNFLPLDFFPDLNALVDTATALYEEELTGREHCSPHHTAIRQALVCWDELTKLIAWMSSNITSEQVRTIIVNHVNDTWGLKVRQSLWFHLSCLTFGQHTVQEFLVSFGVWIRTPAPYRPPNAPILSTLPEHTVIC

SEQ ID NO: 11292 - protein, 1301 aa, Artificial Sequence
  SARS-CoV-2/Finland/FIN03032020A/2020__EPI_ISL_413602 spike protein (1-1147)(I909C_Y1047C) WhcAg construct
MFVFLVLLPLVSSQCVNLTTRTQLPPAYTNSFTRGVYYPDKVFRSSVLHSTQDLFLPFFSNVTWFHAIHVSGTNGTKRFDNPVLPFNDGVYFASTEKSNIIRGWIFGTTLDSKTQSLLIVNNATNVVIKVCEFQFCNDPFLGVYYHKNNKSWMESEFRVYSSANNCTFEYVSQPFLMDLEGKQGNFKNLREFVFKNIDGYFKIYSKHTPINLVRDLPQGFSALEPLVDLPIGINITRFQTLLALHRSYLTPGDSSSGWTAGAAAYYVGYLQPRTFLLKYNENGTITDAVDCALDPLSETKCTLKSFTVEKGIYQTSNFRVQPTESIVRFPNITNLCPFGEVFNATRFASVYAWNRKRISNCVADYSVLYNSASFSTFKCYGVSPTKLNDLCFTNVYADSFVIRGDEVRQIAPGQTGKIADYNYKLPDDFTGCVISWNSNNLDSKVGGNYNYLYRLFRKSNLKPFERDISTEIYQAGSTPCNGVEGFNCYFPLQSYGFQPTNGVGYQPYRVVVLSFELLHAPATVCGPKKSTNLVKNKCVNFNFNGLTGTGVLTESNKKFLPFQQFGRDIADTTDAVRDPQTLEILDITPCSFGGVSVITPGTNTSNQVAVLYQGVNCTEVPVAIHADQLTPTWRVYSTGSNVFQTRAGCLIGAEHVNNSYECDIPIGAGICASYQTQTNSPRRARSVASQSIIAYTMSLGAENSVAYSNNSIAIPTNFTISVTTEILPVSMTKTSVDCTMYICGDSTECSNLLLQYGSFCTQLNRALTGIAVEQDKNTQEVFAQVKQIYKTPPIKDFGGFNFSQILPDPSKPSKRSFIEDLLFNKVTLADAGFIKQYGDCLGDIAARDLICAQKFNGLTVLPPLLTDEMIAQYTSALLAGTITSGWTFGAGAALQIPFAMQMAYRFNGCGVTQNVLYENQKLIANQFNSAIGKIQDSLSSTASALGKLQDVVNQNAQALNTLVKQLSSNFGAISSVLNDILSRLDKVEAEVQIDRLITGRLQSLQTYVTQQLIRAAEIRASANLAATKMSECVLGQSKRVDFCGKGCHLMSFPQSAPHGVVFLHVTYVPAQEKNFTTAPAICHDGKAHFPREGVFVSNGTHWFVTQRNFYEPQIITTDNTFVSGNCDVVIGIVNNTVYDPLQPELDSGGGGSDIDPYKEFGSSYQLLNFLPLDFFPDLNALVDTATALYEEELTGREHCSPHHTAIRQALVCWDELTKLIAWMSSNITSEQVRTIIVNHVNDTWGLKVRQSLWFHLSCLTFGQHTVQEFLVSFGVWIRTPAPYRPPNAPILSTLPEHTVIC

SEQ ID NO: 11293 - protein, 1301 aa, Artificial Sequence
  SARS-CoV-2/France/GE1977/2020__EPI_ISL_414632 spike protein (1-1147)(I909C_Y1047C) WhcAg construct
MFVFLVLLPLVSSQCVNLTTRTQLPPAYTNSFTRGVYYPDKVFRSSVLHSTQDLFLPFFSNVTWFHAIHVSGTNGTKRFDNPVLPFNDGVYFASTEKSNIIRGWIFGTTLDSKTQSLLIVNNATNVVIKVCEFQFCNDPFLGVYYHKNNKSWMESEFRVYSSANNCTFEYVSQPFLMDLEGKQGNFKNLREFVFKNIDGYFKIYSKHTPINLVRDLPQGFSALEPLVDLPIGINITRFQTLLALHRSYLTPGDSSSGWTAGAAAYYVGYLQPRTFLLKYNENGTITDAVDCALDPLSETKCTLKSFTVEKGIYQTSNFRVQPTESIVRFPNITNLCPFGEVFNATRFASVYAWNRKRISNCVADYSVLYNSASFSTFKCYGVSPTKLNDLCFTNVYADSFVIRGDEVRQIAPGQTGKIADYNYKLPDDFTGCVIAWNSNNLDSKVGGNYNYLYRLFRKSNLKPFERDISTEIYQAGSTPCNGVEGFNCYFPLQSYGFQPTNGVGYQPYRVVVLSFELLHAPATVCGPKKSTNLVKNKCVNFNFNGLTGTGVLTESNKKFLPFQQFGRDIADTTDAVRDPQTLEILDITPCSFGGVSVITPGTNTSNQVAVLYQGVNCTEVPVAIHADQLTPTWRVYSTGSNVFQTRAGCLIGAEHVNNSYECDIPIGAGICASYQTQTNSPRRARSVASQSIIAYTMSLGAENSVAYSNNSIAIPTNFTISVTTEILPVSMTKTSVDCTMYICGDSTECSNLLLQYGSFCTQLNRALTGIAVEQDKNTQEVFAQVKQIYKTPPIKDFGGFNFSQILPDPSKPSKRSFIEDLLFNKVTLADAGFIKQYGDCLGDIAARDLICAQKFNGLTVLPPLLTDEMIAQYTSALLAGTITSGWTFGAGAALQIPFAMQMAYRFNGCGVTQNVLYENQKLIANQFNSAIGKIQDSLFSTASALGKLQDVVNQNAQALNTLVKQLSSNFGAISSVLNDILSRLDKVEAEVQIDRLITGRLQSLQTYVTQQLIRAAEIRASANLAATKMSECVLGQSKRVDFCGKGCHLMSFPQSAPHGVVFLHVTYVPAQEKNFTTAPAICHDGKAHFPREGVFVSNGTHWFVTQRNFYEPQIITTDNTFVSGNCDVVIGIVNNTVYDPLQPELDSGGGGSDIDPYKEFGSSYQLLNFLPLDFFPDLNALVDTATALYEEELTGREHCSPHHTAIRQALVCWDELTKLIAWMSSNITSEQVRTIIVNHVNDTWGLKVRQSLWFHLSCLTFGQHTVQEFLVSFGVWIRTPAPYRPPNAPILSTLPEHTVIC

SEQ ID NO: 11294 - protein, 1301 aa, Artificial Sequence
  SARS-CoV-2/Finland/FIN-313/2020__EPI_ISL_414641 spike protein (1-1147)(I909C_Y1047C) WhcAg construct
MFVFLVLLPLVSSQCVNLTTRTQLPPAYTNSFTRGVYYPDKVFRSSVLHSTQDLFLPFFSNVTWFHAIHVSGTNGTKRFDNPVLPFNDGVYFASTEKSNIIRGWIFGTTLDSKTQSLLIVNNATNVVIKVCEFQFCNDPFLGVYYHKNNKSWMESEFRVYSSANNCTFEYVSQPFLMDLEGKQGNFKNLREFVFKNIDGYFKIYSKHTPINLVRDLPQGFSALEPLVDLPIGINITRFKTLLALHRSYLTPGDSSSGWTAGAAAYYVGYLQPRTFLLKYNENGTITDAVDCALDPLSETKCTLKSFTVEKGIYQTSNFRVQPTESIVRFPNITNLCPFGEVFNATRFASVYAWNRKRISNCVADYSVLYNSASFSTFKCYGVSPTKLNDLCFTNVYADSFVIRGDEVRQIAPGQTGKIADYNYKLPDDFTGCVIAWNSNNLDSKVGGNYNYLYRLFRKSNLKPFERDISTEIYQAGSTPCNGVEGFNCYFPLQSYGFQPTNGVGYQPYRVVVLSFELLHAPATVCGPKKSTNLVKNKCVNFNFNGLTGTGVLTESNKKFLPFQQFGRDIADTTDAVRDPQTLEILDITPCSFGGVSVITPGTNTSNQVAVLYQGVNCTEVPVAIHADQLTPTWRVYSTGSNVFQTRAGCLIGAEHVNNSYECDIPIGAGICASYQTQTNSPRRARSVASQSIIAYTMSLGAENSVAYSNNSIAIPTNFTISVTTEILPVSMTKTSVDCTMYICGDSTECSNLLLQYGSFCTQLNRALTGIAVEQDKNTQEVFAQVKQIYKTPPIKDFGGFNFSQILPDPSKPSKRSFIEDLLFNKVTLADAGFIKQYGDCLGDIAARDLICAQKFNGLTVLPPLLTDEMIAQYTSALLAGTITSGWTFGAGAALQIPFAMQMAYRFNGCGVTQNVLYENQKLIANQFNSAIGKIQDSLSSTASALGKLQDVVNQNAQALNTLVKQLSSNFGAISSVLNDILSRLDKVEAEVQIDRLITGRLQSLQTYVTQQLIRAAEIRASANLAATKMSECVLGQSKRVDFCGKGCHLMSFPQSAPHGVVFLHVTYVPAQEKNFTTAPAICHDGKAHFPREGVFVSNGTHWFVTQRNFYEPQIITTDNTFVSGNCDVVIGIVNNTVYDPLQPELDSGGGGSDIDPYKEFGSSYQLLNFLPLDFFPDLNALVDTATALYEEELTGREHCSPHHTAIRQALVCWDELTKLIAWMSSNITSEQVRTIIVNHVNDTWGLKVRQSLWFHLSCLTFGQHTVQEFLVSFGVWIRTPAPYRPPNAPILSTLPEHTVIC

SEQ ID NO: 11295 - protein, 1301 aa, Artificial Sequence
  SARS-CoV-2/Netherlands/ZuidHolland_2/2020__EPI_ISL_414556 spike protein (1-1147)(I909C_Y1047C) WhcAg construct
MFVFLVLLPLVSSQCVNLTTRTQLPPAYTNSFTRGVYYPDKVFRSSVLHSTQDLFLPFFSNVTWFHAIHVSGTNGTKRFDNPVLPFNDGVYFASTEKSNIIRGWIFGTTLDSKTQSLLIVNNATNVVIKVCEFQFCNDPFLGVYYHKNNKSWMESEFRVYSSANNCTFEYVSQPFLMDLEGKQGNFKNLREFVFKNIDGYFKIYSKHTPINLVRDLPQGFSALEPLVDLPIGINITRFQTLLALHRSYLTPGDSSSGWTAGAAAYYVGYLQPRTFLLKYNENGTITDAVDCALDPLSETKCTLKSFTVEKGIYQTSNFRVQPTESIVRFPNITNLCPFGEVFNATRFASVYAWNRKRISNCVADYSVLYNSASFSTFKCYGVSPTKLNDLCFTNVYADSFVIRGDEVRQIAPGQTGKIADYNYKLPDDFTGCVIAWNSNNLDSKVGGNYNYLYRLFRKSNLKPFERDISTEIYQAGSTPCNGVEGFNCYFPLQSYGFQPTNGVGYQPYRVVVLSFELLHAPATVCGPKKSTNLVKNKCVNFNFNGLTGTGVLTESNKKFLPFQQFGRDIADTTDAVRDPQTLEILDITPCSFGGVSVITPGTNTSNQVAVLYQGVNCTEVPVAIHADQLTPTWRVYSTGSNVFQTRAGCLIGAEHVNNSYECDIPIGAGICASYQTQTNSPRRARSVASQSIIAYTMSLGAENSVAYSNNSIAIPTNFTISVTTEILPVSMTKTSVDCTMYICGDSTECSNLLLQYGSFCTQLNRALTGIALEQDKNTQEVFAQVKQIYKTPPIKDFGGFNFSQILPDPSKPSKRSFIEDLLFNKVTLADAGFIKQYGDCLGDIAARDLICAQKFNGLTVLPPLLTDEMIAQYTSALLAGTITSGWTFGAGAALQIPFAMQMAYRFNGCGVTQNVLYENQKLIANQFNSAIGKIQDSLSSTASALGKLQDVVNQNAQALNTLVKQLSSNFGAISSVLNDILSRLDKVEAEVQIDRLITGRLQSLQTYVTQQLIRAAEIRASANLAATKMSECVLGQSKRVDFCGKGCHLMSFPQSAPHGVVFLHVTYVPAQEKNFTTAPAICHDGKAHFPREGVFVSNGTHWFVTQRNFYEPQIITTDNTFVSGNCDVVIGIVNNTVYDPLQPELDSGGGGSDIDPYKEFGSSYQLLNFLPLDFFPDLNALVDTATALYEEELTGREHCSPHHTAIRQALVCWDELTKLIAWMSSNITSEQVRTIIVNHVNDTWGLKVRQSLWFHLSCLTFGQHTVQEFLVSFGVWIRTPAPYRPPNAPILSTLPEHTVIC

SEQ ID NO: 11296 - protein, 1301 aa, Artificial Sequence
  SARS-CoV-2/USA/WA-UW31/2020__EPI_ISL_414618 spike protein (1-1147)(I909C_Y1047C) WhcAg construct
MFVFLVLLPLVSSQCVNLTTRTQLPPAYTNSFTRGVYYPDKVFRSSVLHSTQDLFLPFFSNVTWFHAIHVSGTNGTKRFDNPVLPFNDGVYFASTEKSNIIRGWIFGTTLDSKTQSLLIVNNATNVVIKVCEFQFCNDPFLGVYYHKNNKSWMESEFRVYSSANNCTFEYVSQPFLMDLEGKQGNFKNLREFVFKNIDGYFKIYSKHTPINLVRDLPQGFSALEPLVDLPIGINITRFQTLLALHRSYLTPGDSSSGWTAGAAAYYVGYLQPRTFLLKYNENGTITDAVDCALDPLSETKCTLKSFTVEKGIYQTSNFRVQPTESIVRFPNITNLCPFGEVFNATRFASVYAWNRKRISNCVADYSVLYNSASFSTFKCYGVSPTKLNDLCFTNVYADSFVIRGDEVRQIAPGQTGKIADYNYKLPDDFTGCVIAWNSNNLDSKVGGNYNYLYRLFRKSNLKPFERDISTEIYQAGSTPCNGAEGFNCYFPLQSYGFQPTNGVGYQPYRVVVLSFELLHAPATVCGPKKSTNLVKNKCVNFNFNGLTGTGVLTESNKKFLPFQQFGRDIADTTDAVRDPQTLEILDITPCSFGGVSVITPGTNTSNQVAVLYQDVNCTEVPVAIHADQLTPTWRVYSTGSNVFQTRAGCLIGAEHVNNSYECDIPIGAGICASYQTQTNSPRRARSVASQSIIAYTMSLGAENSVAYSNNSIAIPTNFTISVTTEILPVSMTKTSVDCTMYICGDSTECSNLLLQYGSFCTQLNRALTGIAVEQDKNTQEVFAQVKQIYKTPPIKDFGGFNFSQILPDPSKPSKRSFIEDLLFNKVTLADAGFIKQYGDCLGDIAARDLICAQKFNGLTVLPPLLTDEMIAQYTSALLAGTITSGWTFGAGAALQIPFAMQMAYRFNGCGVTQNVLYENQKLIANQFNSAIGKIQDSLSSTASALGKLQDVVNQNAQALNTLVKQLSSNFGAISSVLNDILSRLDKVEAEVQIDRLITGRLQSLQTYVTQQLIRAAEIRASANLAATKMSECVLGQSKRVDFCGKGCHLMSFPQSAPHGVVFLHVTYVPAQEKNFTTAPAICHDGKAHFPREGVFVSNGTHWFVTQRNFYEPQIITTDNTFVSGNCDVVIGIVNNTVYDPLQPELDSGGGGSDIDPYKEFGSSYQLLNFLPLDFFPDLNALVDTATALYEEELTGREHCSPHHTAIRQALVCWDELTKLIAWMSSNITSEQVRTIIVNHVNDTWGLKVRQSLWFHLSCLTFGQHTVQEFLVSFGVWIRTPAPYRPPNAPILSTLPEHTVIC

SEQ ID NO: 11297 - protein, 1301 aa, Artificial Sequence
  SARS-CoV-2/South Korea/SNU01/2020__EPI_ISL_411929 spike protein (1-1147)(I909C_Y1047C) WhcAg construct
MFVFLVLLPLVSSQCVNLTTRTQLPPAYTNSFTRGVYYPDKVFRSSVLHSTQDLFLPFFSNVTWFHAIHVSGTNGTKRFDNPVLPFNDGVYFASTEKSNIIRGWIFGTTLDSKTQSLLIVNNATNVVIKVCEFQFCNDPFLGVYYHKNNKSWMESEFRVYSSANNCTFEYVSQPFLMDLEGKQGNFKNLREFVFKNIDGYFKIYSKHTPINLVRDLPQGFWALEPLVDLPIGINITRFQTLLALHRSYLTPGDSSSGWTAGAAAYYVGYLQPRTFLLKYNENGTITDAVDCALDPLSETKCTLKSFTVEKGIYQTSNFRVQPTESIVRFPNITNLCPFGEVFNATRFASVYAWNRKRISNCVADYSVLYNSASFSTFKCYGVSPTKLNDLCFTNVYADSFVIRGDEVRQIAPGQTGKIADYNYKLPDDFTGCVIAWNSNNLDSKVGGNYNYLYRLFRKSNLKPFERDISTEIYQAGSTPCNGVEGFNCYFPLQSYGFQPTNGVGYQPYRVVVLSFELLHAPATVCGPKKSTNLVKNKCVNFNFNGLTGTGVLTESNKKFLPFQQFGRDIADTTDAVRDPQTLEILDITPCSFGGVSVITPGTNTSNQVAVLYQDVNCTEVPVAIHADQLTPTWRVYSTGSNVFQTRAGCLIGAEHVNNSYECDIPIGAGICASYQTQTNSPRRARSVASQSIIAYTMSLGAENSVAYSNNSIAIPTNFTISVTTEILPVSMTKTSVDCTMYICGDSTECSNLLLQYGSFCTQLNRALTGIAVEQDKNTQEVFAQVKQIYKTPPIKDFGGFNFSQILPDPSKPSKRSFIEDLLFNKVTLADAGFIKQYGDCLGDIAARDLICAQKFNGLTVLPPLLTDEMIAQYTSALLAGTITSGWTFGAGAALQIPFAMQMAYRFNGCGVTQNVLYENQKLIANQFNSAIGKIQDSLSSTASALGKLQDVVNQNAQALNTLVKQLSSNFGAISSVLNDILSRLDKVEAEVQIDRLITGRLQSLQTYVTQQLIRAAEIRASANLAATKMSECVLGQSKRVDFCGKGCHLMSFPQSAPHGVVFLHVTYVPAQEKNFTTAPAICHDGKAHFPREGVFVSNGTHWFVTQRNFYEPQIITTDNTFVSGNCDVVIGIVNNTVYDPLQPELDSGGGGSDIDPYKEFGSSYQLLNFLPLDFFPDLNALVDTATALYEEELTGREHCSPHHTAIRQALVCWDELTKLIAWMSSNITSEQVRTIIVNHVNDTWGLKVRQSLWFHLSCLTFGQHTVQEFLVSFGVWIRTPAPYRPPNAPILSTLPEHTVIC

SEQ ID NO: 11298 - protein, 1301 aa, Artificial Sequence
  SARS-CoV-2/China/WF0004/2020__EPI_ISL_413694 spike protein (1-1147)(I909C_Y1047C) WhcAg construct
MFVFLVLLPLVSSQCVNLTTRTQLPPAYTNSFTRGVYYPDKVFRSSVLHSTQDLFLPFFSNVTWFHAIHVSGTNGTKRFDNPVLPFNDGVYFASTEKSNIIRGWIFGTTLDSKTQSLLIVNNATNVVIKVCEFQFCNDPFLGVYYHKNNKSWTESEFRVYSSANNCTFEYVSQPFLMDLEGKQGNFKNLREFVFKNIDGYFKIYSKHTPINLVRDLPQGFSALEPLVDLPIGINITRFQTLLALHRSYLTPGDSSSGWTAGAAAYYVGYLQPRTFLLKYNENGTITDAVDCALDPLSETKCTLKSFTVEKGIYQTSNFRVQPTESIVRFPNITNLCPFGEVFNATRFASVYAWNRKRISNCVADYSVLYNSASFSTFKCYGVSPTKLNDLCFTNVYADSFVIRGDEVRQIAPGQTGKIADYNYKLPDDFTGCVIAWNSNNLDSKVGGNYNYLYRLFRKSNLKPFERDISTEIYQAGSTPCNGVEGFNCYFPLQSYGFQPTNGVGYQPYRVVVLSFELLHAPATVCGPKKSTNLVKNKCVNFNFNGLTGTGVLTESNKKFLPFQQFGRDIADTTDAVRDPQTLEILDITPCSFGGVSVITPGTNTSNQVAVLYQDVNCTEVPVAIHADQLTPTWRVYSTGSNVFQTRAGCLIGAEHVNNSYECDIPIGAGICASYQTQTNSPRRARSVASQSIIAYTMSLGAENSVAYSNNSIAIPTNFTISVTTEILPVSMTKTSVDCTMYICGDSTECSNLLLQYGSFCTQLNRALTGIAVEQDKNTQEVFAQVKQIYKTPPIKDFGGFNFSQILPDPSKPSKRSFIEDLLFNKVTLADAGFIKQYGDCLGDIAARDLICAQKFNGLTVLPPLLTDEMIAQYTSALLAGTITSGWTFGAGAALQIPFAMQMAYRFNGCGVTQNVLYENQKLIANQFNSAIGKIQDSLSSTASALGKLQDVVNQNAQALNTLVKQLSSNFGAISSVLNDILSRLDKVEAEVQIDRLITGRLQSLQTYVTQQLIRAAEIRASANLAATKMSECVLGQSKRFDFCGKGCHLMSFPQSAPHGVVFLHVTYVPAQEKNFTTAPAICHDGKAHFPREGVFVSNGTHWFVTQRNFYEPQIITTDNTFVSGNCDVVIGIVNNTVYDPLQPELDSGGGGSDIDPYKEFGSSYQLLNFLPLDFFPDLNALVDTATALYEEELTGREHCSPHHTAIRQALVCWDELTKLIAWMSSNITSEQVRTIIVNHVNDTWGLKVRQSLWFHLSCLTFGQHTVQEFLVSFGVWIRTPAPYRPPNAPILSTLPEHTVIC

SEQ ID NO: 11299 - protein, 1301 aa, Artificial Sequence
  SARS-CoV-2/China/WF0028/2020__EPI_ISL_413791 spike protein (1-1147)(I909C_Y1047C) WhcAg construct
MFVFLVLLPLVSSQCVNLTTRTQLPPAYTNSFTRGVYYPDKVFRSSVLHSTQDLFLPFFSNVTWFHAIHVSGTNGTKRFDNPVLPFNDGVYFASTEKSNIIRGWIFGTTLDSKTQSLLIVNNATNVVIKVCEFQFCNDPFLGVYYHKNNKSWMESEFRVYSSANNCTFEYVSQPFLMDLEGKQGNFKNLREFVFKNIDGYFKIYSKHTPINLVRDLPQGFSALEPLVDLPIGINITRFQTLLALHRSYLTPGDSSSGWTAGAAAYYVGYLQPRTFLLKYNENGTITDAVDCALDPLSETKCTLKSFTVEKGIYQTSNFRVQPTESIVRFPNITNLCPFGEVFNATRFASVYAWNRKRISNCVADYSVLYNSASFSTFKCYGVSPTKLNDLCFTNVYADSFVIRGDEVRQIAPGQTGKIADYNYKLPDDFTGCVIAWNSNNLDSKVGGNYNYLYRLFRKSNLKPFERDISTEIYQAGSTPCNGVEGFNCYFPLQSYGFQPTNGVGYQPYRVVVLSFELLHAPATVCGPKKSTNLVKNKCVNFNFNGLTGTGVLTESNKKFLPFQQFGRDIADTTDAVRDPQTLEILDITPCSFGGVSVITPGTNTSNQVAVLYQDVNCTEVPVAIHADQLTPTWRVYSTGSNVFQTRAGCLIGAEHVNNSYECDIPIGAGICASYQTQTNSPRRARSVASQSIIAYTMSLGAENSVAYSNNSIAIPTNFTISVTTEILPVSMTKTSVDCTMYICGDSTECSNLLLQYGSFCTQLNRALTGIAVEQDKNTQEVFAQVKQIYKTPPIKDFGGFNFSQILPDPSKPSKRSFIEDLLFNKVTLADAGFIKQYGDCLGDIAARDLICAQKFNGLTVLPPLLTDEMIAQYTSALLAGTITSGWTFGAGAALQIPFAMQMAYRFNGCGVTQNVLYENQKLIANQFNSAIGKIQDSLSSTASALGKLQDVVNQNAQALNTLVKQLSSNFGAISSVLNDILSRLDKVEAEVQIDRLITGRLQSLQTYVTQQLIRAAEIRASANLAATKMSECVLGQSKRVDFCGKGCHLMSFPQSAPHGVVFLHVTYVPAQEKNFTTAPAICHDGKAHFPREGVFVSNGTHWFVTQRNFYEPQIITTDNTFVSGNCDVVIGIVNNTVYDPLQPELESGGGGSDIDPYKEFGSSYQLLNFLPLDFFPDLNALVDTATALYEEELTGREHCSPHHTAIRQALVCWDELTKLIAWMSSNITSEQVRTIIVNHVNDTWGLKVRQSLWFHLSCLTFGQHTVQEFLVSFGVWIRTPAPYRPPNAPILSTLPEHTVIC

SEQ ID NO: 11300 - protein, 1301 aa, Artificial Sequence
  SARS-CoV-2/2019-nCoV/USA-CruiseA-18/2020__MT159716.1 spike protein (1-1147)(I909C_Y1047C) WhcAg construct
MFVFLVLLPLVSSQCVNLTTRTQLPPAYTNSFTRGVYYPDKVFRSSVLHSTQDLFLPFFSNVTWFHAIHVSGTNGTKRFDNPVLPFNDGVYFASTEKSNIIRGWIFGTTLDSKTQSLLIVNNATNVVIKVCEFQFCNDPFLGVYYHKNNKSWMESELRVYSSANNCTFEYVSQPFLMDLEGKQGNFKNLREFVFKNIDGYFKIYSKHTPINLVRDLPQGFSALEPLVDLPIGINITRFQTLLALHRSYLTPGDSSSGWTAGAAAYYVGYLQPRTFLLKYNENGTITDAVDCALDPLSETKCTLKSFTVEKGIYQTSNFRVQPTESIVRFPNITNLCPFGEVFNATRFASVYAWNRKRISNCVADYSVLYNSASFSTFKCYGVSPTKLNDLCFTNVYADSFVIRGDEVRQIAPGQTGKIADYNYKLPDDFTGCVIAWNSNNLDSKVGGNYNYLYRLFRKSNLKPFERDISTEIYQAGSTPCNGVEGFNCYFPLQSYGFQPTNGVGYQPYRVVVLSFELLHAPATVCGPKKSTNLVKNKCVNFNFNGLTGTGVLTESNKKFLPFQQFGRDIADTTDAVRDPQTLEILDITPCSFGGVSVITPGTNTSNQVAVLYQDVNCTEVPVAIHADQLTPTWRVYSTGSNVFQTRAGCLIGAEHVNNSYECDIPIGAGICASYQTQTNSPRRARSVASQSIIAYTMSLGAENSVAYSNNSIAIPTNFTISVTTEILPVSMTKTSVDCTMYICGDSTECSNLLLQYGSFCTQLNRALTGIAVEQDKNTQEVFAQVKQIYKTPPIKDFGGFNFSQILPDPSKPSKRSFIEDLLFNKVTLADAGFIKQYGDCLGDIAARDLICAQKFNGLTVLPPLLTDEMIAQYTSALLAGTITSGWTFGAGAALQIPFAMQMAYRFNGCGVTQNVLYENQKLIANQFNSAIGKIQDSLSSTASALGKLQDVVNQNAQALNTLVKQLSSNFGAISSVLNDILSRLDKVEAEVQIDRLITGRLQSLQTYVTQQLIRAAEIRASANLAATKMSECVLGQSKRVDFCGKGCHLMSFPQSAPHGVVFLHVTYVPAQEKNFTTAPAICHDGKAHFPREGVFVSNGTHWFVTQRNFYEPQIITTDNTFVSGNCDVVIGIVNNTVYDPLQPELDSGGGGSDIDPYKEFGSSYQLLNFLPLDFFPDLNALVDTATALYEEELTGREHCSPHHTAIRQALVCWDELTKLIAWMSSNITSEQVRTIIVNHVNDTWGLKVRQSLWFHLSCLTFGQHTVQEFLVSFGVWIRTPAPYRPPNAPILSTLPEHTVIC

SEQ ID NO: 11301 - protein, 1301 aa, Artificial Sequence
  SARS-CoV-2/SARS-CoV-2/Yunnan-01/human/2020/CHN__MT049951.1 spike protein (1-1147)(I909C_Y1047C) WhcAg construct
MFVFLVLLPLVSSQCVNLTTRTQLPPANTNSFTRGVYYPDKVFRSSVLHSTQDLFLPFFSNVTWFHAIHVSGTNGTKRFDNPVLPFNDGVYFASTEKSNIIRGWIFGTTLDSKTQSLLIVNNATNVVIKVCEFQFCNDPFLGVYYHKNNKSWMESEFRVYSSANNCTFEYVSQPFLMDLEGKQGNFKNLREFVFKNIDGYFKIYSKHTPINLVRDLPQGFSALEPLVDLPIGINITRFQTLLALHRSYLTPGDSSSGWTAGAAAYYVGYLQPRTFLLKYNENGTITDAVDCALDPLSETKCTLKSFTVEKGIYQTSNFRVQPTESIVRFPNITNLCPFGEVFNATRFASVYAWNRKRISNCVADYSVLYNSASFSTFKCYGVSPTKLNDLCFTNVYADSFVIRGDEVRQIAPGQTGKIADYNYKLPDDFTGCVIAWNSNNLDSKVGGNYNYLYRLFRKSNLKPFERDISTEIYQAGSTPCNGVEGFNCYFPLQSYGFQPTNGVGYQPYRVVVLSFELLHAPATVCGPKKSTNLVKNKCVNFNFNGLTGTGVLTESNKKFLPFQQFGRDIADTTDAVRDPQTLEILDITPCSFGGVSVITPGTNTSNQVAVLYQDVNCTEVPVAIHADQLTPTWRVYSTGSNVFQTRAGCLIGAEHVNNSYECDIPIGAGICASYQTQTNSPRRARSVASQSIIAYTMSLGAENSVAYSNNSIAIPTNFTISVTTEILPVSMTKTSVDCTMYICGDSTECSNLLLQYGSFCTQLNRALTGIAVEQDKNTQEVFAQVKQIYKTPPIKDFGGFNFSQILPDPSKPSKRSFIEDLLFNKVTLADAGFIKQYGDCLGDIAARDLICAQKFNGLTVLPPLLTDEMIAQYTSALLAGTITSGWTFGAGAALQIPFAMQMAYRFNGCGVTQNVLYENQKLIANQFNSAIGKIQDSLSSTASALGKLQDVVNQNAQALNTLVKQLSSNFGAISSVLNDILSRLDKVEAEVQIDRLITGRLQSLQTYVTQQLIRAAEIRASANLAATKMSECVLGQSKRVDFCGKGCHLMSFPQSAPHGVVFLHVTYVPAQEKNFTTAPAICHDGKAHFPREGVFVSNGTHWFVTQRNFYEPQIITTDNTFVSGNCDVVIGIVNNTVYDPLQPELDSGGGGSDIDPYKEFGSSYQLLNFLPLDFFPDLNALVDTATALYEEELTGREHCSPHHTAIRQALVCWDELTKLIAWMSSNITSEQVRTIIVNHVNDTWGLKVRQSLWFHLSCLTFGQHTVQEFLVSFGVWIRTPAPYRPPNAPILSTLPEHTVIC

SEQ ID NO: 11302 - protein, 1301 aa, Artificial Sequence
  SARS-CoV-2/USA/WA-UW292/2020__EPI_ISL_418077 spike protein (1-1147)(I909C_Y1047C) WhcAg construct
MFVFLVLLPLVSSQCVNLTTRTQLPPAYTNSFTRGVYYPDKVFRSSVLHSTQDLFLPFFSNVTWFHAIHVSGTNGTKRFDNPVLPFNDGVYFASTEKSNIIRGWIFGTTLDSKTQSLLIVNNATNVVIKVCEFQFCNDPFLGVYYHKNNKSWMESEFRVYSSANNCTFEYVSQPFLMDLEGKQGNFKNLREFVFKNIDGYFKIYSKHTPINLVRDLPQGFSALEPLVDLPIGINITRFQTLLALHRSYLTPGDSSSGWTAGAAAYYVGYLQPRTFLLKYNENGTITDAVDCALDPLSETKCTLKSFTVEKGIYQTSNFRVQPTESIVRFPNITNLCPFGEVFNATRFASVYAWNRKRISNCVADYSVLYNSASFSTFKCYGVSPTKLNDLCFTNVYADSFVIRGDEVRQIAPGQTGKIADYNYKLPDDFTGCVIAWNSNNLDSKVGGNYNYLYRLFRKSNLKPFERDISTEIYQASSTPCNGVEGFNCYFPLQSYGFQPTNGVGYQPYRVVVLSFELLHAPATVCGPKKSTNLVKNKCVNFNFNGLTGTGVLTESNKKFLPFQQFGRDIADTTDAVRDPQTLEILDITPCSFGGVSVITPGTNTSNQVAVLYQDVNCTEVPVAIHADQLTPTWRVYSTGSNVFQTRAGCLIGAEHVNNSYECDIPIGAGICASYQTQTNSPRRARSVASQSIIAYTMSLGAENSVAYSNNSIAIPTNFTISVTTEILPVSMTKTSVDCTMYICGDSTECSNLLLQYGSFCTQLNRALTGIAVEQDKNTQEVFAQVKQIYKTPPIKDFGGFNFSQILPDPSKPSKRSFIEDLLFNKVTLADAGFIKQYGDCLGDIAARDLICAQKFNGLTVLPPLLTDEMIAQYTSALLAGTITSGWTFGAGAALQIPFAMQMAYRFNGCGVTQNVLYENQKLIANQFNSAIGKIQDSLSSTASALGKLQDVVNQNAQALNTLVKQLSSNFGAISSVLNDILSRLDKVEAEVQIDRLITGRLQSLQTYVTQQLIRAAEIRASANLAATKMSECVLGQSKRVDFCGKGCHLMSFPQSAPHGVVFLHVTYVPAQEKNFTTAPAICHDGKAHFPREGVFVSNGTHWFVTQRNFYEPQIITTDNTFVSGNCDVVIGIVNNTVYDPLQPELDSGGGGSDIDPYKEFGSSYQLLNFLPLDFFPDLNALVDTATALYEEELTGREHCSPHHTAIRQALVCWDELTKLIAWMSSNITSEQVRTIIVNHVNDTWGLKVRQSLWFHLSCLTFGQHTVQEFLVSFGVWIRTPAPYRPPNAPILSTLPEHTVIC

SEQ ID NO: 11303 - protein, 1301 aa, Artificial Sequence
  SARS-CoV-2/Iceland/192/2020__EPI_ISL_417819 spike protein (1-1147)(I909C_Y1047C) WhcAg construct
MFVFFVLLPLVSSQCVNLTTRTQLPPAYTNSFTRGVYYPDKVFRSSVLHSTQDLFLPFFSNVTWFHAIHVSGTNGTKRFDNPVLPFNDGVYFASTEKSNIIRGWIFGTTLDSKTQSLLIVNNATNVVIKVCEFQFCNDPFLGVYYHKNNKSWMESEFRVYSSANNCTFEYVSQPFLMDLEGKQGNFKNLREFVFKNIDGYFKIYSKHTPINLVRDLPQGFSALEPLVDLPIGINITRFQTLLALHRSYLTPGDSSSGWTAGAAAYYVGYLQPRTFLLKYNENGTITDAVDCALDPLSETKCTLKSFTVEKGIYQTSNFRVQPTESIVRFPNITNLCPFGEVFNATRFASVYAWNRKRISNCVADYSVLYNSASFSTFKCYGVSPTKLNDLCFTNVYADSFVIRGDEVRQIAPGQTGKIADYNYKLPDDFTGCVIAWNSNNLDSKVGGNYNYLYRLFRKSNLKPFERDISTEIYQAGSTPCNGVEGFNCYFPLQSYGFQPTNGVGYQPYRVVVLSFELLHAPATVCGPKKSTNLVKNKCVNFNFNGLTGTGVLTESNKKFLPFQQFGRDIADTTDAVRDPQTLEILDITPCSFGGVSVITPGTNTSNQVAVLYQGVNCTEVPVAIHADQLTPTWRVYSTGSNVFQTRAGCLIGAEHVNNSYECDIPIGAGICASYQTQTNSPRRARSVASQSIIAYTMSLGAENSVAYSNNSIAIPTNFTISVTTEILPVSMTKTSVDCTMYICGDSTECSNLLLQYGSFCTQLNRALTGIAVEQDKNTQEVFAQVKQIYKTPPIKDFGGFNFSQILPDPSKPSKRSFIEDLLFNKVTLADAGFIKQYGDCLGDIAARDLICAQKFNGLTVLPPLLTDEMIAQYTSALLAGTITSGWTFGAGAALQIPFAMQMAYRFNGCGVTQNVLYENQKLIANQFNSAIGKIQDSLSSTASALGKLQDVVNQNAQALNTLVKQLSSNFGAISSVLNDILSRLDKVEAEVQIDRLITGRLQSLQTYVTQQLIRAAEIRASANLAATKMSECVLGQSKRVDFCGKGCHLMSFPQSAPHGVVFLHVTYVPAQEKNFTTAPAICHDGKAHFPREGVFVSNGTHWFVTQRNFYEPQIITTDNTFVSGNCDVVIGIVNNTVYDPLQPELDSGGGGSDIDPYKEFGSSYQLLNFLPLDFFPDLNALVDTATALYEEELTGREHCSPHHTAIRQALVCWDELTKLIAWMSSNITSEQVRTIIVNHVNDTWGLKVRQSLWFHLSCLTFGQHTVQEFLVSFGVWIRTPAPYRPPNAPILSTLPEHTVIC

SEQ ID NO: 11304 - protein, 1301 aa, Artificial Sequence
  SARS-CoV-2/Belgium/ULG-6939/2020__EPI_ISL_417020 spike protein (1-1147)(I909C_Y1047C) WhcAg construct
MFVFLVLLPLVSSQCVNLTTRTQLPPAYTNSFTRGVYYPDKVFRSSVLHSTQDLFLPFFSNVTWFHAIHVSGTNGTKRFDNPVLPFNDGVYFASTEKSNIIRGWIFGTTLDSKTQSLLIVNNATNVVIKVCEFQFCNDPFLGVYYHKNNKSWMESEFRVYSSANNCTFEYVSQPFLMDLEGKQGNFKNLREFVFKNIDGYFKIYSKHTPINLVRDLPQGFSALEPLVDLPIGINITRFQTLLALHRSYLTPGDSSSGWTAGAAAYYVGYLQPRTFLLKYNENGTITDAVDCALDPLSETKCTLKSFTVEKGIYQTSNFRVQPTESIVRFPNITNLCPFGEVFNATRFASVYAWNRKRISNCVADYSVLYNSASFSTFKCYGVSPTKLNDLCFTNVYADSFVIRGDEVRQIAPGQTGKIADYNYKLPDDFTGCVIAWNSNNLDSKVGGNYNYLYRLFRKSNLKPFERDISTEIYQAGSTPCNGVEGFNCYFPLQSYGFQPTNGVGYQPYRVVVLSFELLHAPATVCGPKKSTNLVKNKCVNFNFNGLTGTGVLTESNKKFLPFQQFGRDIADTTDAVRDPQTLEILDITPCSFGGVSVITPGTNTSNQVAVLYQGVNCTEVPVAIHADQLTPTWRVYSTGSNVFQTRAGCLIGAEHVNNSYECDIPIGAGICASYQTQTNSPRRARSVASQSIIAYTMSLGAENSVVYSNNSIAIPTNFTISVTTEILPVSMTKTSVDCTMYICGDSTECSNLLLQYGSFCTQLNRALTGIAVEQDKNTQEVFAQVKQIYKTPPIKDFGGFNFSQILPDPSKPSKRSFIEDLLFNKVTLADAGFIKQYGDCLGDIAARDLICAQKFNGLTVLPPLLTDEMIAQYTSALLAGTITSGWTFGAGAALQIPFAMQMAYRFNGCGVTQNVLYENQKLIANQFNSAIGKIQDSLSSTASALGKLQDVVNQNAQALNTLVKQLSSNFGAISSVLNDILSRLDKVEAEVQIDRLITGRLQSLQTYVTQQLIRAAEIRASANLAATKMSECVLGQSKRVDFCGKGCHLMSFPQSAPHGVVFLHVTYVPAQEKNFTTAPAICHDGKAHFPREGVFVSNGTHWFVTQRNFYEPQIITTDNTFVSGNCDVVIGIVNNTVYDPLQPELDSGGGGSDIDPYKEFGSSYQLLNFLPLDFFPDLNALVDTATALYEEELTGREHCSPHHTAIRQALVCWDELTKLIAWMSSNITSEQVRTIIVNHVNDTWGLKVRQSLWFHLSCLTFGQHTVQEFLVSFGVWIRTPAPYRPPNAPILSTLPEHTVIC

SEQ ID NO: 11305 - protein, 1301 aa, Artificial Sequence
  SARS-CoV-2/France/HF2496/2020__EPI_ISL_418231 spike protein (1-1147)(I909C_Y1047C) WhcAg construct
MFVFLVLLPLVSSQCVNLTTRTQLPPAYTNSFTRGVYYPDKVFRSSVLHSTQDLFLPFFSNVTWFHAIHVSGTNGTKRFDNPVLPFNDGVYFASTEKSNIIRGWIFGTTLDSKTQSLLIVNNATNVVIKVCEFQFCNDPFLGVYYHKNNKSWMESEFRVYSSANNCTFEYVSQPFLMDLEGKQGNFKNLREFVFKNIDGYFKIYSKHTPINLVRDLPQGFSALEPLVDLPIGINITRFQTLLALHRSYLTPGDSSSGWTAGAAAYYVGYLQPRTFLLKYNENGTITDAVDCALDPLSETKCTLKSFTVEKGIYQTSNFRVQPTESIVRFPNITNLCPFGEVFNATRFASVYAWNRKRISNCVADYSVLYNSASFSTFKCYGVSPTKLNDLCFTNVYADSFVIRGDEVRQIAPGQTGKIADYNYKLPDDFTGCVIAWNSNNLDSKVGGNYNYLYRLFRKSNLKPFERDISTEIYQAGSTPCNGVEGFNCYFPLQSYGFQPTNGVGYQPYRVVVLSFELLHAPATVCGPKKSTNLVKNKCVNFNFNGLTGTGVLTESNKKFLPFQQFGRDIADTTDAVRDPQTLEILDITPCSFGGVSVITPGTNTSNQVAVLYQGVNCTEVPVAIHADQLTPTWRVYSTGSNVFQTRAGCLIGAEHVNNSYECDIPIGAGICASYQTQTNSPRRARSVASQSIIAYTMSLGAENSVAYSNNSIAIPTNFTISVTTEILPVSMTKTSVDCTMYICGDSTECSNLLLQYGSFCTQLNRALTGIAVEQDKNTQEVFAQVKQIYKTPPIKDFGGFNFSQILPDPSKPSKRSFIEDLLFNKVTLADAGFIKQYGDCLGDIVARDLICAQKFNGLTVLPPLLTDEMIAQYTSALLAGTITSGWTFGAGAALQIPFAMQMAYRFNGCGVTQNVLYENQKLIANQFNSAIGKIQDSLSSTASALGKLQDVVNQNAQALNTLVKQLSSNFGAISSVLNDILSRLDKVEAEVQIDRLITGRLQSLQTYVTQQLIRAAEIRASANLAATKMSECVLGQSKRVDFCGKGCHLMSFPQSAPHGVVFLHVTYVPAQEKNFTTAPAICHDGKAHFPREGVFVSNGTHWFVTQRNFYEPQIITTDNTFVSGNCDVVIGIVNNTVYDPLQPELDSGGGGSDIDPYKEFGSSYQLLNFLPLDFFPDLNALVDTATALYEEELTGREHCSPHHTAIRQALVCWDELTKLIAWMSSNITSEQVRTIIVNHVNDTWGLKVRQSLWFHLSCLTFGQHTVQEFLVSFGVWIRTPAPYRPPNAPILSTLPEHTVIC

SEQ ID NO: 11306 - protein, 1301 aa, Artificial Sequence
  SARS-CoV-2/USA/WA-UW291/2020__EPI_ISL_418076 spike protein (1-1147)(I909C_Y1047C) WhcAg construct
MFVFLVLLPLVSSQCVNLTTRTQLPPAYTNSFTRGVYYPDKVFRSSVLHSTQDLFLPFFSNVTWFHAIHVSGTNGTKRFDNPVLPFNDGVYFASTEKSNIIRGWIFGTTLDSKTQSLLIVNNATNVVIKVCEFQFCNDPFLGVYYHKNNKSWMESEFRVYSSANNCTFEYVSQPFLMDLEGKQGNFKNLREFVFKNIDGYFKIYSKHTPINLVRDLPQGFSALEPLVDLPIGINITRFQTLLALHRSYLTPGDSSSGWTAGAAAYYVGYLQPRTFLLKYNENGTITDAVDCALDPLSETKCTLKSFTVEKGIYQTSNFRVQPTESIVRFPNITNLCPFGEVFNATRFASVYAWNRKRISNCVADYSVLYNSASFSTFKCYGVSPTKLNDLCFTNVYADSFVIRGDEVRQIAPGQTGKIADYNYKLPDDFTGCVIAWNSNNLDSKVGGNYNYLYRLFRKSNLKPFERDISTEIYQAGSTPCNGVEGFNCYFPLQSYGFQPTNGVGYQPYRVVVLSFELLHAPATVCGPKKSTNLVKNKCVNFNFNGLTGTGVLTESNKKFLPFQQFGRDIADTTDAVRDPQTLEILDITPCSFGGVSVITPGTNTSNQVAVLYQGVNCTEVPVAIHADQLTPTWRVYSTGSNVFQTRAGCLIGAEHVNNSYECDIPIGAGICASYQTQTNSPRRARSVASQSIIAYTMSLGAENSVAYSNNSIAIPTNFTISVTTEILPVSMTKTSVDCTMYICGDSTECSNLLLQYGSFCTQLNRALTGIAVEQDKNTQEVFAQVKQIYKTPPIKDFGGFNFSQILPDPSKPSKRSFIEDLLFNKVTLADAGFIKQYGDCLGDIAARDLICAQKFNGLTVLPPLLTDEMIAQYTSALLAGTITSGWTFGAGAALQIPFAMQMAYRFNGCGVTQNVLYENQKLIANQFNSAIGKIQYSLSSTASALGKLQDVVNQNAQALNTLVKQLSSNFGAISSVLNDILSRLDKVEAEVQIDRLITGRLQSLQTYVTQQLIRAAEIRASANLAATKMSECVLGQSKRVDFCGKGCHLMSFPQSAPHGVVFLHVTYVPAQEKNFTTAPAICHDGKAHFPREGVFVSNGTHWFVTQRNFYEPQIITTDNTFVSGNCDVVIGIVNNTVYDPLQPELDSGGGGSDIDPYKEFGSSYQLLNFLPLDFFPDLNALVDTATALYEEELTGREHCSPHHTAIRQALVCWDELTKLIAWMSSNITSEQVRTIIVNHVNDTWGLKVRQSLWFHLSCLTFGQHTVQEFLVSFGVWIRTPAPYRPPNAPILSTLPEHTVIC

SEQ ID NO: 11307 - protein, 1301 aa, Artificial Sequence; identical to SEQ ID NO: 11270
  SARS-CoV-2/Portugal/PT0034/2020__EPI_ISL_418019 spike protein (1-1147)(I909C_Y1047C) WhcAg construct

SEQ ID NO: 11308 - protein, 1301 aa, Artificial Sequence; identical to SEQ ID NO: 11262
  SARS-CoV-2/Iceland/202/2020__EPI_ISL_417750 spike protein (1-1147)(I909C_Y1047C) WhcAg construct

SEQ ID NO: 11309 - protein, 1301 aa, Artificial Sequence
  SARS-CoV-2/USA/WA-UW261/2020__EPI_ISL_418046 spike protein (1-1147)(I909C_Y1047C) WhcAg construct
MFVFLVLLPLVSSQCVNLTTRTQLPPAYTNSFTRGVYYPDKVFRSSVLHSTQDLFLPFFSNVTWFHAIHVSGTNGTKRFDNPVLPFNDGVYFASTEKSNIIRGWIFGTTLDSKTQSLLIVNNATNVVIKVCEFQFCNDPFLGVYYHKNNKSWMESEFRVYSSANNCTFEYVSQPFLMDLEGKQGNFKNLREFVFKNIDGYFKIYSKHTPINLVRDLPQGFSALEPLVDLPIGINITRFQTLLALHRSYLTPGDSSSGWTAGAAAYYVGYLQPRTFLLKYNENGTITDAVDCALDPLSETKCTLKSFTVEKGIYQTSNFRVQPTESIVRFPNITNLCPFGEVFNATRFTSVYAWNRKRISNCVADYSVLYNSASFSTFKCYGVSPTKLNDLCFTNVYADSFVIRGDEVRQIAPGQTGKIADYNYKLPDDFTGCVIAWNSNNLDSKVGGNYNYLYRLFRKSNLKPFERDISTEIYQAGSTPCNGVEGFNCYFPLQSYGFQPTNGVGYQPYRVVVLSFELLHAPATVCGPKKSTNLVKNKCVNFNFNGLTGTGVLTESNKKFLPFQQFGRDIADTTDAVRDPQTLEILDITPCSFGGVSVITPGTNTSNQVAVLYQDVNCTEVPVAIHADQLTPTWRVYSTGSNVFQTRAGCLIGAEHVNNSYECDIPIGAGICASYQTQTNSPRRARSVASQSIIAYTMSLGAENSVAYSNNSIAIPTNFTISVTTEILPVSMTKTSVDCTMYICGDSTECSNLLLQYGSFCTQLNRALTGIAVEQDKNTQEVFAQVKQIYKTPPIKDFGGFNFSQILPDPSKPSKRSFIEDLLFNKVTLADAGFIKQYGDCLGDIAARDLICAQKFNGLTVLPPLLTDEMIAQYTSALLAGTITSGWTFGAGAALQIPFAMQMAYRFNGCGVTQNVLYENQKLIANQFNSAIGKIQDSLSSTASALGKLQDVVNQNAQALNTLVKQLSSNFGAISSVLNDILSRLDKVEAEVQIDRLITGRLQSLQTYVTQQLIRAAEIRASANLAATKMSECVLGQSKRVDFCGKGCHLMSFPQSAPHGVVFLHVTYVPAQEKNFTTAPAICHDGKAHFPREGVFVSNGTHWFVTQRNFYEPQIITTDNTFVSGNCDVVIGIVNNTVYDPLQPELDSGGGGSDIDPYKEFGSSYQLLNFLPLDFFPDLNALVDTATALYEEELTGREHCSPHHTAIRQALVCWDELTKLIAWMSSNITSEQVRTIIVNHVNDTWGLKVRQSLWFHLSCLTFGQHTVQEFLVSFGVWIRTPAPYRPPNAPILSTLPEHTVIC

SEQ ID NO: 11310 - protein, 1301 aa, Artificial Sequence
  SARS-CoV-2/Portugal/PT0035/2020__EPI_ISL_418020 spike protein (1-1147)(I909C_Y1047C) WhcAg construct
MFVFLVLLPLVSSQCVNLTTRTQLPPAYTNSFTRGVYYPDKVFRSSVLHSTQDLFLPFFSNVTWFHAIHVSGTNGTKRFDNPVLPFNDGVYFASTEKSNIIRGWIFGTTLDSKTQSLLIVNNATNVVIKVCEFQFCNDPFLGVYYHKNNKSWMESEFRVYSSANNCTFEYVSQPFLMDLEGKQGNFKNLREFVFKNIDGYFKIYSKHTPINLVRDLPQGFSALEPLVDLPIGINITRFQTLLALHRSYLTPGDSSSGWTAGAAAYYVGYLQPRTFLLKYNENGTITDAVDCALDPLSETKCTLKSFTVEKGIYQTSNFRVQPTESIVRFPNITNLCPFGEVFNATRFASVYAWNRKRISNCVADYSVLYNSASFSTFKCYGVSPTKLNDLCFTNVYADSFVIRGDEVRQIAPGQTGKIADYNYKLPDDFTGCVIAWNSNNLDSKVGGNYNYLYRLFRKSNLKPFERDISTEIYQAGSTPCNGVEGFNCYFPLQSYGFQPTNGVGYQPYRVVVLSFELLHAPATVCGPKKSTNLVKNKCVNFNFNGLTGTGVLTESNKKFLPFQQFGRDIADTTDAVRDPQTLEILDITPCSFGGVSVITPGTNTSNQVAVLYQDVNCTEVPVAIHADQLTPTWRVYSTGSNVFQTRAGCLIGAEHVNNSYECDIPIGAGICASYQTQTNSPRRARSVASQSIIAYTMSLGAENSVAYSNNSIAIPTNFTISVTTEILPVSMTKTSVDCTMYICGDSTECSNLLLQYGSFCTQLNRALTGIAVEQDKNTQEVFAQVKQIYKTPPIKDFGGFNFSQILPDPSKPSKRSFIEDLLFNKVTLADAGFIKQYGDCLGDISARDLICAQKFNGLTVLPPLLTDEMIAQYTSALLAGTITSGWTFGAGAALQIPFAMQMAYRFNGCGVTQNVLYENQKLIANQFNSAIGKIQDSLSSTASALGKLQDVVNQNAQALNTLVKQLSSNFGAISSVLNDILSRLDKVEAEVQIDRLITGRLQSLQTYVTQQLIRAAEIRASANLAATKMSECVLGQSKRVDFCGKGCHLMSFPQSAPHGVVFLHVTYVPAQEKNFTTAPAICHDGKAHFPREGVFVSNGTHWFVTQRNFYEPQIITTDNTFVSGNCDVVIGIVNNTVYDPLQPELDSGGGGSDIDPYKEFGSSYQLLNFLPLDFFPDLNALVDTATALYEEELTGREHCSPHHTAIRQALVCWDELTKLIAWMSSNITSEQVRTIIVNHVNDTWGLKVRQSLWFHLSCLTFGQHTVQEFLVSFGVWIRTPAPYRPPNAPILSTLPEHTVIC

SEQ ID NO: 11311 - protein, 1301 aa, Artificial Sequence
  SARS-CoV-2/USA/NY-NYUMC7/2020__EPI_ISL_418192 spike protein (1-1147)(I909C_Y1047C) WhcAg construct
MFVFLVLLPLVSSQCVNLTTRTQLPPAYTNSFTRGVYYPDKVFRSSVLHSTQDLFLPFFSNVTWFHAIHVSGTNGTKRFDNPVLPFNDGVYFASTEKSNIIRGWIFGTTLDSKTQSLLIVNNATNVVIKVCEFQFCNDPFLGVYHHKNNKSWMESEFRVYSSANNCTFEYVSQPFLMDLEGKQGNFKNLREFVFKNIDGYFKIYSKHTPINLVRDLPQGFSALEPLVDLPIGINITRFQTLLALHRSYLTPGDSSSGWTAGAAAYYVGYLQPRTFLLKYNENGTITDAVDCALDPLSETKCTLKSFTVEKGIYQTSNFRVQPTESIVRFPNITNLCPFGEVFNATRFASVYAWNRKRISNCVADYSVLYNSASFSTFKCYGVSPTKLNDLCFTNVYADSFVIRGDEVRQIAPGQTGKIADYNYKLPDDFTGCVIAWNSNNLDSKVGGNYNYLYRLFRKSNLKPFERDISTEIYQAGSTPCNGVEGFNCYFPLQSYGFQPTNGVGYQPYRVVVLSFELLHAPATVCGPKKSTNLVKNKCVNFNFNGLTGTGVLTESNKKFLPFQQFGRDIADTTDAVRDPQTLEILDITPCSFGGVSVITPGTNTSNQVAVLYQGVNCTEVPVAIHADQLTPTWRVYSTGSNVFQTRAGCLIGAEHVNNSYECDIPIGAGICASYQTQTNSPRRARSVASQSIIAYTMSLGAENSVAYSNNSIAIPTNFTISVTTEILPVSMTKTSVDCTMYICGDSTECSNLLLQYGSFCTQLNRALTGIAVEQDKNTQEVFAQVKQIYKTPPIKDFGGFNFSQILPDPSKPSKRSFIEDLLFNKVTLADAGFIKQYGDCLGDIAARDLICAQKFNGLTVLPPLLTDEMIAQYTSALLAGTITSGWTFGAGAALQIPFAMQMAYRFNGCGVTQNVLYENQKLIANQFNSAIGKIQDSLSSTASALGKLQDVVNQNAQALNTLVKQLSSNFGAISSVLNDILSRLDKVEAEVQIDRLITGRLQSLQTYVTQQLIRAAEIRASANLAATKMSECVLGQSKRVDFCGKGCHLMSFPQSAPHGVVFLHVTYVPAQEKNFTTAPAICHDGKAHFPREGVFVSNGTHWFVTQRNFYEPQIITTDNTFVSGNCDVVIGIVNNTVYDPLQPELDSGGGGSDIDPYKEFGSSYQLLNFLPLDFFPDLNALVDTATALYEEELTGREHCSPHHTAIRQALVCWDELTKLIAWMSSNITSEQVRTIIVNHVNDTWGLKVRQSLWFHLSCLTFGQHTVQEFLVSFGVWIRTPAPYRPPNAPILSTLPEHTVIC

SEQ ID NO: 11312 - protein, 1301 aa, Artificial Sequence
  SARS-CoV-2/Iceland/189/2020__EPI_ISL_417709 spike protein (1-1147)(I909C_Y1047C) WhcAg construct
MFVFLVLLPLVSSQCVNLTTRTQLPPAYTNSFTRGVYYPDKVFRSSVLHSTQDLFLPFFSNVTWFHAIHVSGTNGTKRFDNPVLPFNDGVYFASTEKSNIIRGWIFGTTLDSKTQSLLIVNNATNVVIKVCEFQFCNDPFLGVYYHKNNKSWMESEFRVYSSANNCTFEYVSQPFLMDLEGKQGNFKNLREFVFKNIDGYFKIYSKHTPINLVRDLPQGFSALEPLVDLPIGINITRFQTLLALHRSYLTPGDSSSGWTAGAAAYYVGYLQPRTFLLKYNENGTITDAVDCALDPLSETKCTLKSFTVEKGIYQTSNFRVQPTESIVRFPNITNLCPFGEVFNATRFASVYAWNRKRISNCVADYSVLYNSASFSTFKCYGVSPTKLNDLCFTNVYADSFVIRGDEVRQIAPGQTGKIADYNYKLPDDFTGCVIAWNSNNLDSKVGGNYNYLYRLFRKSNLKPFERDISTEIYQAGSTPCNGVEGFNCYFPLQSYGFQPTNGVGYQPYRVVVLSFELLHAPATVCGPKKSTNLVKNKCVNFNFNGLTGTGVLTESNKKFLPFQQFGRDIADTTDAVRDPQTLEILDITPCSFGGVSVITPGTNTSNQVAVLYQGVNCTEVPVAIHADQLTPTWRVYSTGSNVFQTRAGCLIGAEHVNNSYECDIPIGAGICASYQTQTNSPRRARSVASQSIIAYTMSLGAENSVAYSNNSIAIPTNFTISVTTEILPVSMTKTSVDCTMYICGDSTECSNLLLQYGSFCTQLNRALTGIAVEQDKNTQEVFAQVKQIYKTPPIKDFGGFNFSQILPDPSKPSKRSFIEDLLFNKVTLADAGFTKQYGDCLGDIAARDLICAQKFNGLTVLPPLLTDEMIAQYTSALLAGTITSGWTFGAGAALQIPFAMQMAYRFNGCGVTQNVLYENQKLIANQFNSAIGKIQDSLSSTASALGKLQDVVNQNAQALNTLVKQLSSNFGAISSVLNDILSRLDKVEAEVQIDRLITGRLQSLQTYVTQQLIRAAEIRASANLAATKMSECVLGQSKRVDFCGKGCHLMSFPQSAPHGVVFLHVTYVPAQEKNFTTAPAICHDGKAHFPREGVFVSNGTHWFVTQRNFYEPQIITTDNTFVSGNCDVVIGIVNNTVYDPLQPELDSGGGGSDIDPYKEFGSSYQLLNFLPLDFFPDLNALVDTATALYEEELTGREHCSPHHTAIRQALVCWDELTKLIAWMSSNITSEQVRTIIVNHVNDTWGLKVRQSLWFHLSCLTFGQHTVQEFLVSFGVWIRTPAPYRPPNAPILSTLPEHTVIC

SEQ ID NO: 11313 - protein, 1301 aa, Artificial Sequence
  SARS-CoV-2/Australia/NSW56/2020__EPI_ISL_417408 spike protein (1-1147)(I909C_Y1047C) WhcAg construct
MFVFLVLLPLVSSQCVNLTTRTQLPPAYTNSFTRGVYYPDKVFRSSVLHSTQDLFLPFFSNVTWFHAIHVSGTNGTKRFDNPVLPFNDGVYFASTEKSNIIRGWIFGTTLDSKTQSLLIVNNATNVVIKVCEFQFCNDPFLGVYYHKNNKSWMESEFRVYSSANNCTFEYVSQPFLMDLEGKQGNFKNLREFVFKNIDGYFKIYSKHTPINLVRDLPQGFSALEPLVDLPIGINITRFQTLLALHRSYLTPGDSSSGWTAGAAAYYVGYLQPRTFLLKYNENGTITDAVDCALDPLSETKCTLKSFTVEKGIYQTSNFRVQPTESIVRFPNITNLCPFGEVFNATRFASVYAWNRKRISNCVADYSVLYNSASFSTFKCYGVSPTKLNDLCFTNVYADSFVIRGDEVRQIAPGQTGKIADYNYKLPDDFTGCVIAWNSNNLDSKVGGNYNYLYRLFRKSNLKPFERDISTEIYQAGSTPCNGVEGFNCYFPLQSYGFQPTNGVGYQPYRVVVLSFELLHAPATVCGPKKSTNLVKNKCVNFNFNGLTGTGVLTESNKKFLPFQQFGRDIADTTDAVRDPQTLEILDITPCSFGGVSVITPGTNTSNQVAVLYQDVNCTEVPVAIHADQLTPTWRVYSTGSNVFQTRAGCLIGAEHVNNSYECDIPIGAGICASYQTQTNSPRRARSVASQSIIAYTMSLGAENSVAYSNNSIAIPTNFTISVTTEILPVSMTKTSVDCTMYICGDSTECSNLLLQYGSFCTQLNRALTGIAVEQDKNTQEVFAQVKQIYKTPPIKDFGGFNFSQILPDSSKPSKRSFIEDLLFNKVTLADAGFIKQYGDCLGDIAARDLICAQKFNGLTVLPPLLTDEMIAQYTSALLAGTITSGWTFGAGAALQIPFAMQMAYRFNGCGVTQNVLYENQKLIANQFNSAIGKIQDSLSSTASALGKLQDVVNQNAQALNTLVKQLSSNFGAISSVLNDILSRLDKVEAEVQIDRLITGRLQSLQTYVTQQLIRAAEIRASANLAATKMSECVLGQSKRVDFCGKGCHLMSFPQSAPHGVVFLHVTYVPAQEKNFTTAPAICHDGKAHFPREGVFVSNGTHWFVTQRNFYEPQIITTDNTFVSGNCDVVIGIVNNTVYDPLQPELDSGGGGSDIDPYKEFGSSYQLLNFLPLDFFPDLNALVDTATALYEEELTGREHCSPHHTAIRQALVCWDELTKLIAWMSSNITSEQVRTIIVNHVNDTWGLKVRQSLWFHLSCLTFGQHTVQEFLVSFGVWIRTPAPYRPPNAPILSTLPEHTVIC

SEQ ID NO: 11314 - protein, 1301 aa, Artificial Sequence
  SARS-CoV-2/Iceland/280/2020__EPI_ISL_417608 spike protein (1-1147)(I909C_Y1047C) WhcAg construct
MFVFLVLLPLVSSQCVNLTTRTQLPPAYTNSFTRGVYYPDKVFRSSVLHSTQDLFLPFFSNVTWFHAIHVSGTNGTKRFDNPVLPFNDGVYFASTEKSNIIRGWIFGTTLDSKTQSLLIVNNATNVVIKVCEFQFCNDPFLGVYYHKNNKSWMESEFRVYSSANNCTFEYVSQPFLMDLEGKQGNFKNLREFVFKNIDGYFKIYSKHTPINLVRDLPQGFSALEPLVDLPIGINITRFQTLLALHRSYLTPGDSSSGWTAGAAAYYVGYLQPRTFLLKYNENGTITDAVDCALDPLSETKCTLKSFTVEKGIYQTSNFRVQPTESIVRFPNITNLCPFGEVFNATRFASVYAWNRKRISNCVADYSVLYNSASFSTFKCYGVSPTKLNDLCFTNVYADSFVIRGDEVRQIAPGQTGKIADYNYKLPDDFTGCVIAWNSNNLDSKVGGNYNYLYRLFRKSNLKPFERDISTEIYQAGSTPCNGVEGFNCYFPLQSYGFQPTNGVGYQPYRVVVLSFELLHAPATVCGPKKSTNLVKNKCVNFNFNGLTGTGVLTESNKKFLPFQQFGRDIADTTDAVRDPQTLEILDITPCSFGGVSVITPGTNTSNQVAVLYQGVNCTEVPVAIHADQLTPTWRVYSTGSNVFQTRAGCLIGAEHVNNSYECDIPIGAGICASYHTQTNSPRRARSVASQSIIAYTMSLGAENSVAYSNNSIAIPTNFTISVTTEILPVSMTKTSVDCTMYICGDSTECSNLLLQYGSFCTQLNRALTGIAVEQDKNTQEVFAQVKQIYKTPPIKDFGGFNFSQILPDPSKPSKRSFIEDLLFNKVTLADAGFIKQYGDCLGDIAARDLICAQKFNGLTVLPPLLTDEMIAQYTSALLAGTITSGWTFGAGAALQIPFAMQMAYRFNGCGVTQNVLYENQKLIANQFNSAIGKIQDSLSSTASALGKLQDVVNQNAQALNTLVKQLSSNFGAISSVLNDILSRLDKVEAEVQIDRLITGRLQSLQTYVTQQLIRAAEIRASANLAATKMSECVLGQSKRVDFCGKGCHLMSFPQSAPHGVVFLHVTYVPAQEKNFTTAPAICHDGKAHFPREGVFVSNGTHWFVTQRNFYEPQIITTDNTFVSGNCDVVIGIVNNTVYDPLQPELDSGGGGSDIDPYKEFGSSYQLLNFLPLDFFPDLNALVDTATALYEEELTGREHCSPHHTAIRQALVCWDELTKLIAWMSSNITSEQVRTIIVNHVNDTWGLKVRQSLWFHLSCLTFGQHTVQEFLVSFGVWIRTPAPYRPPNAPILSTLPEHTVIC

SEQ ID NO: 11315 - protein, 1301 aa, Artificial Sequence; identical to SEQ ID NO: 11270
  SARS-CoV-2/Iceland/247/2020__EPI_ISL_417575 spike protein (1-1147)(I909C_Y1047C) WhcAg construct

SEQ ID NO: 11316 - protein, 1301 aa, Artificial Sequence
  SARS-CoV-2/Iceland/238/2020__EPI_ISL_417566 spike protein (1-1147)(I909C_Y1047C) WhcAg construct
MFVFLVLLPLVSSQCVNLTTRTQLPPAYTNSFTRGVYYPDKVFRSSVLHSTQDLFLPFFSNVTWFHAIHVSGTNGTKRFDNPVLPFNDGVYFASTEKSNIIRGWIFGTTLDSKTQSLLIVNNATNVVIKVCEFQFCNDPFLGVYYHKNNKSWMESEFRVYSSANNCTFEYVSQPFLMDLEGKQGNFKNLREFVFKNIDGYFKIYSKHTPINLVRDLPQGFSALEPLVDLPIGINITRFQTLLALHRSYLTPGDSSSGWTAGAAAYYVGYLQPRTFLLKYNENGTITDAVDCALDPLSETKCTLKSFTVEKGIYQTSNFRVQPTESIVRFPNITNLCPFGEVFNATRFASVYAWNRKRISNCVADYSVLYNSASFSTFKCYGVSPTKLNDLCFTNVYADSFVIRGDEVRQIAPGQTGKIADYNYKLPDDFTGCVIAWNSNNLDSKVGGNYNYLYRLFRKSNLKPFERDISTEIYQAGSTPCNGVEGFNCYFPLQSYGFQPTNGVGYQPYRVVVLSFELLHAPATVCGPKKSTNLVKNKCVNFNFNGLTGTGVLTESNKKFLPFQQFGRDIADTTDAVRDPQTLEILDITPCSFGGVSVITPGTNTSNQVAVLYQGVNCTEVPVAIHADQLTPTWRVYSTGSNVFQTRAGCLIGAEHVNNSYECDIPIGAGICASYQTQTNSPRRARSVASQSIIAYTMSLGAENSVAYSNNSIAIPTNFTISVTTEILPVSMTKTSVDCTMYICGDSTECSNLLLQYGSFCTQLNRALTGIAVEQDKNTQEVFAQVKQIYKTPPIKDFGGFNFSQILPDPSKPSKRSFIEDLLFNKVTLADVGFIKQYGDCLGDIAARDLICAQKFNGLTVLPPLLTDEMIAQYTSALLAGTITSGWTFGAGAALQIPFAMQMAYRFNGCGVTQNVLYENQKLIANQFNSAIGKIQDSLSSTASALGKLQDVVNQNAQALNTLVKQLSSNFGAISSVLNDILSRLDKVEAEVQIDRLITGRLQSLQTYVTQQLIRAAEIRASANLAATKMSECVLGQSKRVDFCGKGCHLMSFPQSAPHGVVFLHVTYVPAQEKNFTTAPAICHDGKAHFPREGVFVSNGTHWFVTQRNFYEPQIITTDNTFVSGNCDVVIGIVNNTVYDPLQPELDSGGGGSDIDPYKEFGSSYQLLNFLPLDFFPDLNALVDTATALYEEELTGREHCSPHHTAIRQALVCWDELTKLIAWMSSNITSEQVRTIIVNHVNDTWGLKVRQSLWFHLSCLTFGQHTVQEFLVSFGVWIRTPAPYRPPNAPILSTLPEHTVIC

SEQ ID NO: 11317 - protein, 1301 aa, Artificial Sequence
  SARS-CoV-2/Greece/16/2020__EPI_ISL_418265 spike protein (1-1147)(I909C_Y1047C) WhcAg construct
MFVFLVLLPLVSSQCVNLTTRTQLPPAYTNSFTRGVYYPDKVFRSSVLHSTQDLFLPFFSNVTWFHAIHVSGTNGTKRFDNPVLPFNDGVYFASTEKSNIIRGWIFGTTLDSKTQSLLIVNNATNVVIKVCEFQFCNDPFLGVYYHKNNKSWMESEFRVYSSANNCTFEYVSQPFLMDLEGKQGNFKNLREFVFKNVDGYFKIYSKHTPINLVRDLPQGFSALEPLVDLPIGINITRFQTLLALHRSYLTPGDSSSGWTAGAAAYYVGYLQPRTFLLKYNENGTITDAVDCALDPLSETKCTLKSFTVEKGIYQTSNFRVQPTESIVRFPNITNLCPFGEVFNATRFASVYAWNRKRISNCVADYSVLYNSASFSTFKCYGVSPTKLNDLCFTNVYADSFVIRGDEVRQIAPGQTGKIADYNYKLPDDFTGCVIAWNSNNLDSKVGGNYNYLYRLFRKSNLKPFERDISTEIYQAGSTPCNGVEGFNCYFPLQSYGFQPTNGVGYQPYRVVVLSFELLHAPATVCGPKKSTNLVKNKCVNFNFNGLTGTGVLTESNKKFLPFQQFGRDIADTTDAVRDPQTLEILDITPCSFGGVSVITPGTNTSNQVAVLYQDVNCTEVPVAIHADQLTPTWRVYSTGSNVFQTRAGCLIGAEHVNNSYECDIPIGAGICASYQTQTNSPRRARSVASQSIIAYTMSLGAENSVAYSNNSIAIPTNFTISVTTEILPVSMTKTSVDCTMYICGDSTECSNLLLQYGSFCTQLNRALTGIAVEQDKNTQEVFAQVKQIYKTPPIKDFGGFNFSQILPDPSKPSKRSFIEDLLFNKVTLADAGFIKQYGDCLGDIAARDLICAQKFNGLTVLPPLLTDEMIAQYTSALLAGTITSGWTFGAGAALQIPFAMQMAYRFNGCGVTQNVLYENQKLIANQFNSAIGKIQDSLSSTASALGKLQDVVNQNAQALNTLVKQLSSNFGAISSVLNDILSRLDKVEAEVQIDRLITGRLQSLQTYVTQQLIRAAEIRASANLAATKMSECVLGQSKRVDFCGKGCHLMSFPQSAPHGVVFLHVTYVPAQEKNFTTAPAICHDGKAHFPREGVFVSNGTHWFVTQRNFYEPQIITTDNTFVSGNCDVVIGIVNNTVYDPLQPELDSGGGGSDIDPYKEFGSSYQLLNFLPLDFFPDLNALVDTATALYEEELTGREHCSPHHTAIRQALVCWDELTKLIAWMSSNITSEQVRTIIVNHVNDTWGLKVRQSLWFHLSCLTFGQHTVQEFLVSFGVWIRTPAPYRPPNAPILSTLPEHTVIC

SEQ ID NO: 11318 - protein, 1301 aa, Artificial Sequence
  SARS-CoV-2/Iceland/319/2020__EPI_ISL_417648 spike protein (1-1147)(I909C_Y1047C) WhcAg construct
MFVFLVLLPLVSSQCVNLTTRTQLPPAYTNSFTRGVYYPDKVFRSSVLHSTQDLFLPFFSNVTWFHAIHVSGTNGTKRFDNPVLPFNDGVYFASTEKSNIIRGWIFGTTLDSKTQSLLIVNNATNVVIKVCEFQFCNDPFLGVYYHKNNKSWMESEFRVYSSANNCTFEYVSQPFLIDLEGKQGNFKNLREFVFKNIDGYFKIYSKHTPINLVRDLPQGFSALEPLVDLPIGINITRFQTLLALHRSYLTPGDSSSGWTAGAAAYYVGYLQPRTFLLKYNENGTITDAVDCALDPLSETKCTLKSFTVEKGIYQTSNFRVQPTESIVRFPNITNLCPFGEVFNATRFASVYAWNRKRISNCVADYSVLYNSASFSTFKCYGVSPTKLNDLCFTNVYADSFVIRGDEVRQIAPGQTGKIADYNYKLPDDFTGCVIAWNSNNLDSKVGGNYNYLYRLFRKSNLKPFERDISTEIYQAGSTPCNGVEGFNCYFPLQSYGFQPTNGVGYQPYRVVVLSFELLHAPATVCGPKKSTNLVKNKCVNFNFNGLTGTGVLTESNKKFLPFQQFGRDIADTTDAVRDPQTLEILDITPCSFGGVSVITPGTNTSNQVAVLYQGVNCTEVPVAIHADQLTPTWRVYSTGSNVFQTRAGCLIGAEHVNNSYECDIPIGAGICASYQTQTNSPRRARSVASQSIIAYTMSLGAENSVAYSNNSIAIPTNFTISVTTEILPVSMTKTSVDCTMYICGDSTECSNLLLQYGSFCTQLNRALTGIAVEQDKNTQEVFAQVKQIYKTPPIKDFGGFNFSQILPDPSKPSKRSFIEDLLFNKVTLADAGFIKQYGDCLGDIAARDLICAQKFNGLTVLPPLLTDEMIAQYTSALLAGTITSGWTFGAGAALQIPFAMQMAYRFNGCGVTQNVLYENQKLIANQFNSAIGKIQDSLSSTASALGKLQDVVNQNAQALNTLVKQLSSNFGAISSVLNDILSRLDKVEAEVQIDRLITGRLQSLQTYVTQQLIRAAEIRASANLAATKMSECVLGQSKRVDFCGKGCHLMSFPQSAPHGVVFLHVTYVPAQEKNFTTAPAICHDGKAHFPREGVFVSNGTHWFVTQRNFYEPQIITTDNTFVSGNCDVVIGIVNNTVYDPLQPELDSGGGGSDIDPYKEFGSSYQLLNFLPLDFFPDLNALVDTATALYEEELTGREHCSPHHTAIRQALVCWDELTKLIAWMSSNITSEQVRTIIVNHVNDTWGLKVRQSLWFHLSCLTFGQHTVQEFLVSFGVWIRTPAPYRPPNAPILSTLPEHTVIC

SEQ ID NO: 11319 - protein, 1301 aa, Artificial Sequence
  SARS-CoV-2/Congo/94/2020__EPI_ISL_417947 spike protein (1-1147)(I909C_Y1047C) WhcAg construct
MFVFLVLLPLVSSQCVNLTTRTQLPPAYTNSFTRGVYYPDKVFRSSVLHSTQDLFLPFFSNVTWFHAIHVSGTNGTKRFDNPVLPFNDGVYFASTEKSNIIRGWIFGTTLDSKTQSLLIVNNATNVVIKVCEFQFCNDPFLGVYYHKNNKSWMESEFRVYSSANNCTFEYVSQPFLMDLEGKQGNFKNLREFVFKNIDGYFKIYSKHTPINLVRDLPQGFSALEPLVDLPIGINITRFQTLLALHRSYLTPGDSSSGWTAGAAAYYVGYLQPRTFLLKYNENGTITDAVDCALDPLSETKCTLKSFTVEKGIYQTSNFRVQPTESIVRFPNITNLCPFGEVFNATRFASVYAWNRKRISNCVADYSVLYNSASFSTFKCYGVSPTKLNDLCFTNVYADSFVIRGDEVRQIAPGQTGKIADYNYKLPDDFTGCVIAWNSNNLDSKVGGNYNYLYRLFRKSNLKPFERDISTEIYQAGSTPCNGVEGFNCYFPLQSYGFQPTNGVGYQPYRVVVLSFELLHAPATVCGPKKSTNLVKNKCVNFNFNGLTGTGVLTESNKKFLPFQQFGRDIADTTDAVRDPQTLEILDITPCSFGGVSVITPGTNTSNQVAVLYQGVNCTEVPVAIHADQLTPTWRVYSTGSNVFQTRAGCLIGAEHVNNSYECDIPIGAGICASYQTQTNSPRRARSVASQSIIAYTMSLGAENSVAYSNNSIAIPTNFTISVTTEILPVSMTKTSVDCTMYICGDSTECSNLLLQYGSFCTQLNRALTGIAVEQDKNTQEVFAQVKQIYKTPPIKDFGGFNFSQILPDPSKPSKRSFIEDILFNKVTLADAGFIKQYGDCLGDIAARDLICAQKFNGLTVLPPLLTDEMIAQYTSALLAGTITSGWTFGAGAALQIPFAMQMAYRFNGCGVTQNVLYENQKLIANQFNSAIGKIQDSLSSTASALGKLQDVVNQNAQALNTLVKQLSSNFGAISSVLNDILSRLDKVEAEVQIDRLITGRLQSLQTYVTQQLIRAAEIRASANLAATKMSECVLGQSKRVDFCGKGCHLMSFPQSAPHGVVFLHVTYVPAQEKNFTTAPAICHDGKAHFPREGVFVSNGTHWFVTQRNFYEPQIITTDNTFVSGNCDVVIGIVNNTVYDPLQPELDSGGGGSDIDPYKEFGSSYQLLNFLPLDFFPDLNALVDTATALYEEELTGREHCSPHHTAIRQALVCWDELTKLIAWMSSNITSEQVRTIIVNHVNDTWGLKVRQSLWFHLSCLTFGQHTVQEFLVSFGVWIRTPAPYRPPNAPILSTLPEHTVIC

SEQ ID NO: 11320 - protein, 1301 aa, Artificial Sequence
  SARS-CoV-2/Congo/158/2020__EPI_ISL_417950 spike protein (1-1147)(I909C_Y1047C) WhcAg construct
MFVFLVLLPLVSSQCVNLTTRTQLPPAYTNSFTRGVYYPDKVFRSSVLHSTQDLFLPFFSNVTWFHAIHVSGTNGTKRFDNPVLPFNDGVYFASTEKSNIIRGWIFGTTLDSKTQSLLIVNNATNVVIKVCEFQFCNDPFLGVYYHKNNKSWMESEFRVYSSANNCTFEYVSQPFLMDLEGKQGNFKNLREFVFKNIDGYFKIYSKHTPINLVRDLPQGFSALEPLVDLPIGINITRFQTLLALHRSYLTPGDSSSGWTAGAAAYYVGYLQPRTFLLKYNENGTITDAVDCALDPLSETKCTLKSFTVEKGIYQTSNFRVQPTESIVRFPNITNLCPFGEVFNATRFASVYAWNRKRISNCVADYSVLYNSASFSTFKCYGVSPTKLNDLCFTNVYADSFVIRGDEVRQIAPGQTGKIADYNYKLPDDFTGCVIAWNSNNLDSKVGGNYNYLYRLFRKSNLKPFERDISTEIYQAGSTPCNGVEGFNCYFPLQSYGFQPTNGVGYQPYRVVVLSFELLHAPATVCGPKKSTNLVKNKCVNFNFNGLTGTGVLTESNKKFLPFQQFGRDIADTTDAVRDPQTLEILDITPCSFGGVSVITPGTNTSNQVAVLYQDVNCTEVPVAIHADQLTPTWRVYSTGSNVFQTRAGCLIGAEHVNNSYECDIPIGAGICASYQTQTNSPRRARSVASQSIIAYTMSLGAENSVAYSNNSIAIPTNFTISVTTEILPVSMTKTSVDCTMYICGDSTECSNLLLQYGSFCTQLNRALTGIAVEQDKNTQEVFAQVKQIYKTPPIKDFGGFNFSQILPDPSKPSKRSFIEDLLFNKVTLADAGFIKQYGDCLGDIAARDLICAQKFNGLTVLPPLLTDEMIAQYTSALLAGTITSGWTFGAGAALQIPFAMQMAYRFNGCGVTQNVLYENQKLIANQFNSAIGKIQDSLSSTASALGKLQDVVNQNAQALNTLVKQLSSNFGAISSVLNDILSRLDKVEAEVQIDRLITGRLQSLQTYVTQQLIRAAEIRASANLAATKMSECVLGQSKRVDFCGKGCHLMSFPQSAPHGVVFLHVTYVPAQEKNFTTAPAICHDGKAHFPREGVFVSNGTHWFVTQRNFYEPQIITTDNTFLSGNCDVVIGIVNNTVYDPLQPELDSGGGGSDIDPYKEFGSSYQLLNFLPLDFFPDLNALVDTATALYEEELTGREHCSPHHTAIRQALVCWDELTKLIAWMSSNITSEQVRTIIVNHVNDTWGLKVRQSLWFHLSCLTFGQHTVQEFLVSFGVWIRTPAPYRPPNAPILSTLPEHTVIC

SEQ ID NO: 11321 - protein, 1301 aa, Artificial Sequence
  SARS-CoV-2/USA/UT-00034/2020__EPI_ISL_417977 spike protein (1-1147)(I909C_Y1047C) WhcAg construct
MFVFLVLLPLVSSQCVNLTTRTQLPPAYTNSFTRGVYYPDKVFRSSVLHSTQDLFLPFFSNVTWFHAIHVSGTNGTKRFDNPVLPFNDGVYFASTEKSNIIRGWIFGTTLDSKTQSLLIVNNATNVVIKVCEFQFCNDPFLGVYYYKNNKSWMESEFRVYSSANNCTFEYVSQPFLMDLEGKQGNFKNLREFVFKNIDGYFKIYSKHTPINLVRDLPQGFSALEPLVDLPIGINITRFQTLLALHRSYLTPGDSSSGWTAGAAAYYVGYLQPRTFLLKYNENGTITDAVDCALDPLSETKCTLKSFTVEKGIYQTSNFRVQPTESIVRFPNITNLCPFGEVFNATRFASVYAWNRKRISNCVADYSVLYNSASFSTFKCYGVSPTKLNDLCFTNVYADSFVIRGDEVRQIAPGQTGKIADYNYKLPDDFTGCVIAWNSNNLDSKVGGNYNYLYRLFRKSNLKPFERDISTEIYQAGSTPCNGVEGFNCYFPLQSYGFQPTNGVGYQPYRVVVLSFELLHAPATVCGPKKSTNLVKNKCVNFNFNGLTGTGVLTESNKKFLPFQQFGRDIADTTDAVRDPQTLEILDITPCSFGGVSVITPGTNTSNQVAVLYQGVNCTEVPVAIHADQLTPTWRVYSTGSNVFQTRAGCLIGAEHVNNSYECDIPIGAGICASYQTQTNSPRRARSVASQSIIAYTMSLGAENSVAYSNNSIAIPTNFTISVTTEILPVSMTKTSVDCTMYICGDSTECSNLLLQYGSFCTQLNRALTGIAVEQDKNTQEVFAQVKQIYKTPPIKDFGGFNFSQILPDPSKPSKRSFIEDLLFNKVTLADAGFIKQYGDCLGDIAARDLICAQKFNGLTVLPPLLTDEMIAQYTSALLAGTITSGWTFGAGAALQIPFAMQMAYRFNGCGVTQNVLYENQKLIANQFNSAIGKIQDSLSSTASALGKLQDVVNQNAQALNTLVKQLSSNFGAISSVLNDILSRLDKVEAEVQIDRLITGRLQSLQTYVTQQLIRAAEIRASANLAATKMSECVLGQSKRVDFCGKGCHLMSFPQSAPHGVVFLHVTYVPAQEKNFTTAPAICHDGKAHFPREGVFVSNGTHWFVTQRNFYEPQIITTDNTFVSGNCDVVIGIVNNTVYDPLQPELDSGGGGSDIDPYKEFGSSYQLLNFLPLDFFPDLNALVDTATALYEEELTGREHCSPHHTAIRQALVCWDELTKLIAWMSSNITSEQVRTIIVNHVNDTWGLKVRQSLWFHLSCLTFGQHTVQEFLVSFGVWIRTPAPYRPPNAPILSTLPEHTVIC

SEQ ID NO: 11322 - protein, 1301 aa, Artificial Sequence
  SARS-CoV-2/USA/UT-00033/2020__EPI_ISL_417976 spike protein (1-1147)(I909C_Y1047C) WhcAg construct
MFVFLVLLPLVSSQCVNLTTRTQLPPAYTNSFTRGVYYPDKVFRSSVLHSTQDLFLPFFSNVTWFHAIHVSGTNGTKRFDNPVLPFNDGVYFASTEKSNIIRGWIFGTTLDSKTQSLLIVNNATNVVIKVCEFQFCNDPFLGVYYHKNNKSWMESEFRVYSSANNCTFEYVSQPFLMDLEGKQGNFKNLREFVFKNIDGYFKIYSKHTPINLVRDLPQGFSALEPLVDLPIGINITRFQTLLALHRSYLTPGDSSSGLTAGAAAYYVGYLQPRTFLLKYNENGTITDAVDCALDPLSETKCTLKSFTVEKGIYQTSNFRVQPTESIVRFPNITNLCPFGEVFNATRFASVYAWNRKRISNCVADYSVLYNSASFSTFKCYGVSPTKLNDLCFTNVYADSFVIRGDEVRQIAPGQTGKIADYNYKLPDDFTGCVIAWNSNNLDSKVGGNYNYLYRLFRKSNLKPFERDISTEIYQAGSTPCNGVEGFNCYFPLQSYGFQPTNGVGYQPYRVVVLSFELLHAPATVCGPKKSTNLVKNKCVNFNFNGLTGTGVLTESNKKFLPFQQFGRDIADTTDAVRDPQTLEILDITPCSFGGVSVITPGTNTSNQVAVLYQGVNCTEVPVAIHADQLTPTWRVYSTGSNVFQTRAGCLIGAEHVNNSYECDIPIGAGICASYQTQTNSPRRARSVASQSIIAYTMSLGAENSVAYSNNSIAIPTNFTISVTTEILPVSMTKTSVDCTMYICGDSTECSNLLLQYGSFCTQLNRALTGIAVEQDKNTQEVFAQVKQIYKTPPIKDFGGFNFSQILPDPSKPSKRSFIEDLLFNKVTLADAGFIKQYGDCLGDIAARDLICAQKFNGLTVLPPLLTDEMIAQYTSALLAGTITSGWTFGAGAALQIPFAMQMAYRFNGCGVTQNVLYENQKLIANQFNSAIGKIQDSLSSTASALGKLQDVVNQNAQALNTLVKQLSSNFGAISSVLNDILSRLDKVEAEVQIDRLITGRLQSLQTYVTQQLIRAAEIRASANLAATKMSECVLGQSKRVDFCGKGCHLMSFPQSAPHGVVFLHVTYVPAQEKNFTTAPAICHDGKAHFPREGVFVSNGTHWFVTQRNFYEPQIITTDNTFVSGNCDVVIGIVNNTVYDPLQPELDSGGGGSDIDPYKEFGSSYQLLNFLPLDFFPDLNALVDTATALYEEELTGREHCSPHHTAIRQALVCWDELTKLIAWMSSNITSEQVRTIIVNHVNDTWGLKVRQSLWFHLSCLTFGQHTVQEFLVSFGVWIRTPAPYRPPNAPILSTLPEHTVIC

SEQ ID NO: 11323 - protein, 1301 aa, Artificial Sequence
  SARS-CoV-2/USA/WI-13/2020__EPI_ISL_417516 spike protein (1-1147)(I909C_Y1047C) WhcAg construct
MFVFLVLLPLVSSQCVNLTTRTQLPPAYTNSFTRGVYYPDKVFRSSVLHSTQDLFLPFFSNVTWFHAIHVSGTNGTKRFDNPVLPFNDGVYFASTEKSNIIRGWIFGTTLDSKTQSLLIVNNATNVVIKVCEFQFCNDPFLGVYYHKNNKSWMESEFRVYSSANNCTFEYVSQPFLMDLEGKQGNFKNLREFVFKNIDGYFKIYSKHTPINLVRDLPQGFSALEPLVDLPIGINITRFQTLLALHRSYLTPGDSSSGWTAGAAAYYVGYLQPRTFLLKYNENGTITDAVDCALDPLSETKCTLKSFTVEKGIYQTSNFRVLPTESIVRFPNITNLCPFGEVFNATRFASVYAWNRKRISNCVADYSVLYNSASFSTFKCYGVSPTKLNDLCFTNVYADSFVIRGDEVRQIAPGQTGKIADYNYKLPDDFTGCVIAWNSNNLDSKVGGNYNYLYRLFRKSNLKPFERDISTEIYQAGSTPCNGVEGFNCYFPLQSYGFQPTNGVGYQPYRVVVLSFELLHAPATVCGPKKSTNLVKNKCVNFNFNGLTGTGVLTESNKKFLPFQQFGRDIADTTDAVRDPQTLEILDITPCSFGGVSVITPGTNTSNQVAVLYQGVNCTEVPVAIHADQLTPTWRVYSTGSNVFQTRAGCLIGAEHVNNSYECDIPIGAGICASYQTQTNSPRRARSVASQSIIAYTMSLGAENSVAYSNNSIAIPTNFTISVTTEILPVSMTKTSVDCTMYICGDSTECSNLLLQYGSFCTQLNRALTGIAVEQDKNTQEVFAQVKQIYKTPPIKDFGGFNFSQILPDPSKPSKRSFIEDLLFNKVTLADAGFIKQYGDCLGDIAARDLICAQKFNGLTVLPPLLTDEMIAQYTSALLAGTITSGWTFGAGAALQIPFAMQMAYRFNGCGVTQNVLYENQKLIANQFNSAIGKIQDSLSSTASALGKLQDVVNQNAQALNTLVKQLSSNFGAISSVLNDILSRLDKVEAEVQIDRLITGRLQSLQTYVTQQLIRAAEIRASANLAATKMSECVLGQSKRVDFCGKGCHLMSFPQSAPHGVVFLHVTYVPAQEKNFTTAPAICHDGKAHFPREGVFVSNGTHWFVTQRNFYEPQIITTDNTFVSGNCDVVIGIVNNTVYDPLQPELDSGGGGSDIDPYKEFGSSYQLLNFLPLDFFPDLNALVDTATALYEEELTGREHCSPHHTAIRQALVCWDELTKLIAWMSSNITSEQVRTIIVNHVNDTWGLKVRQSLWFHLSCLTFGQHTVQEFLVSFGVWIRTPAPYRPPNAPILSTLPEHTVIC

SEQ ID NO: 11324 - protein, 1300 aa, Artificial Sequence
  SARS-CoV-2/India/1-27/2020__EPI_ISL_413522 spike protein (1-1146)(I908C_Y1046C) WhcAg construct
MFVFLVLLPLVSSQCVNLTTRTQLPPAYTNSFTRGVYYPDKVFRSSVLHSTQDLFLPFFSNVTWFHAIHVSGTNGTKRFDNPVLPFNDGVYFASTEKSNIIRGWIFGTTLDSKTQSLLIVNNATNVVIKVCEFQFCNDPFLGVYHKNNKSWMESEFRVYSSANNCTFEYVSQPFLMDLEGKQGNFKNLREFVFKNIDGYFKIYSKHTPINLVRDLPQGFSALEPLVDLPIGINITRFQTLLALHRSYLTPGDSSSGWTAGAAAYYVGYLQPRTFLLKYNENGTITDAVDCALDPLSETKCTLKSFTVEKGIYQTSNFRVQPTESIVRFPNITNLCPFGEVFNATRFASVYAWNRKRISNCVADYSVLYNSASFSTFKCYGVSPTKLNDLCFTNVYADSFVIRGDEVIQIAPGQTGKIADYNYKLPDDFTGCVIAWNSNNLDSKVGGNYNYLYRLFRKSNLKPFERDISTEIYQAGSTPCNGVEGFNCYFPLQSYGFQPTNGVGYQPYRVVVLSFELLHAPATVCGPKKSTNLVKNKCVNFNFNGLTGTGVLTESNKKFLPFQQFGRDIADTTDAVRDPQTLEILDITPCSFGGVSVITPGTNTSNQVAVLYQDVNCTEVPVAIHADQLTPTWRVYSTGSNVFQTRAGCLIGAEHVNNSYECDIPIGAGICASYQTQTNSPRRARSVASQSIIAYTMSLGAENSVAYSNNSIAIPTNFTISVTTEILPVSMTKTSVDCTMYICGDSTECSNLLLQYGSFCTQLNRALTGIAVEQDKNTQEVFAQVKQIYKTPPIKDFGGFNFSQILPDPSKPSKRSFIEDLLFNKVTLADAGFIKQYGDCLGDIAARDLICAQKFNGLTVLPPLLTDEMIAQYTSALLAGTITSGWTFGAGAALQIPFAMQMAYRFNGCGVTQNVLYENQKLIANQFNSAIGKIQDSLSSTASALGKLQDVVNQNAQALNTLVKQLSSNFGAISSVLNDILSRLDKVEAEVQIDRLITGRLQSLQTYVTQQLIRAAEIRASANLAATKMSECVLGQSKRVDFCGKGCHLMSFPQSAPHGVVFLHVTYVPAQEKNFTTAPAICHDGKAHFPREGVFVSNGTHWFVTQRNFYEPQIITTDNTFVSGNCDVVIGIVNNTVYDPLQPELDSGGGGSDIDPYKEFGSSYQLLNFLPLDFFPDLNALVDTATALYEEELTGREHCSPHHTAIRQALVCWDELTKLIAWMSSNITSEQVRTIIVNHVNDTWGLKVRQSLWFHLSCLTFGQHTVQEFLVSFGVWIRTPAPYRPPNAPILSTLPEHTVIC

SEQ ID NO: 11325 - protein, 1295 aa, Artificial Sequence
  SARS-CoV-2/pangolin/Guangxi/P4L/2017__EPI_ISL_410538 spike protein (1-1141)(I903C_Y1041C) WhcAg construct
MFVFLFVLPLVSSQCVNLTTRTGIPPGYTNSSTRGVYYPDKVFRSSILHLTQDLFLPFFSNVTWFNTINYQGGFKKFDNPVLPFNDGVYFASTEKSNIIRGWIFGTTLDARTQSLLIVNNATNVVIKVCEFQFCTDPFLGVYYHNNNKTWVENEFRVYSSANNCTFEYISQPFLMDLEGKQGNFKNLREFVFKNVDGYFKIYSKHTPIDLVRDLPRGFAALEPLVDLPIGINITRFQTLLALHRSYLTPGNLESGWTTGAAAYYVGYLQQRTFLLSYNQNGTITDAVDCSLDPLSETKCTLKSLTVEKGIYQTSNFRVQPTISIVRFPNITNLCPFGEVFNASKFASVYAWNRKRISNCVADYSVLYNSTSFSTFKCYGVSPTKLNDLCFTNVYADSFVVKGDEVRQIAPGQTGVIADYNYKLPDDFTGCVIAWNSVKQDALTGGNYGYLYRLFRKSKLKPFERDISTEIYQAGSTPCNGQVGLNCYYPLERYGFHPTTGVNYQPFRVVVLSFELLNGPATVCGPKLSTTLVKDKCVNFNFNGLTGTGVLTTSKKQFLPFQQFGRDISDTTDAVRDPQTLEILDITPCSFGGVSVITPGTNTSNQVAVLYQDVNCTEVPMAIHAEQLTPAWRVYSAGANVFQTRAGCLVGAEHVNNSYECDIPVGAGICASYHSMSSLRSVNQRSIIAYTMSLGAENSVAYSNNSIAIPTNFTISVTTEILPVSMTKTSVDCTMYICGDSIECSNLLLQYGSFCTQLNRALTGIAVEQDKNTQEVFAQVKQIYKTPPIKDFGGFNFSQILPDPSKPSKRSFIEDLLFNKVTLADAGFIKQYGDCLGDIAARDLICAQKFNGLTVLPPLLTDEMIAQYTSALLAGTITSGWTFGAGAALQIPFAMQMAYRFNGCGVTQNVLYENQKLIANQFNSAIGKIQDSLSSTASALGKLQDVVNQNAQALNTLVKQLSSNFGAISSVLNDILSRLDKVEAEVQIDRLITGRLQSLQTYVTQQLIRAAEIRASANLAATKMSECVLGQSKRVDFCGKGCHLMSFPQSAPHGVVFLHVTYVPAQEKNFTTAPAICHEGKAHFPREGVFVSNGTHWFITQRNFYEPQIITTDNTFVSGSCDVVIGIVNNTVYDPLQPELDSGGGGSDIDPYKEFGSSYQLLNFLPLDFFPDLNALVDTATALYEEELTGREHCSPHHTAIRQALVCWDELTKLIAWMSSNITSEQVRTIIVNHVNDTWGLKVRQSLWFHLSCLTFGQHTVQEFLVSFGVWIRTPAPYRPPNAPILSTLPEHTVIC

SEQ ID NO: 11326 - protein, 1295 aa, Artificial Sequence
  SARS-CoV-2/pangolin/Guangxi/P5L/2017__EPI_ISL_410540 spike protein (1-1141)(I903C_Y1041C) WhcAg construct
MFVFLFVLPLVSSQCVNLTTRTGIPPGYTNSSTRGVYYPDKVFRSSILHLTQDLFLPFFSNVTWFNTINYQGGFKKFDNPVLPFNDGVYFASTEKSNIIRGWIFGTTLDARTQSLLIVNNATNVVIKVCEFQFCTDPFLGVYYHNNNKTWVENEFRVYSSANNCTFEYISQPFLMDLEGKQGNFKNLREFVFKNVDGYFKIYSKHTPIDLVRDLPRGFAALEPLVDLPIGINITRFQTLLALHRSYLTPGKLESGWTTGAAAYYVGYLQQRTFLLSYNQNGTITDAVDCSLDPLSETKCTLKSLTVEKGIYQTSNFRVQPTISIVRFPNITNLCPFGEVFNASKFASVYAWNRKRISNCVADYSVLYNSTSFSTFKCYGVSPTKLNDLCFTNVYADSFVVKGDEVRQIAPGQTGVIADYNYKLPDDFTGCVIAWNSVKQDALTGGNYGYLYRLFRKSKLKPFERDISTEIYQAGSTPCNGQVGLNCYYPLERYGFHPTTGVNYQPFRVVVLSFELLNGPATVCGPKLSTTLVKDKCVNFNFNGLTGTGVLTTSKKQFLPFQQFGRDISDTTDAVRDPQTLEILDITPCSFGGVSVITPGTNTSNQVAVLYQDVNCTEVPMAIHAEQLTPAWRVYSAGANVFQTRAGCLVGAEHVNNSYECDIPVGAGICASYHSMSSFRSVNQRSIIAYTMSLGAENSVAYSNNSIAIPTNFTISVTTEILPVSMTKTSVDCTMYICGDSIECSNLLLQYGSFCTQLNRALTGIAVEQDKNTQEVFAQVKQIYKTPPIKDFGGFNFSQILPDPSKPSKRSFIEDLLFNKVTLADAGFIKQYGDCLGDIAARDLICAQKFNGLTVLPPLLTDEMIAQYTSALLAGTITSGWTFGAGAALQIPFAMQMAYRFNGCGVTQNVLYENQKLIANQFNSAIGKIQDSLSSTASALGKLQDVVNQNAQALNTLVKQLSSNFGAISSVLNDILSRLDKVEAEVQIDRLITGRLQSLQTYVTQQLIRAAEIRASANLAATKMSECVLGQSKRVDFCGKGCHLMSFPQSAPHGVVFLHVTYVPAQEKNFTTAPAICHEGKAHFPREGVFVSNGTHWFITQRNFYEPQIITTDNTFVSGSCDVVIGIVNNTVYDPLQPELDSGGGGSDIDPYKEFGSSYQLLNFLPLDFFPDLNALVDTATALYEEELTGREHCSPHHTAIRQALVCWDELTKLIAWMSSNITSEQVRTIIVNHVNDTWGLKVRQSLWFHLSCLTFGQHTVQEFLVSFGVWIRTPAPYRPPNAPILSTLPEHTVIC

SEQ ID NO: 11327 - protein, 1295 aa, Artificial Sequence
  SARS-CoV-2/pangolin/Guangxi/P5E/2017__EPI_ISL_410541 spike protein (1-1141)(I903C_Y1041C) WhcAg construct
MFVFLFVLPLVSSQCVNLTTRTGIPPGYTNSSTRGVYYPDKVFRSSILHLTQDLFLPFFSNVTWFNTITYQGGSKKFDNPVLPFNDGVYFASTEKSNIIRGWIFGTTLDARTQSLLIVNNATNVVIKVCEFQFCTDPFLGVYYHNNNKTWVENEFRVYSSANNCTFEYISQPFLMDLEGKQGNFKNLREFVFKNVDGYFKIYSKHTPIDLVRDLPRGFAALEPLVDLPIGINITRFQTLLALHRSYLTPGKLESGWTTGAAAYYVGYLQQRTFLLSYNQNGTITDAVDCSLDPLSETKCTLKSLTVEKGIYQTSNFRVQPTISIVRFPNITNLCPFGEVFNASKFASVYAWNRKRISNCVADYSVLYNSTSFSTFKCYGVSPTKLNDLCFTNVYADSFVVKGDEVRQIAPGQTGVIADYNYKLPDDFTGCVIAWNSVKQDALTGDNYGYLYRLFRKSKLKPFERDISTEIYQAGSTPCNGQVGLNCYYPLERYGFHPTTGVNYQPFRVVVLSFELLNGPATVCGPKLSTTLVKDKCVNFNFNGLTGTGVLTTSKKQFLPFQQFGRDISDTTDAVRDPQTLEILDITPCSFGGVSVITPGTNTSNQVAVLYQDVNCTEVPMAIHAEQLTPAWRVYSAGANVFQTRAGCLVGAEHVNNSYECDIPVGAGICASYHSMSSFRSVNQRSIIAYTMSLGAENSVAYSNNSIAIPTNFTISVTTEILPVSMTKTSVDCTMYICGDSIECSNLLLQYGSFCTQLNRALTGIAVEQDKNTQEVFAQVKQIYKTPPIKDFGGFNFSQILPDPSKPSKRSFIEDLLFNKVTLADAGFIKQYGDCLGDIAARDLICAQKFNGLTVLPPLLTDEMIAQYTSALLAGTITSGWTFGAGAALQIPFAMQMAYRFNGCGVTQNVLYENQKLIANQFNSAIGKIQDSLSSTASALGKLQDVVNQNAQALNTLVKQLSSNFGAISSVLNDILSRLDKVEAEVQIDRLITGRLQSLQTYVTQQLIRAAEIRASANLAATKMSECVLGQSKRVDFCGKGCHLMSFPQSAPHGVVFLHVTYVPAQEKNFTTAPAICHEGKAHFPREGVFVSNGTHWFITQRNFYEPQIITTDNTFVSGSCDVVIGIVNNTVYDPLQPELDSGGGGSDIDPYKEFGSSYQLLNFLPLDFFPDLNALVDTATALYEEELTGREHCSPHHTAIRQALVCWDELTKLIAWMSSNITSEQVRTIIVNHVNDTWGLKVRQSLWFHLSCLTFGQHTVQEFLVSFGVWIRTPAPYRPPNAPILSTLPEHTVIC

SEQ ID NO: 11328 - protein, 1293 aa, Artificial Sequence
  SARS-CoV-2/pangolin/Guangxi/P1E/2017__EPI_ISL_410539 spike protein (1-1139)(I901C_Y1039C) WhcAg construct
MFVFLFVLPLVSSQCVNLTTRTGIQPGYTNSSTRGVYYPDKVFRSSILHLTQDLFLPFFSNVTWFNTINYQGGFKKFDNPVLPFNDGVYFASTEKSNIIRGWIFGTTLDARTQSLLIVNNATNVVIKVCEFQFCTDPFLGVYYHNNNKTWVENEFRVYSSANNCTFEYISQPFLMDLEGKQGNFKNLREFVFKNVDGYFKIYSKHTPIDLVRDLPRGFAALEPLVDLPIGINITRFQTLLALHRSYLTPGKLESGWTTGAAAYYVGYLQQRTFLLSYNQNGTITDAVDCSLDPLSETKCTLKSLTVEKGIYQTSNFRVQPTISIVRFPNITNLCPFGEVFNASKFASVYAWNRKRISNCVADYSVLYNSTSFSTFKCYGVSPTKLNDLCFTNVYADSFVVKGDEVRQIAPGQTGVIADYNYKLPDDFTGCVIAWNSVKQDALTGGNYLYRLFRKSKLKPFERDISTEIYQAGSTPCNGQVGLNCYYPLERYGFHPTTGVNYQPFRVVVLSFELLNGPATVCGPKLSTTLVKDKCVNFNFNGLTGTGVLTTSKKQFLPFQQFGRDISDTTDAVRDPQTLEILDITPCSFGGVSVITPGTNTSNQVAVLYQDVNCTEVPMAIHAEQLTPAWRVYSAGANVFQTRAGCLVGAEHVNNSYECDIPVGAGICASYHSMSSLRSVNQRSIIAYTMSLGAENSVAYSNNSIAIPTNFTISVTTEILPVSMTKTSVDCTMYICGDSIECSNLLLQYGSFCTQLNRALTGIAVEQDKNTQEVFAQVKQIYKTPPIKDFGGFNFSQILPDPSKPSKRSFIEDLLFNKVTLADAGFIKQYGDCLGDIAARDLICAQKFNGLTVLPPLLTDEMIAQYTSALLAGTITSGWTFGAGAALQIPFAMQMAYRFNGCGVTQNVLYENQKLIANQFNSAIGKIQDSLSSTASALGKLQDVVNQNAQALNTLVKQLSSNFGAISSVLNDILSRLDKVEAEVQIDRLITGRLQSLQTYVTQQLIRAAEIRASANLAATKMSECVLGQSKRVDFCGKGCHLMSFPQSAPHGVVFLHVTYVPAQEKNFTTAPAICHEGKAHFPREGVFVSNGTHWFITQRNFYEPQIITTDNTFVSGSCDVVIGIVNNTVYDPLQPELDSGGGGSDIDPYKEFGSSYQLLNFLPLDFFPDLNALVDTATALYEEELTGREHCSPHHTAIRQALVCWDELTKLIAWMSSNITSEQVRTIIVNHVNDTWGLKVRQSLWFHLSCLTFGQHTVQEFLVSFGVWIRTPAPYRPPNAPILSTLPEHTVIC

SEQ ID NO: 11329 - protein, 1301 aa, Artificial Sequence
  SARS-CoV-2/Wuhan/WIV05/2019__EPI_ISL_402128 spike protein (1-1147)(Q965C_S1003C) WhcAg construct
MFVFLVLLPLVSSQCVNLTTRTQLPPAYTNSFTRGVYYPDKVFRSSVLHSTQDLFLPFFSNVTWFHAIHVSGTNGTKRFDNPVLPFNDGVYFASTEKSNIIRGWIFGTTLDSKTQSLLIVNNATNVVIKVCEFQFCNDPFLGVYYHKNNKSWMESEFRVYSSANNCTFEYVSQPFLMDLEGKQGNFKNLREFVFKNIDGYFKIYSKHTPINLVRDLPQGFSALEPLVDLPIGINITRFQTLLALHRSYLTPGDSSSGWTAGAAAYYVGYLQPRTFLLKYNENGTITDAVDCALDPLSETKCTLKSFTVEKGIYQTSNFRVQPTESIVRFPNITNLCPFGEVFNATRFASVYAWNRKRISNCVADYSVLYNSASFSTFKCYGVSPTKLNDLCFTNVYADSFVIRGDEVRQIAPGQTGKIADYNYKLPDDFTGCVIAWNSNNLDSKVGGNYNYLYRLFRKSNLKPFERDISTEIYQAGSTPCNGVEGFNCYFPLQSYGFQPTNGVGYQPYRVVVLSFELLHAPATVCGPKKSTNLVKNKCVNFNFNGLTGTGVLTESNKKFLPFQQFGRDIADTTDAVRDPQTLEILDITPCSFGGVSVITPGTNTSNQVAVLYQDVNCTEVPVAIHADQLTPTWRVYSTGSNVFQTRAGCLIGAEHVNNSYECDIPIGAGICASYQTQTNSPRRARSVASQSIIAYTMSLGAENSVAYSNNSIAIPTNFTISVTTEILPVSMTKTSVDCTMYICGDSTECSNLLLQYGSFCTQLNRALTGIAVEQDKNTQEVFAQVKQIYKTPPIKDFGGFNFSQILPDPSKPSKRSFIEDLLFNKVTLADAGFIKQYGDCLGDIAARDLICAQKFNGLTVLPPLLTDEMIAQYTSALLAGTITSGWTFGAGAALQIPFAMQMAYRFNGIGVTQNVLYENQKLIANQFNSAIGKIQDSLSSTASALGKLQDVVNQNAQALNTLVKCLSSNFGAISSVLNDILSRLDKVEAEVQIDRLITGRLQCLQTYVTQQLIRAAEIRASANLAATKMSECVLGQSKRVDFCGKGYHLMSFPQSAPHGVVFLHVTYVPAQEKNFTTAPAICHDGKAHFPREGVFVSNGTHWFVTQRNFYEPQIITTDNTFVSGNCDVVIGIVNNTVYDPLQPELDSGGGGSDIDPYKEFGSSYQLLNFLPLDFFPDLNALVDTATALYEEELTGREHCSPHHTAIRQALVCWDELTKLIAWMSSNITSEQVRTIIVNHVNDTWGLKVRQSLWFHLSCLTFGQHTVQEFLVSFGVWIRTPAPYRPPNAPILSTLPEHTVIC

SEQ ID NO: 11330 - protein, 1297 aa, Artificial Sequence
  SARS-CoV-2/bat/Yunnan/RaTG13/2013__EPI_ISL_402131 spike protein (1-1143)(Q961C_S999C) WhcAg construct
MFVFLVLLPLVSSQCVNLTTRTQLPPAYTNSSTRGVYYPDKVFRSSVLHLTQDLFLPFFSNVTWFHAIHVSGTNGIKRFDNPVLPFNDGVYFASTEKSNIIRGWIFGTTLDSKTQSLLIVNNATNVVIKVCEFQFCNDPFLGVYYHKNNKSWMESEFRVYSSANNCTFEYVSQPFLMDLEGKQGNFKNLREFVFKNIDGYFKIYSKHTPINLVRDLPPGFSALEPLVDLPIGINITRFQTLLALHRSYLTPGDSSSGWTAGAAAYYVGYLQPRTFLLKYNENGTITDAVDCALDPLSETKCTLKSFTVEKGIYQTSNFRVQPTDSIVRFPNITNLCPFGEVFNATTFASVYAWNRKRISNCVADYSVLYNSTSFSTFKCYGVSPTKLNDLCFTNVYADSFVITGDEVRQIAPGQTGKIADYNYKLPDDFTGCVIAWNSKHIDAKEGGNFNYLYRLFRKANLKPFERDISTEIYQAGSKPCNGQTGLNCYYPLYRYGFYPTDGVGHQPYRVVVLSFELLNAPATVCGPKKSTNLVKNKCVNFNFNGLTGTGVLTESNKKFLPFQQFGRDIADTTDAVRDPQTLEILDITPCSFGGVSVITPGTNASNQVAVLYQDVNCTEVPVAIHADQLTPTWRVYSTGSNVFQTRAGCLIGAEHVNNSYECDIPIGAGICASYQTQTNSRSVASQSIIAYTMSLGAENSVAYSNNSIAIPTNFTISVTTEILPVSMTKTSVDCTMYICGDSTECSNLLLQYGSFCTQLNRALTGIAVEQDKNTQEVFAQVKQIYKTPPIKDFGGFNFSQILPDPSKPSKRSFIEDLLFNKVTLADAGFIKQYGDCLGDIAARDLICAQKFNGLTVLPPLLTDEMIAQYTSALLAGTITSGWTFGAGAALQIPFAMQMAYRFNGIGVTQNVLYENQKLIANQFNSAIGKIQDSLSSTASALGKLQDVVNQNAQALNTLVKCLSSNFGAISSVLNDILSRLDKVEAEVQIDRLITGRLQCLQTYVTQQLIRAAEIRASANLAATKMSECVLGQSKRVDFCGKGYHLMSFPQSAPHGVVFLHVTYVPAQEKNFTTAPAICHDGKAHFPREGVFVSNGTHWFVTQRNFYEPQIITTDNTFVSGSCDVVIGIVNNTVYDPLQPELDSGGGGSDIDPYKEFGSSYQLLNFLPLDFFPDLNALVDTATALYEEELTGREHCSPHHTAIRQALVCWDELTKLIAWMSSNITSEQVRTIIVNHVNDTWGLKVRQSLWFHLSCLTFGQHTVQEFLVSFGVWIRTPAPYRPPNAPILSTLPEHTVIC

SEQ ID NO: 11331 - protein, 1301 aa, Artificial Sequence
  SARS-CoV-2/Wuhan/HBCDC-HB-01/2019__EPI_ISL_402132 spike protein (1-1147)(Q965C_S1003C) WhcAg construct
MFVFLVLLPLVSSQCVNLTTRTQLPPAYTNSITRGVYYPDKVFRSSVLHSTQDLFLPFFSNVTWFHAIHVSGTNGTKRFDNPVLPFNDGVYFASTEKSNIIRGWIFGTTLDSKTQSLLIVNNATNVVIKVCEFQFCNDPFLGVYYHKNNKSWMESEFRVYSSANNCTFEYVSQPFLMDLEGKQGNFKNLREFVFKNIDGYFKIYSKHTPINLVRDLPQGFSALEPLVDLPIGINITRFQTLLALHRSYLTPGDSSSGWTAGAAAYYVGYLQPRTFLLKYNENGTITDAVDCALDPLSETKCTLKSFTVEKGIYQTSNFRVQPTESIVRFPNITNLCPFGEVFNATRFASVYAWNRKRISNCVADYSVLYNSASFSTFKCYGVSPTKLNDLCFTNVYADSFVIRGDEVRQIAPGQTGKIADYNYKLPDDFTGCVIAWNSNNLDSKVGGNYNYLYRLFRKSNLKPFERDISTEIYQAGSTPCNGVEGFNCYFPLQSYGFQPTNGVGYQPYRVVVLSFELLHAPATVCGPKKSTNLVKNKCVNFNFNGLTGTGVLTESNKKFLPFQQFGRDIADTTDAVRDPQTLEILDITPCSFGGVSVITPGTNTSNQVAVLYQDVNCTEVPVAIHADQLTPTWRVYSTGSNVFQTRAGCLIGAEHVNNSYECDIPIGAGICASYQTQTNSPRRARSVASQSIIAYTMSLGAENSVAYSNNSIAIPTNFTISVTTEILPVSMTKTSVDCTMYICGDSTECSNLLLQYGSFCTQLNRALTGIAVEQDKNTQEVFAQVKQIYKTPPIKDFGGFNFSQILPDPSKPSKRSFIEDLLFNKVTLADAGFIKQYGDCLGDIAARDLICAQKFNGLTVLPPLLTDEMIAQYTSALLAGTITSGWTFGAGAALQIPFAMQMAYRFNGIGVTQNVLYENQKLIANQFNSAIGKIQDSLSSTASALGKLQDVVNQNAQALNTLVKCLSSNFGAISSVLNDILSRLDKVEAEVQIDRLITGRLQCLQTYVTQQLIRAAEIRASANLAATKMSECVLGQSKRVDFCGKGYHLMSFPQSAPHGVVFLHVTYVPAQEKNFTTAPAICHDGKAHFPREGVFVSNGTHWFVTQRNFYEPQIITTDNTFVSGNCDVVIGIVNNTVYDPLQPELDSGGGGSDIDPYKEFGSSYQLLNFLPLDFFPDLNALVDTATALYEEELTGREHCSPHHTAIRQALVCWDELTKLIAWMSSNITSEQVRTIIVNHVNDTWGLKVRQSLWFHLSCLTFGQHTVQEFLVSFGVWIRTPAPYRPPNAPILSTLPEHTVIC

SEQ ID NO: 11332 - protein, 1301 aa, Artificial Sequence
  SARS-CoV-2/Guangdong/20SF028/2020__EPI_ISL_403936 spike protein (1-1147)(Q965C_S1003C) WhcAg construct
MFVFLVLLPLVSSQCVNLTTRTQLPPAYTNSFTRGVYYPDKVFRSSVLYSTQDLFLPFFSNVTWFHAIHVSGTNGTKRFDNPVLPFNDGVYFASTEKSNIIRGWIFGTTLDSKTQSLLIVNNATNVVIKVCEFQFCNDPFLGVYYHKNNKSWMESEFRVYSSANNCTFEYVSQPFLMDLEGKQGNFKNLREFVFKNIDGYFKIYSKHTPINLVRDLPQGFSALEPLVDLPIGINITRFQTLLALHRSYLTPGDSSSGWTAGAAAYYVGYLQPRTFLLKYNENGTITDAVDCALDPLSETKCTLKSFTVEKGIYQTSNFRVQPTESIVRFPNITNLCPFGEVFNATRFASVYAWNRKRISNCVADYSVLYNSASFSTFKCYGVSPTKLNDLCFTNVYADSFVIRGDEVRQIAPGQTGKIADYNYKLPDDFTGCVIAWNSNNLDSKVGGNYNYLYRLFRKSNLKPFERDISTEIYQAGSTPCNGVEGFNCYFPLQSYGFQPTNGVGYQPYRVVVLSFELLHAPATVCGPKKSTNLVKNKCVNFNFNGLTGTGVLTESNKKFLPFQQFGRDIADTTDAVRDPQTLEILDITPCSFGGVSVITPGTNTSNQVAVLYQDVNCTEVPVAIHADQLTPTWRVYSTGSNVFQTRAGCLIGAEHVNNSYECDIPIGAGICASYQTQTNSPRRARSVASQSIIAYTMSLGAENSVAYSNNSIAIPTNFTISVTTEILPVSMTKTSVDCTMYICGDSTECSNLLLQYGSFCTQLNRALTGIAVEQDKNTQEVFAQVKQIYKTPPIKDFGGFNFSQILPDPSKPSKRSFIEDLLFNKVTLADAGFIKQYGDCLGDIAARDLICAQKFNGLTVLPPLLTDEMIAQYTSALLAGTITSGWTFGAGAALQIPFAMQMAYRFNGIGVTQNVLYENQKLIANQFNSAIGKIQDSLSSTASALGKLQDVVNQNAQALNTLVKCLSSNFGAISSVLNDILSRLDKVEAEVQIDRLITGRLQCLQTYVTQQLIRAAEIRASANLAATKMSECVLGQSKRVDFCGKGYHLMSFPQSAPHGVVFLHVTYVPAQEKNFTTAPAICHDGKAHFPREGVFVSNGTHWFVTQRNFYEPQIITTDNTFVSGNCDVVIGIVNNTVYDPLQPELDSGGGGSDIDPYKEFGSSYQLLNFLPLDFFPDLNALVDTATALYEEELTGREHCSPHHTAIRQALVCWDELTKLIAWMSSNITSEQVRTIIVNHVNDTWGLKVRQSLWFHLSCLTFGQHTVQEFLVSFGVWIRTPAPYRPPNAPILSTLPEHTVIC

SEQ ID NO: 11333 - protein, 1301 aa, Artificial Sequence
  SARS-CoV-2/Shenzhen/SZTH-001/2020__EPI_ISL_406592 spike protein (1-1147)(Q965C_S1003C) WhcAg construct
MFVFLVLLPLVSSQCVNLTTRTQLPPAYTNSFTRGVYYPDKVFRSSVLHSTQDLFLPFFSNVTWFHAIHVSGTNGTKRFDNPVLPFNDGVYFASTEKSNIIRGWIFGTTLDSKTQSLLIVNNATNVVIKVCEFQFCNDPFLGVYYHKNNKSWMESEFRVYSSANNCTFEYVSQPFLMDLEGKQGNFKNLREFVFKNIDGYFKIYSKHTPINLVRDLPQGFSALEPLVDLPIGINITRFQTLLALHRSYLTPGDSSSGWTAGAAAYYVGYLQPRTFLLKYNENGTITDAVDCALDPLSETKCTLKSFTVEKGIYQTSNFRVQPTESIVRFPNITNLCPFGEVFNATRFASVYAWNRKRISNCVADYSVLYNSASFSTFKCYGVSPTKLNDLCFTNVYADSFVIRGDEVRQIAPGQTGKIADYNYKLPDDFTGCVIAWNSNNLDSKVGGNYNYLYRLFRKSNLKPFERDISTEIYQAGSTPCNGVEGFNCYFPLQSYGFQPTNGVGYQPYRVVVLSFELLHAPATVCGPKKSTNLVKNKCVNFNFNGLTGTGVLTESNKKFLPFQQFGRDIADTTDAVRDPQTLEILDITPCSFGGVSVITPGTNTSNQVAVLYQDVNCTEVPVAIHADQLTPTWRVYSTGSNVFQTRAGCLIGAEHVNNSYECDIPIGAGICASYQTQTNSPRRARSVASQSIIAYTMSLGAENSVAYSNNSIAIPTNFTISVTTEILPVSMTKTSVDCTMYICGDSTECSNLLLQYGSFCTQLNRALTGIAVEQDKNTQEVFAQVKQIYKTPPIKDFGGFNFSQILPDPSKPSKRSFIEDLLFNKVTLADAGFIKQYGDCLGDIAARDLICAQKFNGLTVLPPLLTDEMIAQYTSALLAGTITSGWTFGAGAALQIPFAMQMAYRFNGIGVTQNVLYENQKLIANQFNSAIGKIQDSLSSTASALGKLQDVVNQNAQALNTLVKCLSSNFGAISSVLNDILSRLDKVEAEVQIDRLITGRLQCLQTYVTQQLIRAAEIRASANLAATKMSECVLGQSKRVDFCGKGYHLMSFPQSAPHGVVFLHVTYVPAQEKNFTTAPAICHDGKAHFPREGVFVSNGTHWFVTQRNFYEPQIITTDNTFVSGNCDVLIGIVNNTVYDPLQPELDSGGGGSDIDPYKEFGSSYQLLNFLPLDFFPDLNALVDTATALYEEELTGREHCSPHHTAIRQALVCWDELTKLIAWMSSNITSEQVRTIIVNHVNDTWGLKVRQSLWFHLSCLTFGQHTVQEFLVSFGVWIRTPAPYRPPNAPILSTLPEHTVIC

SEQ ID NO: 11334 - protein, 1301 aa, Artificial Sequence
  SARS-CoV-2/Shenzhen/SZTH-004/2020__EPI_ISL_406595 spike protein (1-1147)(Q965C_S1003C) WhcAg construct
MFVFLVLLPLVSSQCVNLTTRTQLPPAYTNSFTRGVYYPDKVFRSSVLHSTQDLFLPFFSNVTWFHAIHVSGTNGTKRFDNPVLPFNDGVYFASTEKSNIIRGWIFGTTLDSKTQSLLIVNNATNVVIKVCEFQFCNDPFLGVYYHKNNKSWMESEFRVYSSANNCTFEYVSQPFLMDLEGKQGNFKNLREFVFKNIDGYFKIYSKHTPINLVRDLPQGFSALEPLVDLPIGINITRFQTLLALHRSYLTPGDSSSGWTAGAAAYYVGYLQPRTFLLKYNENGTITDAVDCALDPLSETKCTLKSFTVEKGIYQTSNFRVQPTESIVRFPNITNLCPFGEVFNATRFASVYAWDRKRISNCVAYYSVLYNSASFSTFKCYGVSPTKLNDLCFTNVYADSFVIRGDEVRQIAPGQTGKIADYNYKLPDDFTGCVIAWNSNNLDSKVGGNYNYLYRLFRKSNLKPFERDISTEIYQAGSTPCNGVEGFNCYFPLQSYGFQPTNGVGYQPYRVVVLSFELLHAPATVCGPKKSTNLVKNKCVNFNFNGLTGTGVLTESNKKFLPFQQFGRDIADTTDAVRDPQTLEILDITPCSFGGVSVITPGTNTSNQVAVLYQDVNCTEVPVAIHADQLTPTWRVYSTGSNVFQTRAGCLIGAEHVNNSYECDIPIGAGICASYQTQTNSPRRARSVASQSIIAYTMSLGAENSVAYSNNSIAIPTNFTISVTTEILPVSMTKTSVDCTMYICGDSTECSNLLLQYGSFCTQLNRALTGIAVEQDKNTQEVFAQVKQIYKTPPIKDFGGFNFSQILPDPSKPSKRSFIEDLLFNKVTLADAGFIKQYGDCLGDIAARDLICAQKFNGLTVLPPLLTDEMIAQYTSALLAGTITSGWTFGAGAALQIPFAMQMAYRFNGIGVTQNVLYENQKLIANQFNSAIGKIQDSLSSTASALGKLQDVVNQNAQALNTLVKCLSSNFGAISSVLNDILSRLDKVEAEVQIDRLITGRLQCLQTYVTQQLIRAAEIRASANLAATKMSECVLGQSKRVDFCGKGYHLMSFPQSAPHGVVFLHVTYVPAQEKNFTTAPAICHDGKAHFPREGVFVSNGTHWFVTQRNFYEPQIITTDNTFVSGNCDVVIGIVNNTVYDPLQPELDSGGGGSDIDPYKEFGSSYQLLNFLPLDFFPDLNALVDTATALYEEELTGREHCSPHHTAIRQALVCWDELTKLIAWMSSNITSEQVRTIIVNHVNDTWGLKVRQSLWFHLSCLTFGQHTVQEFLVSFGVWIRTPAPYRPPNAPILSTLPEHTVIC

SEQ ID NO: 11335 - protein, 1301 aa, Artificial Sequence
  SARS-CoV-2/France/IDF0372/2020__EPI_ISL_406596 spike protein (1-1147)(Q965C_S1003C) WhcAg construct
MFVFLVLLPLVSSQCVNLTTRTQLPPAYTNSFTRGVYYPDKVFRSSVLHSTQDLFLPFFSNVTWFHAIHVSGTNGTKRFDNPVLPFNDGVYFASTEKSNIIRGWIFGTTLDSKTQSLLIVNNATNVVIKVCEFQFCNDPFLGVYYHKNNKSWMESEFRVYSSANNCTFEYVSQPFLMDLEGKQGNFKNLREFVFKNIDGYFKIYSKHTPINLVRDLPQGFSALEPLVDLPIGINITRFQTLLALHRSYLTPGDSSSGWTAGAAAYYVGYLQPRTFLLKYNENGTITDAVDCALDPLSETKCTLKSFTVEKGIYQTSNFRVQPTESIVRFPNITNLCPFGEVFNATRFASVYAWNRKRISNCVADYSFLYNSASFSTFKCYGVSPTKLNDLCFTNVYADSFVIRGDEVRQIAPGQTGKIADYNYKLPDDFTGCVIAWNSNNLDSKVGGNYNYLYRLFRKSNLKPFERDISTEIYQAGSTPCNGVEGFNCYFPLQSYGFQPTNGVGYQPYRVVVLSFELLHAPATVCGPKKSTNLVKNKCVNFNFNGLTGTGVLTESNKKFLPFQQFGRDIADTTDAVRDPQTLEILDITPCSFGGVSVITPGTNTSNQVAVLYQDVNCTEVPVAIHADQLTPTWRVYSTGSNVFQTRAGCLIGAEHVNNSYECDIPIGAGICASYQTQTNSPRRARSVASQSIIAYTMSLGAENSVAYSNNSIAIPTNFTISVTTEILPVSMTKTSVDCTMYICGDSTECSNLLLQYGSFCTQLNRALTGIAVEQDKNTQEVFAQVKQIYKTPPIKDFGGFNFSQILPDPSKPSKRSFIEDLLFNKVTLADAGFIKQYGDCLGDIAARDLICAQKFNGLTVLPPLLTDEMIAQYTSALLAGTITSGWTFGAGAALQIPFAMQMAYRFNGIGVTQNVLYENQKLIANQFNSAIGKIQDSLSSTASALGKLQDVVNQNAQALNTLVKCLSSNFGAISSVLNDILSRLDKVEAEVQIDRLITGRLQCLQTYVTQQLIRAAEIRASANLAATKMSECVLGQSKRVDFCGKGYHLMSFPQSAPHGVVFLHVTYVPAQEKNFTTAPAICHDGKAHFPREGVFVSNGTHWFVTQRNFYEPQIITTDNTFVSGNCDVVIGIVNNTVYDPLQPELDSGGGGSDIDPYKEFGSSYQLLNFLPLDFFPDLNALVDTATALYEEELTGREHCSPHHTAIRQALVCWDELTKLIAWMSSNITSEQVRTIIVNHVNDTWGLKVRQSLWFHLSCLTFGQHTVQEFLVSFGVWIRTPAPYRPPNAPILSTLPEHTVIC

SEQ ID NO: 11336 - protein, 1301 aa, Artificial Sequence
  SARS-CoV-2/Australia/VIC01/2020__EPI_ISL_406844 spike protein (1-1147)(Q965C_S1003C) WhcAg construct
MFVFLVLLPLVSSQCVNLTTRTQLPPAYTNSFTRGVYYPDKVFRSSVLHSTQDLFLPFFSNVTWFHAIHVSGTNGTKRFDNPVLPFNDGVYFASTEKSNIIRGWIFGTTLDSKTQSLLIVNNATNVVIKVCEFQFCNDPFLGVYYHKNNKSWMESEFRVYSSANNCTFEYVSQPFLMDLEGKQGNFKNLREFVFKNIDGYFKIYSKHTPINLVRDLPQGFSALEPLVDLPIGINITRFQTLLALHRRYLTPGDSSSGWTAGAAAYYVGYLQPRTFLLKYNENGTITDAVDCALDPLSETKCTLKSFTVEKGIYQTSNFRVQPTESIVRFPNITNLCPFGEVFNATRFASVYAWNRKRISNCVADYSVLYNSASFSTFKCYGVSPTKLNDLCFTNVYADSFVIRGDEVRQIAPGQTGKIADYNYKLPDDFTGCVIAWNSNNLDSKVGGNYNYLYRLFRKSNLKPFERDISTEIYQAGSTPCNGVEGFNCYFPLQSYGFQPTNGVGYQPYRVVVLSFELLHAPATVCGPKKSTNLVKNKCVNFNFNGLTGTGVLTESNKKFLPFQQFGRDIADTTDAVRDPQTLEILDITPCSFGGVSVITPGTNTSNQVAVLYQDVNCTEVPVAIHADQLTPTWRVYSTGSNVFQTRAGCLIGAEHVNNSYECDIPIGAGICASYQTQTNSPRRARSVASQSIIAYTMSLGAENSVAYSNNSIAIPTNFTISVTTEILPVSMTKTSVDCTMYICGDSTECSNLLLQYGSFCTQLNRALTGIAVEQDKNTQEVFAQVKQIYKTPPIKDFGGFNFSQILPDPSKPSKRSFIEDLLFNKVTLADAGFIKQYGDCLGDIAARDLICAQKFNGLTVLPPLLTDEMIAQYTSALLAGTITSGWTFGAGAALQIPFAMQMAYRFNGIGVTQNVLYENQKLIANQFNSAIGKIQDSLSSTASALGKLQDVVNQNAQALNTLVKCLSSNFGAISSVLNDILSRLDKVEAEVQIDRLITGRLQCLQTYVTQQLIRAAEIRASANLAATKMSECVLGQSKRVDFCGKGYHLMSFPQSAPHGVVFLHVTYVPAQEKNFTTAPAICHDGKAHFPREGVFVSNGTHWFVTQRNFYEPQIITTDNTFVSGNCDVVIGIVNNTVYDPLQPELDSGGGGSDIDPYKEFGSSYQLLNFLPLDFFPDLNALVDTATALYEEELTGREHCSPHHTAIRQALVCWDELTKLIAWMSSNITSEQVRTIIVNHVNDTWGLKVRQSLWFHLSCLTFGQHTVQEFLVSFGVWIRTPAPYRPPNAPILSTLPEHTVIC

SEQ ID NO: 11337 - protein, 1301 aa, Artificial Sequence
  SARS-CoV-2/Germany/BavPat1/2020__EPI_ISL_406862 spike protein (1-1147)(Q965C_S1003C) WhcAg construct
MFVFLVLLPLVSSQCVNLTTRTQLPPAYTNSFTRGVYYPDKVFRSSVLHSTQDLFLPFFSNVTWFHAIHVSGTNGTKRFDNPVLPFNDGVYFASTEKSNIIRGWIFGTTLDSKTQSLLIVNNATNVVIKVCEFQFCNDPFLGVYYHKNNKSWMESEFRVYSSANNCTFEYVSQPFLMDLEGKQGNFKNLREFVFKNIDGYFKIYSKHTPINLVRDLPQGFSALEPLVDLPIGINITRFQTLLALHRSYLTPGDSSSGWTAGAAAYYVGYLQPRTFLLKYNENGTITDAVDCALDPLSETKCTLKSFTVEKGIYQTSNFRVQPTESIVRFPNITNLCPFGEVFNATRFASVYAWNRKRISNCVADYSVLYNSASFSTFKCYGVSPTKLNDLCFTNVYADSFVIRGDEVRQIAPGQTGKIADYNYKLPDDFTGCVIAWNSNNLDSKVGGNYNYLYRLFRKSNLKPFERDISTEIYQAGSTPCNGVEGFNCYFPLQSYGFQPTNGVGYQPYRVVVLSFELLHAPATVCGPKKSTNLVKNKCVNFNFNGLTGTGVLTESNKKFLPFQQFGRDIADTTDAVRDPQTLEILDITPCSFGGVSVITPGTNTSNQVAVLYQGVNCTEVPVAIHADQLTPTWRVYSTGSNVFQTRAGCLIGAEHVNNSYECDIPIGAGICASYQTQTNSPRRARSVASQSIIAYTMSLGAENSVAYSNNSIAIPTNFTISVTTEILPVSMTKTSVDCTMYICGDSTECSNLLLQYGSFCTQLNRALTGIAVEQDKNTQEVFAQVKQIYKTPPIKDFGGFNFSQILPDPSKPSKRSFIEDLLFNKVTLADAGFIKQYGDCLGDIAARDLICAQKFNGLTVLPPLLTDEMIAQYTSALLAGTITSGWTFGAGAALQIPFAMQMAYRFNGIGVTQNVLYENQKLIANQFNSAIGKIQDSLSSTASALGKLQDVVNQNAQALNTLVKCLSSNFGAISSVLNDILSRLDKVEAEVQIDRLITGRLQCLQTYVTQQLIRAAEIRASANLAATKMSECVLGQSKRVDFCGKGYHLMSFPQSAPHGVVFLHVTYVPAQEKNFTTAPAICHDGKAHFPREGVFVSNGTHWFVTQRNFYEPQIITTDNTFVSGNCDVVIGIVNNTVYDPLQPELDSGGGGSDIDPYKEFGSSYQLLNFLPLDFFPDLNALVDTATALYEEELTGREHCSPHHTAIRQALVCWDELTKLIAWMSSNITSEQVRTIIVNHVNDTWGLKVRQSLWFHLSCLTFGQHTVQEFLVSFGVWIRTPAPYRPPNAPILSTLPEHTVIC

SEQ ID NO: 11338 - protein, 1301 aa, Artificial Sequence
  SARS-CoV-2/Wuhan/HBCDC-HB-02/2020__EPI_ISL_412978 spike protein (1-1147)(Q965C_S1003C) WhcAg construct
MFVFLVLLPLVSSQCVNLTTRTQLPPAYTNSFTRGVYYPDKVFRSSVLHSTQDLFLPFFSNVTWFHAIHVSGTNGTKRFDNPVLPFNDGVYFASTEKSNIIRGWIFGTTLDSKTQSLLIVNNATNVVIKVCEFQFCNDPFLGVYYHKNNKSWMESEFRVYSSANNCTFEYVSQPFLMDLEGKQGNFKNLREFVFKNIDGYFKIYSKHTPINLVRDLPQGFSALEPLVDLPIGINITRFQTLLALHRSYLTPGDSSSGWTAGAAAYYVGYLQPRTFLLKYNENGTITDAVDCALDPLSETKCTLKSFTVEKGIYQTSNFRVQPTESIVRFPNITNLCPFGEVFNATRFASVYAWNRKRISNCVADYSVLYNSASFSTFKCYGVSPTKLNDLCFTNVYADSFVIRGDEVRQIAPGQTGKIADYNYKLPDDFTGCVIAWNSNNLDSKVGGNYNYLYRLFRKSNLKPFERDISTEIYQAGSTPCNGVEGFNCYFPLQSYGFQPTNGVGYQPYRVVVLSFELLHAPATVCGPKKSTNLVKNKCVNFNFNGLTGTGVLTESNKKFLPFQQFGRDIADTTDAVRDPQTLEILDITPCSFGGVSVITPGTNTSNQVAVLYQDVNCTEVPVAIHADQLTPTWRVYSTGSNVFQTRAGCLIGAEHVNNSYECDIPIGAGICASYQTQTNSPRRARSVASQSIIAYTMSLGAENSVAYSNNSIAIPTNFTISVTTEILPVSMTKTSVDCTMYICGDSTECSNFLLQYGSFCTQLNRALTGIAVEQDKNTQEVFAQVKQIYKTPPIKDFGGFNFSQILPDPSKPSKRSFIEDLLFNKVTLADAGFIKQYGDCLGDIAARDLICAQKFNGLTVLPPLLTDEMIAQYTSALLAGTITSGWTFGAGAALQIPFAMQMAYRFNGIGVTQNVLYENQKLIANQFNSAIGKIQDSLSSTASALGKLQDVVNQNAQALNTLVKCLSSNFGAISSVLNDILSRLDKVEAEVQIDRLITGRLQCLQTYVTQQLIRAAEIRASANLAATKMSECVLGQSKRVDFCGKGYHLMSFPQSAPHGVVFLHVTYVPAQEKNFTTAPAICHDGKAHFPREGVFVSNGTHWFVTQRNFYEPQIITTDNTFVSGNCDVVIGIVNNTVYDPLQPELDSGGGGSDIDPYKEFGSSYQLLNFLPLDFFPDLNALVDTATALYEEELTGREHCSPHHTAIRQALVCWDELTKLIAWMSSNITSEQVRTIIVNHVNDTWGLKVRQSLWFHLSCLTFGQHTVQEFLVSFGVWIRTPAPYRPPNAPILSTLPEHTVIC

SEQ ID NO: 11339 - protein, 1301 aa, Artificial Sequence
  SARS-CoV-2/Australia/QLD02/2020__EPI_ISL_407896 spike protein (1-1147)(Q965C_S1003C) WhcAg construct
MFVFLVLLPLVSSQCVNLTTRTQLPPAYTNSFTRGVYYPDKVFRSSVLHSTQDLFLPFFSNVTWFHAIHVSGTNGTKRFDNPVLPFNDGVYFASTEKSNIIRGWIFGTTLDSKTQSLLIVNNATNVVIKVCEFQFCNDPFLGVYYHKNNKSWMESEFRVYSSANNCTFEYVSQPFLMDLEGKQGNFKNLREFVFKNIDGYFKIYSKHTPINLVRDLPQGFSALEPLVDLPIGINITRFQTLLALHRSYLTPGDSSSGWTAGAAAYYVGYLQPRTFLLKYNENGTITDAVDCALDPLSETKCTLKSFTVEKGIYQTSNFRVQPTESIVRFPNITNLCPFGEVFNATRFASVYAWNRKRISNCVADYSVLYNSASFSTFKCYGVSPTKLNDLCFTNVYADSFVIRGDEVRQIAPGQTGKIADYNYKLPDDFTGCVIAWNSNNLDSKVGGNYNYLYRLFRKSNLKPFERDISTEIYQAGSTPCNGVEGFNCYFPLQSYGFQPTNGVGYQPYRVVVLSFELLHAPATVCGPKKSTNLVKNKCVNFNFNGLTGTGVLTESNKKFLPFQQFGRDIADTTDAVRDPQTLEILDITPCSFGGVSVITPGTNTSNQVAVLYQDVNCTEVPVAIHADQLTPTWRVYSTGSNVFQTRAGCLIGAEHVNNSYECDIPIGAGICASYQTQTNSPRRARSVASQSIIAYTMSLGAENSVAYSNNSIAIPTNFTISVTTEILPVSMTKTSVDCTMYICGDSTECSNLLLQYGSFCTQLNRALTGIAVEQDKNTQEVFAQVKQIYKTPPIKDFGGFNFSQILPDPSKPSKRSFIEDLLFNKVTLADAGFIKQYGDCLGDIAARDLICAQKFNGLTVLPPLLTDEMIAQYTSALLAGTITSGWTFGAGAALQIPFAMQMAYRFNGIGVTQNVLYENQKLIANQFNSAIGKIQDSLSSTASALGKLQDVVNQNAQALNTLVKCLSSNFGAISSVLNDILSRLDKVEAEVQIDRLITGRLQCLQTYVTQQLIRAAEIRASANLAATKMSECVLGQSKRVDFCGKGYHLMSFPQSAPHGVVFLHVTYVPAQEKNFTTAPAICHDGKAHFPREGVFVSNGTHWFVTQRNFYEPQIITTDNTFVSGNCDVVIGIVNNTVYDPLQLELDSGGGGSDIDPYKEFGSSYQLLNFLPLDFFPDLNALVDTATALYEEELTGREHCSPHHTAIRQALVCWDELTKLIAWMSSNITSEQVRTIIVNHVNDTWGLKVRQSLWFHLSCLTFGQHTVQEFLVSFGVWIRTPAPYRPPNAPILSTLPEHTVIC

SEQ ID NO: 11340 - protein, 1301 aa, Artificial Sequence
  SARS-CoV-2/India/1-31/2020__EPI_ISL_413523 spike protein (1-1147)(Q965C_S1003C) WhcAg construct
MFVFLVLLPLVSSQCVNLTTRTQLPPAYTNSFTRGVYYPDKVFRSSVLHSTQDLFLPFFSNVTWFHAIHVSGTNGTKRFDNPVLPFNDGVYFASTEKSNIIRGWIFGTTLDSKTQSLLIVNNATNVVIKVCEFQFCNDPFLGVYYHKNNKSWMESEFRVYSSANNCTFEYVSQPFLMDLEGKQGNFKNLREFVFKNIDGYFKIYSKHTPINLVRDLPQGFSALEPLVDLPIGINITRFQTLLALHRSYLTPGDSSSGWTAGAAAYYVGYLQPRTFLLKYNENGTITDAVDCALDPLSETKCTLKSFTVEKGIYQTSNFRVQPTESIVRFPNITNLCPFGEVFNATRFASVYAWNRKRISNCVADYSVLYNSASFSTFKCYGVSPTKLNDLCFTNVYADSFVIRGDEVRQIAPGQTGKIADYNYKLPDDFTGCVIAWNSNNLDSKVGGNYNYLYRLFRKSNLKPFERDISTEIYQAGSTPCNGVEGFNCYFPLQSYGFQPTNGVGYQPYRVVVLSFELLHAPATVCGPKKSTNLVKNKCVNFNFNGLTGTGVLTESNKKFLPFQQFGRDIADTTDAVRDPQTLEILDITPCSFGGVSVITPGTNTSNQVAVLYQDVNCTEVPVAIHADQLTPTWRVYSTGSNVFQTRAGCLIGAEHVNNSYECDIPIGAGICASYQTQTNSPRRARSVASQSIIAYTMSLGAENSVAYSNNSIAIPTNFTISVTTEILPVSMTKTSVDCTMYICGDSTECSNLLLQYGSFCTQLNRALTGIAVEQDKNTQEVFAQVKQIYKTPPIKDFGGFNFSQILPDPSKPSKRSFIEDLLFNKVTLADAGFIKQYGDCLGDIAARDLICAQKFNGLTVLPPLLTDEMIAQYTSALLAGTITSGWTFGAGAALQIPFAMQMAYRFNGIGVTQNVLYENQKLIANQFNSVIGKIQDSLSSTASALGKLQDVVNQNAQALNTLVKCLSSNFGAISSVLNDILSRLDKVEAEVQIDRLITGRLQCLQTYVTQQLIRAAEIRASANLAATKMSECVLGQSKRVDFCGKGYHLMSFPQSAPHGVVFLHVTYVPAQEKNFTTAPAICHDGKAHFPREGVFVSNGTHWFVTQRNFYEPQIITTDNTFVSGNCDVVIGIVNNTVYDPLQPELDSGGGGSDIDPYKEFGSSYQLLNFLPLDFFPDLNALVDTATALYEEELTGREHCSPHHTAIRQALVCWDELTKLIAWMSSNITSEQVRTIIVNHVNDTWGLKVRQSLWFHLSCLTFGQHTVQEFLVSFGVWIRTPAPYRPPNAPILSTLPEHTVIC

SEQ ID NO: 11341 - protein, 1301 aa, Artificial Sequence
  SARS-CoV-2/Guangdong/GD2020087-P0008/2020__EPI_ISL_413863 spike protein (1-1147)(Q965C_S1003C) WhcAg construct
MFVFLVLLPLVSSQCVNLTTRTQLPPAYTNSFTRGVYYPDKVFRSSVLHSTQDLFLPFFSNVTWFHAIHVSGTNGTKRFDNPVLPFNDGVYFASTEKSNIIRGWIFGTTLDSKTQSLLIVNNATNVVIKVCEFQFCNDPFLGVYYHKNNKSWMESEFRVYSSANNCTFEYVSQPFLMDLEGKQGNFKNLREFVFKNIDGYFKIYSKHTPINLVRDLPQGFSALEPLVDLPIGINITRFQTLLALHRSYLTPGDSSSGWTAGAAAYYVGYLQPRTFLLKYNENGTITDAVDCALDPLSETKCTLKSFTVEKGIYQTSNFRVQPTESIVRFPNITNLCPFGEVFNATRFASVYAWNRKRISNCVADYSVLYNSASFSTFKCYGVSPTKLNDLCFTNVYADSFVIRGDEVREIAPGQTGKIADYNYKLPDDFTGCVIAWNSNNLDSKVGGNYNYLYRLFRKSNLKPFERDISTEIYQAGSTPCNGVEGFNCYFPLQSYGFQPTNGVGYQPYRVVVLSFELLHAPATVCGPKKSTNLVKNKCVNFNFNGLTGTGVLTESNKKFLPFQQFGRDIADTTDAVRDPQTLEILDITPCSFGGVSVITPGTNTSNQVAVLYQDVNCTEVPVAIHADQLTPTWRVYSTGSNVFQTRAGCLIGAEHVNNSYECDIPIGAGICASYQTQTNSPRRARSVASQSIIAYTMSLGAENSVAYSNNSIAIPTNFTISVTTEILPVSMTKTSVDCTMYICGDSTECSNLLLQYGSFCTQLNRALTGIAVEQDKNTQEVFAQVKQIYKTPPIKDFGGFNFSQILPDPSKPSKRSFIEDLLFNKVTLADAGFIKQYGDCLGDIAARDLICAQKFNGLTVLPPLLTDEMIAQYTSALLAGTITSGWTFGAGAALQIPFAMQMAYRFNGIGVTQNVLYENQKLIANQFNSAIGKIQDSLSSTASALGKLQDVVNQNAQALNTLVKCLSSNFGAISSVLNDILSRLDKVEAEVQIDRLITGRLQCLQTYVTQQLIRAAEIRASANLAATKMSECVLGQSKRVDFCGKGYHLMSFPQSAPHGVVFLHVTYVPAQEKNFTTAPAICHDGKAHFPREGVFVSNGTHWFVTQRNFYEPQIITTDNTFVSGNCDVVIGIVNNTVYDPLQPELDSGGGGSDIDPYKEFGSSYQLLNFLPLDFFPDLNALVDTATALYEEELTGREHCSPHHTAIRQALVCWDELTKLIAWMSSNITSEQVRTIIVNHVNDTWGLKVRQSLWFHLSCLTFGQHTVQEFLVSFGVWIRTPAPYRPPNAPILSTLPEHTVIC

SEQ ID NO: 11342 - protein, 1301 aa, Artificial Sequence
  SARS-CoV-2/Sweden/01/2020__EPI_ISL_411951 spike protein (1-1147)(Q965C_S1003C) WhcAg construct
MFVFLVLLPLVSSQCVNLTTRTQLPPAYTNSFTRGVYYPDKVFRSSVLHSTQDLFLPFFSNVTWFHAIHVSGTNGTKRFDNPVLPFNDGVYFASTEKSNIIRGWIFGTTLDSKTQSLLIVNNATNVVIKVCEFQFCNDPFLGVYYHKNNKSWMESEFRVYSSANNCTFEYVSQPFLMDLEGKQGNFKNLREFVFKNIDGYFKIYSKHTPINLVRDLPQGFSALEPLVDLPIGINITRFQTLLALHRSYLTPGDSSSGWTAGAAAYYVGYLQPRTFLLKYNENGTITDAVDCALDPLSETKCTLKSFTVEKGIYQTSNFRVQPTESIVRFPNITNLCPFGEVFNATRFASVYAWNRKRISNCVADYSVLYNSASFSTFKCYGVSPTKLNDLCFTNVYADSFVIRGDEVRQIAPGQTGKIADYNYKLPDDFTGCVIAWNSNNLDSKVGGNYNYLYRLFRKSNLKPFERDISTEIYQAGSTPCNGVEGFNCYFPLQSYGFQPTNGVGYQPYRVVVLSFELLHAPATVCGPKKSTNLVKNKCVNFNFNGLTGTGVLTESNKKFLPFQQFGRDIADTTDAVRDPQTLEILDITPCSFGGVSVITPGTNTSNQVAVLYQDVNCTEVPVAIHADQLTPTWRVYSTGSNVFQTRAGCLIGAEHVNNSYECDIPIGAGICASYQTQTNSPRRARSVASQSIIAYTMSLGAENSVAYSNNSIAIPTNFTISVTTEILPVSMTKTSVDCTMYICGDSTECSNLLLQYGSFCTQLNRALTGIAVEQDKNTQEVFAQVKQIYKTPPIKDCGGFNFSQILPDPSKPSKRSFIEDLLFNKVTLADAGFIKQYGDCLGDIAARDLICAQKFNGLTVLPPLLTDEMIAQYTSALLAGTITSGWTFGAGAALQIPFAMQMAYRFNGIGVTQNVLYENQKLIANQFNSAIGKIQDSLSSTASALGKLQDVVNQNAQALNTLVKCLSSNFGAISSVLNDILSRLDKVEAEVQIDRLITGRLQCLQTYVTQQLIRAAEIRASANLAATKMSECVLGQSKRVDFCGKGYHLMSFPQSAPHGVVFLHVTYVPAQEKNFTTAPAICHDGKAHFPREGVFVSNGTHWFVTQRNFYEPQIITTDNTFVSGNCDVVIGIVNNTVYDPLQPELDSGGGGSDIDPYKEFGSSYQLLNFLPLDFFPDLNALVDTATALYEEELTGREHCSPHHTAIRQALVCWDELTKLIAWMSSNITSEQVRTIIVNHVNDTWGLKVRQSLWFHLSCLTFGQHTVQEFLVSFGVWIRTPAPYRPPNAPILSTLPEHTVIC

SEQ ID NO: 11343 - protein, 1301 aa, Artificial Sequence
  SARS-CoV-2/Tianmen/HBCDC-HB-07/2020__EPI_ISL_412983 spike protein (1-1147)(Q965C_S1003C) WhcAg construct
MFVFLVLLPLVSSQCVNLTTRTQLPPAYTNSFTRGVYYPDKVFRSSVLHSTQDLFLPFFSNVTWFHAIHVSGTNGTKRFDNPVLPFNDGVYFASTEKSNIIRGWIFGTTLDSKTQSLLIVNNATNVVIKVCEFQFCNDPFLGVYYHKNNKSWMESEFRVYSSANNCTFEYVSQPFLMDLEGKQGNFKNLREFVFKNIDGYFKIYSKHTPINLVRDLPQGFSALEPLVDLPIGINITRFQTLLALHRSYLTPGDSSSGWTAGAAAYYVGYLQPRTFLLKYNENGTITDAVDCALDPLSETKCTLKSFTVEKGIYQTSNFRVQPTESIVRFPNITNLCPFGEVFNATRFASVYAWNRKRISNCVADYSVLYNSASFSTFKCYGVSPTKLNDLCFTNVYADSFVIRGDEVRQIAPGQTGKIADYNYKLPDDFTGCVIAWNSNNLDSKVGGNYNYLYRLFRKSNLKPFERDISTEIYQAGSTPCNGVEGFNCYFPLQSYGFQPTNGVGYQPYRVVVLSFELLHAPATVCGPKKSTNLVKNKCVNFNFNGLTGTGVLTESNKKFLPFQQFGRDIADTTDAVRDPQTLEILDITPCSFGGVSVITPGTNTSNQVAVLYQDLNCTEVPVAIHADQLTPTWRVYSTGSNVFQTRAGCLIGAEHVNNSYECDIPIGAGICASYQTQTNSPRRARSVASQSIIAYTMSLGAENSVAYSNNSIAIPTNFTISVTTEILPVSMTKTSVDCTMYICGDSTECSNLLLQYGSFCTQLNRALTGIAVEQDKNTQEVFAQVKQIYKTPPIKDFGGFNFSQILPDPSKPSKRSFIEDLLFNKVTLADAGFIKQYGDCLGDIAARDLICAQKFNGLTVLPPLLTDEMIAQYTSALLAGTITSGWTFGAGAALQIPFAMQMAYRFNGIGVTQNVLYENQKLIANQFNSAIGKIQDSLSSTASALGKLQDVVNQNAQALNTLVKCLSSNFGAISSVLNDILSRLDKVEAEVQIDRLITGRLQCLQTYVTQQLIRAAEIRASANLAATKMSECVLGQSKRVDFCGKGYHLMSFPQSAPHGVVFLHVTYVPAQEKNFTTAPAICHDGKAHFPREGVFVSNGTHWFVTQRNFYEPQIITTDNTFVSGNCDVVIGIVNNTVYDPLQPELDSGGGGSDIDPYKEFGSSYQLLNFLPLDFFPDLNALVDTATALYEEELTGREHCSPHHTAIRQALVCWDELTKLIAWMSSNITSEQVRTIIVNHVNDTWGLKVRQSLWFHLSCLTFGQHTVQEFLVSFGVWIRTPAPYRPPNAPILSTLPEHTVIC

SEQ ID NO: 11344 - protein, 1301 aa, Artificial Sequence
  SARS-CoV-2/Hong Kong/case42_VM20002493/2020__EPI_ISL_414527 spike protein (1-1147)(Q965C_S1003C) WhcAg construct
MFVFLVLLPLVSSQCVNLTTRTQLPPAYTNSFTRGVYYPDKVFRSSVLHSTQDLFLPFFSNVTWFHAIHVSGTNGTKRFDNPVLPFNDGVYFASTEKSNIIRGWIFGTTLDSKTQSLLIVNNATNVVIKVCEFQFCNDPFLGVYYHKNNKSWMESEFRVYSSANNCTFEYVSQPFLMDLEGKQGNFKNLREFVFKNIDGYFKIYSKHTPINLVRDLPQGFSALEPLVDLPIGINITRFQTLLALHRSYLTPGDSSSGWTAGAAAYYVGYLQPRTFLLKYNENGTITDAVDCALDPLSETKCTLKSFTVEKGIYQTSNFRVQPTESIVRFPNITNLCPFGEVFNATRFASVYAWNRKRISNCVADYSVLYNSASFSTFKCYGVSPTKLNDLCFTNVYADSFVIRGDEVRQIAPGQTGKIADYNYKLPDDFTGCVIAWNSNNLDSKVGGNYNYLYRLFRKSNLKPFERDISTEIYQAGSTPCNGVEGFNCYFPLQSYGFQPTNGVGYQPYRVVVLSFELLHAPATVCGPKKSTNLVKNKCVNFNFNGLTGTGVLTESNKKFLPFQQFGRDIADTTDAVRDPQTLEILDITPCSFGGVSVITPGTNTSNQVAVLYQDVNCTEVPVAIHADQLTPTWRVYSTGSNVFQTRAGCLIGAEHVNNSYECDIPIGAGICASYQTQTNSPRRARSVASQSIIAYTMSLGAENSVAYSNNSIAIPTNFAISVTTEILPVSMTKTSVDCTMYICGDSTECSNLLLQYGSFCTQLNRALTGIAVEQDKNTQEVFAQVKQIYKTPPIKDFGGFNFSQILPDPSKPSKRSFIEDLLFNKVTLADAGFIKQYGDCLGDIAARDLICAQKFNGLTVLPPLLTDEMIAQYTSALLAGTITSGWTFGAGAALQIPFAMQMAYRFNGIGVTQNVLYENQKLIANQFNSAIGKIQDSLSSTASALGKLQDVVNQNAQALNTLVKCLSSNFGAISSVLNDILSRLDKVEAEVQIDRLITGRLQCLQTYVTQQLIRAAEIRASANLAATKMSECVLGQSKRVDFCGKGYHLMSFPQSAPHGVVFLHVTYVPAQEKNFTTAPAICHDGKAHFPREGVFVSNGTHWFVTQRNFYEPQIITTDNTFVSGNCDVVIGIVNNTVYDPLQPELDSGGGGSDIDPYKEFGSSYQLLNFLPLDFFPDLNALVDTATALYEEELTGREHCSPHHTAIRQALVCWDELTKLIAWMSSNITSEQVRTIIVNHVNDTWGLKVRQSLWFHLSCLTFGQHTVQEFLVSFGVWIRTPAPYRPPNAPILSTLPEHTVIC

SEQ ID NO: 11345 - protein, 1301 aa, Artificial Sequence
  SARS-CoV-2/USA/CruiseA-23/2020__EPI_ISL_414482 spike protein (1-1147)(Q965C_S1003C) WhcAg construct
MFVFLVLLPLVSSQCVNLTTRTQLPPAYTNSFTRGVYYPDKVFRSSVLHSTQDLFLPFFSNVTWFHAIHVSGTNGTKRFDNPVLPFNDGVYFASTEKSNIIRGWIFGTTLDSKTQSLLIVNNATNVVIKVCEFQFCNDPFLGVYYHKNNKSWMESEFRVYSSANNCTFEYVSQPFLMDLEVKQGNFKNLREFVFKNIDGYFKIYSKHTPINLVRDLPQGFSALEPLVDLPIGINITRFQTLLALHRSYLTPGDSSSGWTAGAAAYYVGYLQPRTFLLKYNENGTITDAVDCALDPLSETKCTLKSFTVEKGIYQTSNFRVQPTESIVRFPNITNLCPFGEVFNATRFASVYAWNRKRISNCVADYSVLYNSASFSTFKCYGVSPTKLNDLCFTNVYADSFVIRGDEVRQIAPGQTGKIADYNYKLPDDFTGCVIAWNSNNLDSKVGGNYNYLYRLFRKSNLKPFERDISTEIYQAGSTPCNGVEGFNCYFPLQSYGFQPTNGVGYQPYRVVVLSFELLHAPATVCGPKKSTNLVKNKCVNFNFNGLTGTGVLTESNKKFLPFQQFGRDIADTTDAVRDPQTLEILDITPCSFGGVSVITPGTNTSNQVAVLYQDVNCTEVPVAIHADQLTPTWRVYSTGSNVFQTRAGCLIGAEHVNNSYECDIPIGAGICASYQTQTNSPRRARSVASQSIIAYTMSLGAENSVAYSNNSIAIPTNFTISVTTEILPVSMTKTSVDCTMYICGDSTECSNLLLQYGSFCTQLNRALTGIAVEQDKNTQEVFAQVKQIYKTPPIKDFGGFNFSQILPDPSKPSKRSFIEDLLFNKVTLADAGFIKQYGDCLGDIAARDLICAQKFNGLTVLPPLLTDEMIAQYTSALLAGTITSGWTFGAGAALQIPFAMQMAYRFNGIGVTQNVLYENQKLIANQFNSAIGKIQDSLSSTASALGKLQDVVNQNAQALNTLVKCLSSNFGAISSVLNDILSRLDKVEAEVQIDRLITGRLQCLQTYVTQQLIRAAEIRASANLAATKMSECVLGQSKRVDFCGKGYHLMSFPQSAPHGVVFLHVTYVPAQEKNFTTAPAICHDGKAHFPREGVFVSNGTHWFVTQRNFYEPQIITTDNTFVSGNCDVVIGIVNNTVYDPLQPELDSGGGGSDIDPYKEFGSSYQLLNFLPLDFFPDLNALVDTATALYEEELTGREHCSPHHTAIRQALVCWDELTKLIAWMSSNITSEQVRTIIVNHVNDTWGLKVRQSLWFHLSCLTFGQHTVQEFLVSFGVWIRTPAPYRPPNAPILSTLPEHTVIC

SEQ ID NO: 11346 - protein, 1301 aa, Artificial Sequence
  SARS-CoV-2/Hong Kong/case85_VM20002868/2020__EPI_ISL_414519 spike protein (1-1147)(Q965C_S1003C) WhcAg construct
MFVFLVLVPLVSSQCVNLTTRTQLPPAYTNSFTRGVYYPDKVFRSSVLHSTQDLFLPFFSNVTWFHAIHVSGTNGTKRFDNPVLPFNDGVYFASTEKSNIIRGWIFGTTLDSKTQSLLIVNNATNVVIKVCEFQFCNDPFLGVYYHKNNKSWMESEFRVYSSANNCTFEYVSQPFLMDLEGKQGNFKNLREFVFKNIDGYFKIYSKHTPINLVRDLPQGFSALEPLVDLPIGINITRFQTLLALHRSYLTPGDSSSGWTAGAAAYYVGYLQPRTFLLKYNENGTITDAVDCALDPLSETKCTLKSFTVEKGIYQTSNFRVQPTESIVRFPNITNLCPFGEVFNATRFASVYAWNRKRISNCVADYSVLYNSASFSTFKCYGVSPTKLNDLCFTNVYADSFVIRGDEVRQIAPGQTGKIADYNYKLPDDFTGCVIAWNSNNLDSKVGGNYNYLYRLFRKSNLKPFERDISTEIYQAGSTPCNGVEGFNCYFPLQSYGFQPTNGVGYQPYRVVVLSFELLHAPATVCGPKKSTNLVKNKCVNFNFNGLTGTGVLTESNKKFLPFQQFGRDIADTTDAVRDPQTLEILDITPCSFGGVSVITPGTNTSNQVAVLYQDVNCTEVPVAIHADQLTPTWRVYSTGSNVFQTRAGCLIGAEHVNNSYECDIPIGAGICASYQTQTNSPRRARSVASQSIIAYTMSLGAENSVAYSNNSIAIPTNFTISVTTEILPVSMTKTSVDCTMYICGDSTECSNLLLQYGSFCTQLNRALTGIAVEQDKNTQEVFAQVKQIYKTPPIKDFGGFNFSQILPDPSKPSKRSFIEDLLFNKVTLADAGFIKQYGDCLGDIAARDLICAQKFNGLTVLPPLLTDEMIAQYTSALLAGTITSGWTFGAGAALQIPFAMQMAYRFNGIGVTQNVLYENQKLIANQFNSAIGKIQDSLSSTASALGKLQDVVNQNAQALNTLVKCLSSNFGAISSVLNDILSRLDKVEAEVQIDRLITGRLQCLQTYVTQQLIRAAEIRASANLAATKMSECVLGQSKRVDFCGKGYHLMSFPQSAPHGVVFLHVTYVPAQEKNFTTAPAICHDGKAHFPREGVFVSNGTHWFVTQRNFYEPQIITTDNTFVSGNCDVVIGIVNNTVYDPLQPELDSGGGGSDIDPYKEFGSSYQLLNFLPLDFFPDLNALVDTATALYEEELTGREHCSPHHTAIRQALVCWDELTKLIAWMSSNITSEQVRTIIVNHVNDTWGLKVRQSLWFHLSCLTFGQHTVQEFLVSFGVWIRTPAPYRPPNAPILSTLPEHTVIC

SEQ ID NO: 11347 - protein, 1301 aa, Artificial Sequence; identical to SEQ ID NO: 11337
  SARS-CoV-2/England/200990660/2020__EPI_ISL_414523 spike protein (1-1147)(Q965C_S1003C) WhcAg construct

SEQ ID NO: 11348 - protein, 1301 aa, Artificial Sequence
  SARS-CoV-2/Australia/NSW09/2020__EPI_ISL_413595 spike protein (1-1147)(Q965C_S1003C) WhcAg construct
MFVFLVLLPLVSSQCVNLTTRTQLPPAYTNSFTRGVYYPDKVFRSSVLHSTQDLFLPFFSNVTWFHAIHVSGTNGTKRFDNPVLPFNDGVYFASTEKSNIIRGWIFGTTLDSKTQSLLIVNNATNVVIKVCEFQFCNDPFLGVYYHKNNKSWMESEFRVYSSANNCTFEYVSQPFLMDLEGKQGNFKNLREFVFKNIDGYFKIYSKHTPINLVRDLPQGFSALEPLVDLPIGINITRFQTLLALHRSYLTPGDSSSGWTAGAAAYYVGYLQPRTFLLKYNENGTITDAVDCALDPLSETKCTLKSFTVEKGIYQTSNFRVQPTESIVRFPNITNLCPFGEVFNATRFASVYAWNRKRISNCVADYSVLYNSASFSTFKCYGVSPTKLNDLCFTNVYADSFVIRGDEVRQIAPGQTGKIADYNYKLPDDFTGCVIAWNSNNLDSKVGGNYNYLYRLFRKSNLKPFERDISTEIYQAGSTPCNGVEGFNCYFPLQSYGFQPTNGVGYQPYRVVVLSFELLHAPATVCGPKKSTNLVKNKCVNFNFNGLTGTGVLTESNKKFLPFQQFGRDIADTTDAVRDPQTLEILDITPCSFGGVSVITPGTNTSNQVAVLYQDVNCTEVPVAIHADQLTPTWRVYSTGSNVFQTRAGCLIGAEHVNNSYECDIPIGAGICASYQTQTNSPRRARSVASQSIIAYTMSLGAENSVAYSNNSIAIPTNFTISVTTEILPVSMTKTSVDCTMYICGDSTECSNLLLQYGSFCTQLNRALTGIAVEQDKNTQEVFAQVKQIYKTPPIKDFGGFNFSQILPDPSKPSKRSFIEDLLFNKVTLADAGFIKQYGDCLGDIAARDLICAQKFNGLTVLPPLLTDEMIAQYTSALLAGTITSGWTFGAGAALQIPFAMQMAYRFNGIGVTQNVLYENQKLIANQFNSAIGKIQDSLSFTASALGKLQDVVNQNAQALNTLVKCLSSNFGAISSVLNDILSRLDKVEAEVQIDRLITGRLQCLQTYVTQQLIRAAEIRASANLAATKMSECVLGQSKRVDFCGKGYHLMSFPQSAPHGVVFLHVTYVPAQEKNFTTAPAICHDGKAHFPREGVFVSNGTHWFVTQRNFYEPQIITTDNTFVSGNCDVVIGIVNNTVYDPLQPELDSGGGGSDIDPYKEFGSSYQLLNFLPLDFFPDLNALVDTATALYEEELTGREHCSPHHTAIRQALVCWDELTKLIAWMSSNITSEQVRTIIVNHVNDTWGLKVRQSLWFHLSCLTFGQHTVQEFLVSFGVWIRTPAPYRPPNAPILSTLPEHTVIC

SEQ ID NO: 11349 - protein, 1301 aa, Artificial Sequence; identical to SEQ ID NO: 11329
  SARS-CoV-2/Australia/NSW10/2020__EPI_ISL_413596 spike protein (1-1147)(Q965C_S1003C) WhcAg construct

SEQ ID NO: 11350 - protein, 1301 aa, Artificial Sequence
  SARS-CoV-2/Switzerland/1000477797/2020__EPI_ISL_413023 spike protein (1-1147)(Q965C_S1003C) WhcAg construct
MFVFLVLLPLVSSQCVNLTTRTQLPPAYTNSFTRGVYYPDKVFRSSVLHSTQDLFLPFFSNVTWFHAIHVSGTNGTKRFDNPVLPFNDGVYFASTEKSNIIRGWIFGTTLDSKTQSLLIVNNATNVVIKVCEFQFCNDPFLGVYYHKNNKSWMESEFRVYSSANNCTFEYVSQPFLMDLEGKQGNFKNLREFVFKNIDGYFNIYSKHTPINLVRDLPQGFSALEPLVDLPIGINITRFQTLLALHRSYLTPGDSSSGWTAGAAAYYVGYLQPRTFLLKYNENGTITDAVDCALDPLSETKCTLKSFTVEKGIYQTSNFRVQPTESIVRFPNITNLCPFGEVFNATRFASVYAWNRKRISNCVADYSVLYNSASFSTFKCYGVSPTKLNDLCFTNVYADSFVIRGDEVRQIAPGQTGKIADYNYKLPDDFTGCVIAWNSNNLDSKVGGNYNYLYRLFRKSNLKPFERDISTEIYQAGSTPCNGVEGFNCYFPLQSYGFQPTNGVGYQPYRVVVLSFELLHAPATVCGPKKSTNLVKNKCVNFNFNGLTGTGVLTESNKKFLPFQQFGRDIADTTDAVRDPQTLEILDITPCSFGGVSVITPGTNTSNQVAVLYQGVNCTEVPVAIHADQLTPTWRVYSTGSNVFQTRAGCLIGAEHVNNSYECDIPIGAGICASYQTQTNSPRRARSVASQSIIAYTMSLGAENSVAYSNNSIAIPTNFTISVTTEILPVSMTKTSVDCTMYICGDSTECSNLLLQYGSFCTQLNRALTGIAVEQDKNTQEVFAQVKQIYKTPPIKDFGGFNFSQILPDPSKPSKRSFIEDLLFNKVTLADAGFIKQYGDCLGDIAARDLICAQKFNGLTVLPPLLTDEMIAQYTSALLAGTITSGWTFGAGAALQIPFAMQMAYRFNGIGVTQNVLYENQKLIANQFNSAIGKIQDSLSSTASALGKLQDVVNQNAQALNTLVKCLSSNFGAISSVLNDILSRLDKVEAEVQIDRLITGRLQCLQTYVTQQLIRAAEIRASANLAATKMSECVLGQSKRVDFCGKGYHLMSFPQSAPHGVVFLHVTYVPAQEKNFTTAPAICHDGKAHFPREGVFVSNGTHWFVTQRNFYEPQIITTDNTFVSGNCDVVIGIVNNTVYDPLQPELDSGGGGSDIDPYKEFGSSYQLLNFLPLDFFPDLNALVDTATALYEEELTGREHCSPHHTAIRQALVCWDELTKLIAWMSSNITSEQVRTIIVNHVNDTWGLKVRQSLWFHLSCLTFGQHTVQEFLVSFGVWIRTPAPYRPPNAPILSTLPEHTVIC

SEQ ID NO: 11351 - protein, 1301 aa, Artificial Sequence
  SARS-CoV-2/Belgium/BA-02291/2020__EPI_ISL_415159 spike protein (1-1147)(Q965C_S1003C) WhcAg construct
MFVFLVLLPLVSSQCVNLTTRTQLPPAYTNSFTRGVYYPDKVFRSSVLHSTQDLFLPFFSNVTWFHAIHVSGTNGTKRFDNPVLPFNDGVYFASTEKSNIIRGWIFGTTLDSKTQSLLIVNNATNVVIKVCEFQFCNDPFLGVYYHKNNKSWMESEFRVYSSANNCTFEYVSQPFLMDLEGKQGNFKNLREFVFKNIDGYFKIYSKHTPINLVRDLPQGFSALEPLVDLPIGINITRFQTLLALHRSYLTPGDSSSGWTAGAAAYYVGYLQPRTFLLKYNENGTITDAVDCALDPLSETKCTLKSFTVEKGIYQTSNFRVQPTESIVRFPNITNLCPFGEVFNATRFASVYAWNRKRISNCVADYSVLYNSASFSTFKCYGVSPTKLNDLCFTNVYADSFVIRGDEVRQIAPGQTGKIADYNYKLPDDFTGCVIAWNSNNLDSKVGGNYNYLYRLFRRSNLKPFERDISTEIYQAGSTPCNGVEGFNCYFPLQSYGFQPTNGVGYQPYRVVVLSFELLPAPATVCGPKKSTNLVKNKCVNFNFNGLTGTGVLTESNKKFLPFQQFGRDIADTTDAVRDPQTLEILDITPCSFGGVSVITPGTNTSNQVAVLYQGVNCTEVPVAIHADQLTPTWRVYSTGSNVFQTRAGCLIGAEHVNNSYECDIPIGAGICASYQTQTNSPRRARSVASQSIIAYTMSLGAENSVAYSNNSIAIPTNFTISVTTEILPVSMTKTSVDCTMYICGDSTECSNLLLQYGSFCTQLNRALTGIAVEQDKNTQEVFAQVKQIYKTPPIKDFGGFNFSQILPDPSKPSKRSFIEDLLFNKVTLADAGFIKQYGDCLGDIAARDLICAQKFNGLTVLPPLLTDEMIAQYTSALLAGTITSGWTFGAGAALQIPFAMQMAYRFNGIGVTQNVLYENQKLIANQFNSAIGKIQDSLSSAAPALGKLQDVVNQNAQALNTLVKCLSSNFGAISSVLNDILSRLDKVEAEVQIDRLITGRLQCLQTYVTQQLIRAAEIRASANLAATKMSECVLGQSKRVDFCGKGYHLMSFPQSAPHGVVFLHVTYVPAQEKNFTTAPAICHDGKAHFPREGVFVSNGTHWFVTQRNFYEPQIITTDNTFVSGNCDVVIGIVNNTVYDPLQPELDSGGGGSDIDPYKEFGSSYQLLNFLPLDFFPDLNALVDTATALYEEELTGREHCSPHHTAIRQALVCWDELTKLIAWMSSNITSEQVRTIIVNHVNDTWGLKVRQSLWFHLSCLTFGQHTVQEFLVSFGVWIRTPAPYRPPNAPILSTLPEHTVIC

SEQ ID NO: 11352 - protein, 1301 aa, Artificial Sequence
  SARS-CoV-2/USA/WA8-UW5/2020__EPI_ISL_413486 spike protein (1-1147)(Q965C_S1003C) WhcAg construct
MFVFLVLLPLVSSQCVNLTTRTQLPPAYTNSFTRGVYYPDKVFRSSVLHSTQDLFLPFFSNVTWFHAIHVSGTNGTKRFDNPVLPFNDGVYFASTEKSNIIRGWIFGTTLDSKTQSLLIVNNATNVVIKVCEFQFCNDPFLGVYYHKNNKSWMESEFRVYSSANNCTFEYVSQPFLMDLEGKQGNFKNLREFVFKNIDGYFKIYSKHTPINLVRDLPQGFSALEPLVDLPIGINITRFQTLLALHRSYLTPGDSSSGWTAGAAAYYVGYLQPRTFLLKYNENGTITDAVDCALDPLSETKCTLKSFTVEKGIYQTSNFRVQPTESIVRFPNITNLCPFGEVFNATRFASVYAWNRKRISNCVADYSVLYNSASFSTFKCYGVSPTKLNDLCFTNVYADSFVIRGDEVRQIAPGQTGKIADYNYKLPDDFTGCVIAWNSNNLDSKVGGNYNYLYRLFRKSNLKPFERDISTEIYQAGSTPCNGVEGFNCYFPLQSYGFQPTNGVGYQPYRVVVLSFELLHAPATVCGPKKSTNLVKNKCVNFNFNGLTGTGVLTESNKKFLPFQQFGRDIADTTDAVRDPQTLEILDITPCSFGGVSVITPGTNTSNQVAVLYQDVNCTEVPVAIHADQLTPTWRVYSTGSNVFQTRAGCLIGAEYVNNSYECDIPIGAGICASYQTQTNSPRRARSVASQSIIAYTMSLGAENSVAYSNNSIAIPTNFTISVTTEILPVSMTKTSVDCTMYICGDSTECSNLLLQYGSFCTQLNRALTGIAVEQDKNTQEVFAQVKQIYKTPPIKDFGGFNFSQILPDPSKPSKRSFIEDLLFNKVTLADAGFIKQYGDCLGDIAARDLICAQKFNGLTVLPPLLTDEMIAQYTSALLAGTITSGWTFGAGAALQIPFAMQMAYRFNGIGVTQNVLYENQKLIANQFNSAIGKIQDSLSSTASALGKLQDVVNQNAQALNTLVKCLSSNFGAISSVLNDILSRLDKVEAEVQIDRLITGRLQCLQTYVTQQLIRAAEIRASANLAATKMSECVLGQSKRVDFCGKGYHLMSFPQSAPHGVVFLHVTYVPAQEKNFTTAPAICHDGKAHFPREGVFVSNGTHWFVTQRNFYEPQIITTDNTFVSGNCDVVIGIVNNTVYDPLQPELDSGGGGSDIDPYKEFGSSYQLLNFLPLDFFPDLNALVDTATALYEEELTGREHCSPHHTAIRQALVCWDELTKLIAWMSSNITSEQVRTIIVNHVNDTWGLKVRQSLWFHLSCLTFGQHTVQEFLVSFGVWIRTPAPYRPPNAPILSTLPEHTVIC

SEQ ID NO: 11353 - protein, 1301 aa, Artificial Sequence
  SARS-CoV-2/England/20102000506/2020__EPI_ISL_415147 spike protein (1-1147)(Q965C_S1003C) WhcAg construct
MFVFLVLLPLVSSQCVNLTTRTQLPPAYTNSFTRGVYYPDKVFRSSVLHSTQDLFLPFFSNVTWFHAIHVSGTNGTKRFDNPVLPFNDGVYFASTEKSNIIRGWIFGTTLDSKTQSLLIVNNATNVVIKVCEFQFCNDPFLGVYYHKNNKSWMESEFRVYSSANNCTFEYVSQPFLMDLEGKQGNFKNLREFVFKNIDGYFKIYSKHTPINLVRDLPQGFSALEPLVDLPIGINITRFQTLLALHRSYLTPGDSSSGWTAGAAAYYVGYLQPRTFLLKYNENGTITDAVDCALDPLSETKCTLKSFTVEKGIYQTSNFRVQPTESIVRFPNITNLCPFGEVFNATRFASVYAWNRKRISNCVADYSVLYNSASFSTFKCYGVSPTKLNDLCFTNVYADSFVIRGDEVRQIAPGQTGKIADYNYKLPDDFTGCVIAWNSNNLDSKVGGNYNYLYRLFRKSNLKPFERDISTEIYQAGSTPCNGVEGFNCYFPLQSYGFQPTNGVGYQPYRVVVLSFELLHAPATVCGPKKSTNLVKNKCVNFNFNGLTGTGVLTESNKKFLPFQQFGRDIADTTDAVRDPQTLEILDITPCSFGGVSVITPGTNTSNQVAVLYQGVNCTEVPVAIHADQLTPTWRVYSTGSNVFQTRAGCLIGAEHVNNSYECDIPIGAGICASYQTQTNSPRRARSVASQSIIAYTMSLGAENSVAYSNNSIAIPTNFTISVTTEILPVSMTKTSVDCTMYICGDSTECSNLLLQYGSFCTQLNRALTGIAVEQDKNTQEVFAQVKQIYKTPPIKDFGGFNFSQILPDPSKPSKRSFIEDLLFNKVTLADAGFIKQYGYCLGDIAARDLICAQKFNGLTVLPPLLTDEMIAQYTSALLAGTITSGWTFGAGAALQIPFAMQMAYRFNGIGVTQNVLYENQKLIANQFNSAIGKIQDSLSSTASALGKLQDVVNQNAQALNTLVKCLSSNFGAISSVLNDILSRLDKVEAEVQIDRLITGRLQCLQTYVTQQLIRAAEIRASANLAATKMSECVLGQSKRVDFCGKGYHLMSFPQSAPHGVVFLHVTYVPAQEKNFTTAPAICHDGKAHFPREGVFVSNGTHWFVTQRNFYEPQIITTDNTFVSGNCDVVIGIVNNTVYDPLQPELDSGGGGSDIDPYKEFGSSYQLLNFLPLDFFPDLNALVDTATALYEEELTGREHCSPHHTAIRQALVCWDELTKLIAWMSSNITSEQVRTIIVNHVNDTWGLKVRQSLWFHLSCLTFGQHTVQEFLVSFGVWIRTPAPYRPPNAPILSTLPEHTVIC

SEQ ID NO: 11354 - protein, 1301 aa, Artificial Sequence
  SARS-CoV-2/Belgium/VAG-03013/2020__EPI_ISL_415155 spike protein (1-1147)(Q965C_S1003C) WhcAg construct
MFVFLVLLPLVSSQCVNLTTRTQLPPAYTNSFTRGVYYPDKVFRSSVLHSTQDLFLPFFSNVTWFHAIHVSGTNGTKRFDNPVLPFNDGVYFASTEKSNIIRGWIFGTTLDSKTQSLLIVNNATNVVIKVCEFQFCNDPFLGVYYHKNNKSWMESEFRVYSSANNCTFEYVSQPFLMDLEGKQGNFKNLREFVFKNIDGYFKIYSKHTPINLVRDLPQGFSALEPLVDLPIGINITRFQTLLALHRSYLTPGDSSSGWTAGAAAYYVGYLQPRTFLLKYNENGTITDAVDCALDPLSETKCTLKSFTVEKGIYQTSNFRVQPTESIVRFPNITNLCPFGEVFNATRFASVYAWNRKRISNCVADYSVLYNSASFSTFKCYGVSPTKLNDLCFTNVYADSFVIRGDEVRQIAPGQTGKIADYNYKLPDDFTGCVIAWNSNNLDSKVGGNYNYLYRLFRKSNLKPFERDISTEIYQAGSTPCNGVEGFNCYFPLQSYGFQPTNGVGYQPYRVVVLSFELLHAPATVCGPKKSTNLVKNKCVNFNFNGLTGTGVLTESNKKFLPFQQFGRDIADTTDAVRDPQTLEILDITPCSFGGVSVITPGTNTSNQVAVLYQGVNCTEVPVAIHADQLTPTWRVYSTGSNVFQTRAGCLIGAEHVNNSYECDIPIGAGICASYQTQTNSPRRARSVASQSIIAYTMSLGAENSVAYSNNSIAIPTNFTISVTTEILPVSMTKTSVDCTMYICGDSTECSNLLLQYGSFCTQLNRALTGIAVEQDKNTQEVFAQVKQIYKTPPIKDFGGFNFSQILPDPSKPSKRSFIEDLLFNKVTLADAGFIKQYGDCLGDIAARDLICAQKFNGLTVLPPLLTDEMIAQYTSALLAGTITSGWTFGAGAALQIPFAMQMAYRFNGIGVTQNVLYENQKLIANQFNSAIGKIQDSLSSTATALGKLQDVVNQNAQALNTLVKCLSSNFGAISSVLNDILSRLDKVEAEVQIDRLITGRLQCLQTYVTQQLIRAAEIRASANLAATKMSECVLGQSKRVDFCGKGYHLMSFPQSAPHGVVFLHVTYVPAQEKNFTTAPAICHDGKAHFPREGVFVSNGTHWFVTQRNFYEPQIITTDNTFVSGNCDVVIGIVNNTVYDPLQPELDSGGGGSDIDPYKEFGSSYQLLNFLPLDFFPDLNALVDTATALYEEELTGREHCSPHHTAIRQALVCWDELTKLIAWMSSNITSEQVRTIIVNHVNDTWGLKVRQSLWFHLSCLTFGQHTVQEFLVSFGVWIRTPAPYRPPNAPILSTLPEHTVIC

SEQ ID NO: 11355 - protein, 1301 aa, Artificial Sequence
  SARS-CoV-2/Belgium/BC-03016/2020__EPI_ISL_415157 spike protein (1-1147)(Q965C_S1003C) WhcAg construct
MFVFLVLLPLVSSQCVNLTTRTQLPPAYTNSFTRGVYYPDKVFRSSVLHSTQDLFLPFFSNVTWFHAIHVSGTNGTKRFDNPVLPFNDGVYFASTEKSNIIRGWIFGTTLDSKTQSLLIVNNATNVVIKVCEFQFCNDPFLGVYYHKNNKSWMESEFRVYSSANNCTFEYVSQPFLMDLEGKQGNFKNLREFVFKNIDGYFKIYSKHTPINLVRDLPQGFSALEPLVDLPIGINITRFQTLLALHRSYLTPGDSSSGWTAGAAAYYVGYLQPRTFLLKYNENGTITDAVDCALDPLSETKCTLKSFTVEKGIYQTSNFRVQPTESIVRFPNITNLCPFGEVFNATRFASVYAWNRKRISNCVADYSVLYNSASFSTFKCYGVSPTKLNDLCFTNVYADSFVIRGDEVRQIAPGQTGKIADYNYKLPDDFTGCVIAWNSNNLDSKVGGNYNYLYRLFRKSNLKPFERDISTEIYQAGSTPCNGVEGFNCYFPLQSYGFQPTNGVGYQPYRVVVLSFELLHAPATVCGPKKSTNLVKNKCVNFNFNGLTGTGVLTESNKKFLPFQQFGRDIADTTDAVRDPQTLEILDITPCSFGGVSVITPGTNTSNQVAVLYQGVNCTEVPVAIHADQLTPTWRVYSTGSNVFQTRAGCLIGAEHVNNSYECDIPIGAGICASYQTQTNSPRRARSVASQSIIAYTMSLGAENSVAYSNNSIAIPTNFTISVTTEILPVSMTKTSVDCTMYICGDSTECSNLLLQYGSFCTQLNRALTGIAVEQDKNTQEVFAQVKQIYKTPPIKDFGGFNFSQILPDPSKPSKRSFIEDLLFNKVTLADAGFIKQYGDCLGDIAARDLICAQKFNGLTVLPPLLTDEMIAQYTSALLAGTITSGWTFGAGAALQIPFAMQMAYRFNGIGVTQNVLYENQKLIANQFNSAIGKIQDSLSSTAPALGKLQDVVNQNAQALNTLVKCLSSNFGAISSVLNDILSRLDKVEAEVQIDRLITGRLQCLQTYVTQQLIRAAEIRASANLAATKMSECVLGQSKRVDFCGKGYHLMSFPQSAPHGVVFLHVTYVPAQEKNFTTAPAICHDGKAHFPREGVFVSNGTHWFVTQRNFYEPQIITTDNTFVSGNCDVVIGIVNNTVYDPLQPELDSGGGGSDIDPYKEFGSSYQLLNFLPLDFFPDLNALVDTATALYEEELTGREHCSPHHTAIRQALVCWDELTKLIAWMSSNITSEQVRTIIVNHVNDTWGLKVRQSLWFHLSCLTFGQHTVQEFLVSFGVWIRTPAPYRPPNAPILSTLPEHTVIC

SEQ ID NO: 11356 - protein, 1301 aa, Artificial Sequence
  SARS-CoV-2/Germany/BavPat3/2020__EPI_ISL_414521 spike protein (1-1147)(Q965C_S1003C) WhcAg construct
MFVFLVLLPLVSSQCVNLTTRTQLPPAYTNSFTRGVYYPDKVFRSSVLHSTQDLFLPFFSNVTWFHAIHVSGTNGTKRFDNPVLPFNDGVYFASTEKSNIIRGWIFGTTLDSKTQSLLIVNNATNVVIKVCEFQFCNDPFLGVYYHKNNKSWMESEFRVYSSANNCTFEYVSQPFLMDLEGKQGNFKNLREFVFKNIDGYFKIYSKHTPINLVRDLPQGFSALEPLVDLPIGINITRFQTLLALHRSYLTPGDSSSGWTAGAAAYYVGYLQPRTFLLKYNENGTITDAVDCALDPLSETKCTLKSFTVEKGIYQTSNFRVQPTESIVRFPNITNLCPFGEVFNATRFASVYAWNRKRISNCVADYSVLYNSASFSTFKCYGVSPTKLNDLCFTNVYADSFVIRGDEVRQIAPGQTGKIADYNYKLPDDFTGCVIAWNSNNLDSKVGGNYNYLYRLFRKSNLKPFERDISTEIYQAGSTPCNGVEGFNCYFPLQSYGFQPTNGVGYQPYRVVVLSFELLHAPATVCGPKKSTNLVKNKCVNFNFNGLTGTGVLTESNKKFLPFQQFGRDIADTTDAVRDPQTLEILDITPCSFGGVSVITPGTNTSNQVAVLYQDVNCTEVPVAIHADQLTPTWRVYSTGSNVFQTRAGCLIGAEHVNNSYECDIPIGAGICASYQTQTNSPRRARSVASQSIIAYTMSLGAENSVAYSNNSIAIPTNFTISVTTEILPVSMTKTSVDCTMYICGDSTECSNLLLQYGSFCTQLNRALTGIAVEQDKNTQQVFAQVKQIYKTPPIKDFGGFNFSQILPDPSKPSKRSFIEDLLFNKVTLADAGFIKQYGDCLGDIAARDLICAQKFNGLTVLPPLLTDEMIAQYTSALLAGTITSGWTFGAGAALQIPFAMQMAYRFNGIGVTQNVLYENQKLIANQFNSAIGKIQDSLSSTASALGKLQDVVNQNAQALNTLVKCLSSNFGAISSVLNDILSRLDKVEAEVQIDRLITGRLQCLQTYVTQQLIRAAEIRASANLAATKMSECVLGQSKRVDFCGKGYHLMSFPQSAPHGVVFLHVTYVPAQEKNFTTAPAICHDGKAHFPREGVFVSNGTHWFVTQRNFYEPQIITTDNTFVSGNCDVVIGIVNNTVYDPLQPELDSGGGGSDIDPYKEFGSSYQLLNFLPLDFFPDLNALVDTATALYEEELTGREHCSPHHTAIRQALVCWDELTKLIAWMSSNITSEQVRTIIVNHVNDTWGLKVRQSLWFHLSCLTFGQHTVQEFLVSFGVWIRTPAPYRPPNAPILSTLPEHTVIC

SEQ ID NO: 11357 - protein, 1301 aa, Artificial Sequence
  SARS-CoV-2/France/HF1805/2020__EPI_ISL_414628 spike protein (1-1147)(Q965C_S1003C) WhcAg construct
MFVFLVLLPLVSSQCVNLTTRTQLPPAYTNSFTRGVYYPDKVFRSSVLHSTQDLFLPFFSNVTWFHAIHVSGTNGTKRFDNPVLPFNDGVYFASTEKSNIIRGWIFGTTLDSKTQSLLIVNNATNVVIKVCEFQFCNDPFLGVYYHKNNKSWMESEFRVYSSANNCTFEYVSQPFLMDLEGKQGNFKNLREFVFKNIDGYFKIYSKHTPINLVRDLPQGFSALEPLVDLPIGINITRFQTLLALHRSYLTPGDSSSGWTAGAAAYYVGYLQPRTFLLKYNENGTITDAVDCALDPLSETKCTLKSFTVEKGIYQTSNFRVQPTESIVRFPNITNLCPFGEVFNATRFASVYAWNRKRISNCVADYSVLYNSASFSTFKCYGVSPTKLNDLCFTNVYADSFVIRGDEVRQIAPGQTGKIADYNYKLPDDFTGCVIAWNSNNLDSKVGGNYNYLYRLFRKSNLKPFERDISTEIYQAGSTPCNGVEGFNCYFPLQSYGFQPTNGVGYQPYRVVVLSFELLHAPATVCGPKKSTNLVKNKCVNFNFNGLTGTGVLTESNKKFLPFQQFGRDIADTTDAVRDPQTLEILDITPCSFGGVSVITPGTNTSNQVAVLYQGVNCTEVPVAIHADQLTPTWRVYSTGSNVFQTRAGCLIGAEHVNNSYECDIPIGAGICASYQTQTNSPRRARSVASQSIIAYTMSLGAENSVAYSNNSIAIPTNFTISVTTEILPVSMTKTSVDCTMYICGDSTECSNLLLQYGSFCTQLNRALTGIAVEQDKNTQEVFAQVKQIYKTPPIKDFGGFNFSQILPDPSKPSKRSFIEDLLFNKVTLADAGFIKQYGDCLGDIAARDLICAQKFNGLTVLPPLLTDEMIAQYTSALLAGTITSGWTFGAGAALQIPFAMQMAYRFNGIGVTQNVLYENQKLIANQFNSAIGKIQDSLSSTASALGKLQDVVNQNAQALNTLVKCLSSNFGAISSVLNDILSRLDKVEAEVQIDRLITGRLQCLQTYVTQQLIRAAEIRASANLAATKMSECVLGQSKRVDFCGKGYHLMSFPQSAPHGVVFLHVTYVPAQEKNFTTAPAICHDGKAHFPREGVFVSNGTHWFVTQRNFYEPQIITTDNTFVSGNCDVVIGVVNNTVYDPLQPELDSGGGGSDIDPYKEFGSSYQLLNFLPLDFFPDLNALVDTATALYEEELTGREHCSPHHTAIRQALVCWDELTKLIAWMSSNITSEQVRTIIVNHVNDTWGLKVRQSLWFHLSCLTFGQHTVQEFLVSFGVWIRTPAPYRPPNAPILSTLPEHTVIC

SEQ ID NO: 11358 - protein, 1301 aa, Artificial Sequence
  SARS-CoV-2/Netherlands/ZuidHolland_9/2020__EPI_ISL_414445 spike protein (1-1147)(Q965C_S1003C) WhcAg construct
MFVFLVLLPLVSSQCVNLTTRTQLPPAYTNSFTRGVYYPDKVFRSSVLHSTQDLFLPFFSNVTWFHAIHVSGTNGTKRFDNPVLPFNDGVYFASTEKSNIIRGWIFGTTLDSKTQSLLIVNNATNVVIKVCEFQFCNDPFLGVYYHKNNKSWMESEFRVYSSANNCTFEYVSQPFLMDLEGKQGNFKNLREFVFKNIDGYFKIYSKHTPINLVRDLPQGFSALEPLVDLPIGINITRFQTLLALHRSYLTPGDSSSGWTAGAAAYYVGYLQPRTFLLKYNENGTITDAVDCALDPLSETKCTLKSFTVEKGIYQTSNFRVQPTESIVRFPNITNLCPFGEVFNATRFASVYAWNRKRISNCVADYSVLYNSASFSTFKCYGVSPTKLNDLCFTNVYADSFVIRGDEVRQIAPGQTGKIADYNYKLPDDFTGCVIAWNSNNLDSKVGGNYNYLYRLFRKSNLKPFERDISTEIYQAGSTPCNGVEGFNCYFPLQSYGFQPTNGVGYQPYRVVVLSFELLHAPATVCGPKKSTNLVKNKCVNFNFNGLTGTGVLTESNKKFLPFQQFGRDIADTTDAVRDPQTLEILDITPCSFGGVSVITPGTNTSNQVAVLYQGVNCTEVPVAIHADQLTPTWRVYSTGSNVFQTRAGCLIGAEHVNNSYECDIPIGAGICASYQTQTNSPRRARSVASQSIIAYTMSLGAENSVAYSNNSIAIPTNFTISVTTEILPVSMTKTSVDCTMYICGDSTECSNLLLQYGSFCTQLNRALTGIAVEQDKNTQEVFAQVKQIYKTPPIKDFGGFNFSQILPDPSKPSKRSFIEDLLFNKVTLADAGFIKQYGDCLGDIAARDLICVQKFNGLTVLPPLLTDEMIAQYTSALLAGTITSGWTFGAGAALQIPFAMQMAYRFNGIGVTQNVLYENQKLIANQFNSAIGKIQDSLSSTASALGKLQDVVNQNAQALNTLVKCLSSNFGAISSVLNDILSRLDKVEAEVQIDRLITGRLQCLQTYVTQQLIRAAEIRASANLAATKMSECVLGQSKRVDFCGKGYHLMSFPQSAPHGVVFLHVTYVPAQEKNFTTAPAICHDGKAHFPREGVFVSNGTHWFVTQRNFYEPQIITTDNTFVSGNCDVVIGIVNNTVYDPLQPELDSGGGGSDIDPYKEFGSSYQLLNFLPLDFFPDLNALVDTATALYEEELTGREHCSPHHTAIRQALVCWDELTKLIAWMSSNITSEQVRTIIVNHVNDTWGLKVRQSLWFHLSCLTFGQHTVQEFLVSFGVWIRTPAPYRPPNAPILSTLPEHTVIC

SEQ ID NO: 11359 - protein, 1301 aa, Artificial Sequence
  SARS-CoV-2/Finland/FIN03032020A/2020__EPI_ISL_413602 spike protein (1-1147)(Q965C_S1003C) WhcAg construct
MFVFLVLLPLVSSQCVNLTTRTQLPPAYTNSFTRGVYYPDKVFRSSVLHSTQDLFLPFFSNVTWFHAIHVSGTNGTKRFDNPVLPFNDGVYFASTEKSNIIRGWIFGTTLDSKTQSLLIVNNATNVVIKVCEFQFCNDPFLGVYYHKNNKSWMESEFRVYSSANNCTFEYVSQPFLMDLEGKQGNFKNLREFVFKNIDGYFKIYSKHTPINLVRDLPQGFSALEPLVDLPIGINITRFQTLLALHRSYLTPGDSSSGWTAGAAAYYVGYLQPRTFLLKYNENGTITDAVDCALDPLSETKCTLKSFTVEKGIYQTSNFRVQPTESIVRFPNITNLCPFGEVFNATRFASVYAWNRKRISNCVADYSVLYNSASFSTFKCYGVSPTKLNDLCFTNVYADSFVIRGDEVRQIAPGQTGKIADYNYKLPDDFTGCVISWNSNNLDSKVGGNYNYLYRLFRKSNLKPFERDISTEIYQAGSTPCNGVEGFNCYFPLQSYGFQPTNGVGYQPYRVVVLSFELLHAPATVCGPKKSTNLVKNKCVNFNFNGLTGTGVLTESNKKFLPFQQFGRDIADTTDAVRDPQTLEILDITPCSFGGVSVITPGTNTSNQVAVLYQGVNCTEVPVAIHADQLTPTWRVYSTGSNVFQTRAGCLIGAEHVNNSYECDIPIGAGICASYQTQTNSPRRARSVASQSIIAYTMSLGAENSVAYSNNSIAIPTNFTISVTTEILPVSMTKTSVDCTMYICGDSTECSNLLLQYGSFCTQLNRALTGIAVEQDKNTQEVFAQVKQIYKTPPIKDFGGFNFSQILPDPSKPSKRSFIEDLLFNKVTLADAGFIKQYGDCLGDIAARDLICAQKFNGLTVLPPLLTDEMIAQYTSALLAGTITSGWTFGAGAALQIPFAMQMAYRFNGIGVTQNVLYENQKLIANQFNSAIGKIQDSLSSTASALGKLQDVVNQNAQALNTLVKCLSSNFGAISSVLNDILSRLDKVEAEVQIDRLITGRLQCLQTYVTQQLIRAAEIRASANLAATKMSECVLGQSKRVDFCGKGYHLMSFPQSAPHGVVFLHVTYVPAQEKNFTTAPAICHDGKAHFPREGVFVSNGTHWFVTQRNFYEPQIITTDNTFVSGNCDVVIGIVNNTVYDPLQPELDSGGGGSDIDPYKEFGSSYQLLNFLPLDFFPDLNALVDTATALYEEELTGREHCSPHHTAIRQALVCWDELTKLIAWMSSNITSEQVRTIIVNHVNDTWGLKVRQSLWFHLSCLTFGQHTVQEFLVSFGVWIRTPAPYRPPNAPILSTLPEHTVIC

SEQ ID NO: 11360 - protein, 1301 aa, Artificial Sequence
  SARS-CoV-2/France/GE1977/2020__EPI_ISL_414632 spike protein (1-1147)(Q965C_S1003C) WhcAg construct
MFVFLVLLPLVSSQCVNLTTRTQLPPAYTNSFTRGVYYPDKVFRSSVLHSTQDLFLPFFSNVTWFHAIHVSGTNGTKRFDNPVLPFNDGVYFASTEKSNIIRGWIFGTTLDSKTQSLLIVNNATNVVIKVCEFQFCNDPFLGVYYHKNNKSWMESEFRVYSSANNCTFEYVSQPFLMDLEGKQGNFKNLREFVFKNIDGYFKIYSKHTPINLVRDLPQGFSALEPLVDLPIGINITRFQTLLALHRSYLTPGDSSSGWTAGAAAYYVGYLQPRTFLLKYNENGTITDAVDCALDPLSETKCTLKSFTVEKGIYQTSNFRVQPTESIVRFPNITNLCPFGEVFNATRFASVYAWNRKRISNCVADYSVLYNSASFSTFKCYGVSPTKLNDLCFTNVYADSFVIRGDEVRQIAPGQTGKIADYNYKLPDDFTGCVIAWNSNNLDSKVGGNYNYLYRLFRKSNLKPFERDISTEIYQAGSTPCNGVEGFNCYFPLQSYGFQPTNGVGYQPYRVVVLSFELLHAPATVCGPKKSTNLVKNKCVNFNFNGLTGTGVLTESNKKFLPFQQFGRDIADTTDAVRDPQTLEILDITPCSFGGVSVITPGTNTSNQVAVLYQGVNCTEVPVAIHADQLTPTWRVYSTGSNVFQTRAGCLIGAEHVNNSYECDIPIGAGICASYQTQTNSPRRARSVASQSIIAYTMSLGAENSVAYSNNSIAIPTNFTISVTTEILPVSMTKTSVDCTMYICGDSTECSNLLLQYGSFCTQLNRALTGIAVEQDKNTQEVFAQVKQIYKTPPIKDFGGFNFSQILPDPSKPSKRSFIEDLLFNKVTLADAGFIKQYGDCLGDIAARDLICAQKFNGLTVLPPLLTDEMIAQYTSALLAGTITSGWTFGAGAALQIPFAMQMAYRFNGIGVTQNVLYENQKLIANQFNSAIGKIQDSLFSTASALGKLQDVVNQNAQALNTLVKCLSSNFGAISSVLNDILSRLDKVEAEVQIDRLITGRLQCLQTYVTQQLIRAAEIRASANLAATKMSECVLGQSKRVDFCGKGYHLMSFPQSAPHGVVFLHVTYVPAQEKNFTTAPAICHDGKAHFPREGVFVSNGTHWFVTQRNFYEPQIITTDNTFVSGNCDVVIGIVNNTVYDPLQPELDSGGGGSDIDPYKEFGSSYQLLNFLPLDFFPDLNALVDTATALYEEELTGREHCSPHHTAIRQALVCWDELTKLIAWMSSNITSEQVRTIIVNHVNDTWGLKVRQSLWFHLSCLTFGQHTVQEFLVSFGVWIRTPAPYRPPNAPILSTLPEHTVIC

SEQ ID NO: 11361 - protein, 1301 aa, Artificial Sequence
  SARS-CoV-2/Finland/FIN-313/2020__EPI_ISL_414641 spike protein (1-1147)(Q965C_S1003C) WhcAg construct
MFVFLVLLPLVSSQCVNLTTRTQLPPAYTNSFTRGVYYPDKVFRSSVLHSTQDLFLPFFSNVTWFHAIHVSGTNGTKRFDNPVLPFNDGVYFASTEKSNIIRGWIFGTTLDSKTQSLLIVNNATNVVIKVCEFQFCNDPFLGVYYHKNNKSWMESEFRVYSSANNCTFEYVSQPFLMDLEGKQGNFKNLREFVFKNIDGYFKIYSKHTPINLVRDLPQGFSALEPLVDLPIGINITRFKTLLALHRSYLTPGDSSSGWTAGAAAYYVGYLQPRTFLLKYNENGTITDAVDCALDPLSETKCTLKSFTVEKGIYQTSNFRVQPTESIVRFPNITNLCPFGEVFNATRFASVYAWNRKRISNCVADYSVLYNSASFSTFKCYGVSPTKLNDLCFTNVYADSFVIRGDEVRQIAPGQTGKIADYNYKLPDDFTGCVIAWNSNNLDSKVGGNYNYLYRLFRKSNLKPFERDISTEIYQAGSTPCNGVEGFNCYFPLQSYGFQPTNGVGYQPYRVVVLSFELLHAPATVCGPKKSTNLVKNKCVNFNFNGLTGTGVLTESNKKFLPFQQFGRDIADTTDAVRDPQTLEILDITPCSFGGVSVITPGTNTSNQVAVLYQGVNCTEVPVAIHADQLTPTWRVYSTGSNVFQTRAGCLIGAEHVNNSYECDIPIGAGICASYQTQTNSPRRARSVASQSIIAYTMSLGAENSVAYSNNSIAIPTNFTISVTTEILPVSMTKTSVDCTMYICGDSTECSNLLLQYGSFCTQLNRALTGIAVEQDKNTQEVFAQVKQIYKTPPIKDFGGFNFSQILPDPSKPSKRSFIEDLLFNKVTLADAGFIKQYGDCLGDIAARDLICAQKFNGLTVLPPLLTDEMIAQYTSALLAGTITSGWTFGAGAALQIPFAMQMAYRFNGIGVTQNVLYENQKLIANQFNSAIGKIQDSLSSTASALGKLQDVVNQNAQALNTLVKCLSSNFGAISSVLNDILSRLDKVEAEVQIDRLITGRLQCLQTYVTQQLIRAAEIRASANLAATKMSECVLGQSKRVDFCGKGYHLMSFPQSAPHGVVFLHVTYVPAQEKNFTTAPAICHDGKAHFPREGVFVSNGTHWFVTQRNFYEPQIITTDNTFVSGNCDVVIGIVNNTVYDPLQPELDSGGGGSDIDPYKEFGSSYQLLNFLPLDFFPDLNALVDTATALYEEELTGREHCSPHHTAIRQALVCWDELTKLIAWMSSNITSEQVRTIIVNHVNDTWGLKVRQSLWFHLSCLTFGQHTVQEFLVSFGVWIRTPAPYRPPNAPILSTLPEHTVIC

SEQ ID NO: 11362 - protein, 1301 aa, Artificial Sequence
  SARS-CoV-2/Netherlands/ZuidHolland_2/2020__EPI_ISL_414556 spike protein (1-1147)(Q965C_S1003C) WhcAg construct
MFVFLVLLPLVSSQCVNLTTRTQLPPAYTNSFTRGVYYPDKVFRSSVLHSTQDLFLPFFSNVTWFHAIHVSGTNGTKRFDNPVLPFNDGVYFASTEKSNIIRGWIFGTTLDSKTQSLLIVNNATNVVIKVCEFQFCNDPFLGVYYHKNNKSWMESEFRVYSSANNCTFEYVSQPFLMDLEGKQGNFKNLREFVFKNIDGYFKIYSKHTPINLVRDLPQGFSALEPLVDLPIGINITRFQTLLALHRSYLTPGDSSSGWTAGAAAYYVGYLQPRTFLLKYNENGTITDAVDCALDPLSETKCTLKSFTVEKGIYQTSNFRVQPTESIVRFPNITNLCPFGEVFNATRFASVYAWNRKRISNCVADYSVLYNSASFSTFKCYGVSPTKLNDLCFTNVYADSFVIRGDEVRQIAPGQTGKIADYNYKLPDDFTGCVIAWNSNNLDSKVGGNYNYLYRLFRKSNLKPFERDISTEIYQAGSTPCNGVEGFNCYFPLQSYGFQPTNGVGYQPYRVVVLSFELLHAPATVCGPKKSTNLVKNKCVNFNFNGLTGTGVLTESNKKFLPFQQFGRDIADTTDAVRDPQTLEILDITPCSFGGVSVITPGTNTSNQVAVLYQGVNCTEVPVAIHADQLTPTWRVYSTGSNVFQTRAGCLIGAEHVNNSYECDIPIGAGICASYQTQTNSPRRARSVASQSIIAYTMSLGAENSVAYSNNSIAIPTNFTISVTTEILPVSMTKTSVDCTMYICGDSTECSNLLLQYGSFCTQLNRALTGIALEQDKNTQEVFAQVKQIYKTPPIKDFGGFNFSQILPDPSKPSKRSFIEDLLFNKVTLADAGFIKQYGDCLGDIAARDLICAQKFNGLTVLPPLLTDEMIAQYTSALLAGTITSGWTFGAGAALQIPFAMQMAYRFNGIGVTQNVLYENQKLIANQFNSAIGKIQDSLSSTASALGKLQDVVNQNAQALNTLVKCLSSNFGAISSVLNDILSRLDKVEAEVQIDRLITGRLQCLQTYVTQQLIRAAEIRASANLAATKMSECVLGQSKRVDFCGKGYHLMSFPQSAPHGVVFLHVTYVPAQEKNFTTAPAICHDGKAHFPREGVFVSNGTHWFVTQRNFYEPQIITTDNTFVSGNCDVVIGIVNNTVYDPLQPELDSGGGGSDIDPYKEFGSSYQLLNFLPLDFFPDLNALVDTATALYEEELTGREHCSPHHTAIRQALVCWDELTKLIAWMSSNITSEQVRTIIVNHVNDTWGLKVRQSLWFHLSCLTFGQHTVQEFLVSFGVWIRTPAPYRPPNAPILSTLPEHTVIC

SEQ ID NO: 11363 - protein, 1301 aa, Artificial Sequence
  SARS-CoV-2/USA/WA-UW31/2020__EPI_ISL_414618 spike protein (1-1147)(Q965C_S1003C) WhcAg construct
MFVFLVLLPLVSSQCVNLTTRTQLPPAYTNSFTRGVYYPDKVFRSSVLHSTQDLFLPFFSNVTWFHAIHVSGTNGTKRFDNPVLPFNDGVYFASTEKSNIIRGWIFGTTLDSKTQSLLIVNNATNVVIKVCEFQFCNDPFLGVYYHKNNKSWMESEFRVYSSANNCTFEYVSQPFLMDLEGKQGNFKNLREFVFKNIDGYFKIYSKHTPINLVRDLPQGFSALEPLVDLPIGINITRFQTLLALHRSYLTPGDSSSGWTAGAAAYYVGYLQPRTFLLKYNENGTITDAVDCALDPLSETKCTLKSFTVEKGIYQTSNFRVQPTESIVRFPNITNLCPFGEVFNATRFASVYAWNRKRISNCVADYSVLYNSASFSTFKCYGVSPTKLNDLCFTNVYADSFVIRGDEVRQIAPGQTGKIADYNYKLPDDFTGCVIAWNSNNLDSKVGGNYNYLYRLFRKSNLKPFERDISTEIYQAGSTPCNGAEGFNCYFPLQSYGFQPTNGVGYQPYRVVVLSFELLHAPATVCGPKKSTNLVKNKCVNFNFNGLTGTGVLTESNKKFLPFQQFGRDIADTTDAVRDPQTLEILDITPCSFGGVSVITPGTNTSNQVAVLYQDVNCTEVPVAIHADQLTPTWRVYSTGSNVFQTRAGCLIGAEHVNNSYECDIPIGAGICASYQTQTNSPRRARSVASQSIIAYTMSLGAENSVAYSNNSIAIPTNFTISVTTEILPVSMTKTSVDCTMYICGDSTECSNLLLQYGSFCTQLNRALTGIAVEQDKNTQEVFAQVKQIYKTPPIKDFGGFNFSQILPDPSKPSKRSFIEDLLFNKVTLADAGFIKQYGDCLGDIAARDLICAQKFNGLTVLPPLLTDEMIAQYTSALLAGTITSGWTFGAGAALQIPFAMQMAYRFNGIGVTQNVLYENQKLIANQFNSAIGKIQDSLSSTASALGKLQDVVNQNAQALNTLVKCLSSNFGAISSVLNDILSRLDKVEAEVQIDRLITGRLQCLQTYVTQQLIRAAEIRASANLAATKMSECVLGQSKRVDFCGKGYHLMSFPQSAPHGVVFLHVTYVPAQEKNFTTAPAICHDGKAHFPREGVFVSNGTHWFVTQRNFYEPQIITTDNTFVSGNCDVVIGIVNNTVYDPLQPELDSGGGGSDIDPYKEFGSSYQLLNFLPLDFFPDLNALVDTATALYEEELTGREHCSPHHTAIRQALVCWDELTKLIAWMSSNITSEQVRTIIVNHVNDTWGLKVRQSLWFHLSCLTFGQHTVQEFLVSFGVWIRTPAPYRPPNAPILSTLPEHTVIC

SEQ ID NO: 11364 - protein, 1301 aa, Artificial Sequence
  SARS-CoV-2/South Korea/SNU01/2020__EPI_ISL_411929 spike protein (1-1147)(Q965C_S1003C) WhcAg construct
MFVFLVLLPLVSSQCVNLTTRTQLPPAYTNSFTRGVYYPDKVFRSSVLHSTQDLFLPFFSNVTWFHAIHVSGTNGTKRFDNPVLPFNDGVYFASTEKSNIIRGWIFGTTLDSKTQSLLIVNNATNVVIKVCEFQFCNDPFLGVYYHKNNKSWMESEFRVYSSANNCTFEYVSQPFLMDLEGKQGNFKNLREFVFKNIDGYFKIYSKHTPINLVRDLPQGFWALEPLVDLPIGINITRFQTLLALHRSYLTPGDSSSGWTAGAAAYYVGYLQPRTFLLKYNENGTITDAVDCALDPLSETKCTLKSFTVEKGIYQTSNFRVQPTESIVRFPNITNLCPFGEVFNATRFASVYAWNRKRISNCVADYSVLYNSASFSTFKCYGVSPTKLNDLCFTNVYADSFVIRGDEVRQIAPGQTGKIADYNYKLPDDFTGCVIAWNSNNLDSKVGGNYNYLYRLFRKSNLKPFERDISTEIYQAGSTPCNGVEGFNCYFPLQSYGFQPTNGVGYQPYRVVVLSFELLHAPATVCGPKKSTNLVKNKCVNFNFNGLTGTGVLTESNKKFLPFQQFGRDIADTTDAVRDPQTLEILDITPCSFGGVSVITPGTNTSNQVAVLYQDVNCTEVPVAIHADQLTPTWRVYSTGSNVFQTRAGCLIGAEHVNNSYECDIPIGAGICASYQTQTNSPRRARSVASQSIIAYTMSLGAENSVAYSNNSIAIPTNFTISVTTEILPVSMTKTSVDCTMYICGDSTECSNLLLQYGSFCTQLNRALTGIAVEQDKNTQEVFAQVKQIYKTPPIKDFGGFNFSQILPDPSKPSKRSFIEDLLFNKVTLADAGFIKQYGDCLGDIAARDLICAQKFNGLTVLPPLLTDEMIAQYTSALLAGTITSGWTFGAGAALQIPFAMQMAYRFNGIGVTQNVLYENQKLIANQFNSAIGKIQDSLSSTASALGKLQDVVNQNAQALNTLVKCLSSNFGAISSVLNDILSRLDKVEAEVQIDRLITGRLQCLQTYVTQQLIRAAEIRASANLAATKMSECVLGQSKRVDFCGKGYHLMSFPQSAPHGVVFLHVTYVPAQEKNFTTAPAICHDGKAHFPREGVFVSNGTHWFVTQRNFYEPQIITTDNTFVSGNCDVVIGIVNNTVYDPLQPELDSGGGGSDIDPYKEFGSSYQLLNFLPLDFFPDLNALVDTATALYEEELTGREHCSPHHTAIRQALVCWDELTKLIAWMSSNITSEQVRTIIVNHVNDTWGLKVRQSLWFHLSCLTFGQHTVQEFLVSFGVWIRTPAPYRPPNAPILSTLPEHTVIC

SEQ ID NO: 11365 - protein, 1301 aa, Artificial Sequence
  SARS-CoV-2/China/WF0004/2020__EPI_ISL_413694 spike protein (1-1147)(Q965C_S1003C) WhcAg construct
MFVFLVLLPLVSSQCVNLTTRTQLPPAYTNSFTRGVYYPDKVFRSSVLHSTQDLFLPFFSNVTWFHAIHVSGTNGTKRFDNPVLPFNDGVYFASTEKSNIIRGWIFGTTLDSKTQSLLIVNNATNVVIKVCEFQFCNDPFLGVYYHKNNKSWTESEFRVYSSANNCTFEYVSQPFLMDLEGKQGNFKNLREFVFKNIDGYFKIYSKHTPINLVRDLPQGFSALEPLVDLPIGINITRFQTLLALHRSYLTPGDSSSGWTAGAAAYYVGYLQPRTFLLKYNENGTITDAVDCALDPLSETKCTLKSFTVEKGIYQTSNFRVQPTESIVRFPNITNLCPFGEVFNATRFASVYAWNRKRISNCVADYSVLYNSASFSTFKCYGVSPTKLNDLCFTNVYADSFVIRGDEVRQIAPGQTGKIADYNYKLPDDFTGCVIAWNSNNLDSKVGGNYNYLYRLFRKSNLKPFERDISTEIYQAGSTPCNGVEGFNCYFPLQSYGFQPTNGVGYQPYRVVVLSFELLHAPATVCGPKKSTNLVKNKCVNFNFNGLTGTGVLTESNKKFLPFQQFGRDIADTTDAVRDPQTLEILDITPCSFGGVSVITPGTNTSNQVAVLYQDVNCTEVPVAIHADQLTPTWRVYSTGSNVFQTRAGCLIGAEHVNNSYECDIPIGAGICASYQTQTNSPRRARSVASQSIIAYTMSLGAENSVAYSNNSIAIPTNFTISVTTEILPVSMTKTSVDCTMYICGDSTECSNLLLQYGSFCTQLNRALTGIAVEQDKNTQEVFAQVKQIYKTPPIKDFGGFNFSQILPDPSKPSKRSFIEDLLFNKVTLADAGFIKQYGDCLGDIAARDLICAQKFNGLTVLPPLLTDEMIAQYTSALLAGTITSGWTFGAGAALQIPFAMQMAYRFNGIGVTQNVLYENQKLIANQFNSAIGKIQDSLSSTASALGKLQDVVNQNAQALNTLVKCLSSNFGAISSVLNDILSRLDKVEAEVQIDRLITGRLQCLQTYVTQQLIRAAEIRASANLAATKMSECVLGQSKRFDFCGKGYHLMSFPQSAPHGVVFLHVTYVPAQEKNFTTAPAICHDGKAHFPREGVFVSNGTHWFVTQRNFYEPQIITTDNTFVSGNCDVVIGIVNNTVYDPLQPELDSGGGGSDIDPYKEFGSSYQLLNFLPLDFFPDLNALVDTATALYEEELTGREHCSPHHTAIRQALVCWDELTKLIAWMSSNITSEQVRTIIVNHVNDTWGLKVRQSLWFHLSCLTFGQHTVQEFLVSFGVWIRTPAPYRPPNAPILSTLPEHTVIC

SEQ ID NO: 11366 - protein, 1301 aa, Artificial Sequence
  SARS-CoV-2/China/WF0028/2020__EPI_ISL_413791 spike protein (1-1147)(Q965C_S1003C) WhcAg construct
MFVFLVLLPLVSSQCVNLTTRTQLPPAYTNSFTRGVYYPDKVFRSSVLHSTQDLFLPFFSNVTWFHAIHVSGTNGTKRFDNPVLPFNDGVYFASTEKSNIIRGWIFGTTLDSKTQSLLIVNNATNVVIKVCEFQFCNDPFLGVYYHKNNKSWMESEFRVYSSANNCTFEYVSQPFLMDLEGKQGNFKNLREFVFKNIDGYFKIYSKHTPINLVRDLPQGFSALEPLVDLPIGINITRFQTLLALHRSYLTPGDSSSGWTAGAAAYYVGYLQPRTFLLKYNENGTITDAVDCALDPLSETKCTLKSFTVEKGIYQTSNFRVQPTESIVRFPNITNLCPFGEVFNATRFASVYAWNRKRISNCVADYSVLYNSASFSTFKCYGVSPTKLNDLCFTNVYADSFVIRGDEVRQIAPGQTGKIADYNYKLPDDFTGCVIAWNSNNLDSKVGGNYNYLYRLFRKSNLKPFERDISTEIYQAGSTPCNGVEGFNCYFPLQSYGFQPTNGVGYQPYRVVVLSFELLHAPATVCGPKKSTNLVKNKCVNFNFNGLTGTGVLTESNKKFLPFQQFGRDIADTTDAVRDPQTLEILDITPCSFGGVSVITPGTNTSNQVAVLYQDVNCTEVPVAIHADQLTPTWRVYSTGSNVFQTRAGCLIGAEHVNNSYECDIPIGAGICASYQTQTNSPRRARSVASQSIIAYTMSLGAENSVAYSNNSIAIPTNFTISVTTEILPVSMTKTSVDCTMYICGDSTECSNLLLQYGSFCTQLNRALTGIAVEQDKNTQEVFAQVKQIYKTPPIKDFGGFNFSQILPDPSKPSKRSFIEDLLFNKVTLADAGFIKQYGDCLGDIAARDLICAQKFNGLTVLPPLLTDEMIAQYTSALLAGTITSGWTFGAGAALQIPFAMQMAYRFNGIGVTQNVLYENQKLIANQFNSAIGKIQDSLSSTASALGKLQDVVNQNAQALNTLVKCLSSNFGAISSVLNDILSRLDKVEAEVQIDRLITGRLQCLQTYVTQQLIRAAEIRASANLAATKMSECVLGQSKRVDFCGKGYHLMSFPQSAPHGVVFLHVTYVPAQEKNFTTAPAICHDGKAHFPREGVFVSNGTHWFVTQRNFYEPQIITTDNTFVSGNCDVVIGIVNNTVYDPLQPELESGGGGSDIDPYKEFGSSYQLLNFLPLDFFPDLNALVDTATALYEEELTGREHCSPHHTAIRQALVCWDELTKLIAWMSSNITSEQVRTIIVNHVNDTWGLKVRQSLWFHLSCLTFGQHTVQEFLVSFGVWIRTPAPYRPPNAPILSTLPEHTVIC

SEQ ID NO: 11367 - protein, 1301 aa, Artificial Sequence
  SARS-CoV-2/2019-nCoV/USA-CruiseA-18/2020__MT159716.1 spike protein (1-1147)(Q965C_S1003C) WhcAg construct
MFVFLVLLPLVSSQCVNLTTRTQLPPAYTNSFTRGVYYPDKVFRSSVLHSTQDLFLPFFSNVTWFHAIHVSGTNGTKRFDNPVLPFNDGVYFASTEKSNIIRGWIFGTTLDSKTQSLLIVNNATNVVIKVCEFQFCNDPFLGVYYHKNNKSWMESELRVYSSANNCTFEYVSQPFLMDLEGKQGNFKNLREFVFKNIDGYFKIYSKHTPINLVRDLPQGFSALEPLVDLPIGINITRFQTLLALHRSYLTPGDSSSGWTAGAAAYYVGYLQPRTFLLKYNENGTITDAVDCALDPLSETKCTLKSFTVEKGIYQTSNFRVQPTESIVRFPNITNLCPFGEVFNATRFASVYAWNRKRISNCVADYSVLYNSASFSTFKCYGVSPTKLNDLCFTNVYADSFVIRGDEVRQIAPGQTGKIADYNYKLPDDFTGCVIAWNSNNLDSKVGGNYNYLYRLFRKSNLKPFERDISTEIYQAGSTPCNGVEGFNCYFPLQSYGFQPTNGVGYQPYRVVVLSFELLHAPATVCGPKKSTNLVKNKCVNFNFNGLTGTGVLTESNKKFLPFQQFGRDIADTTDAVRDPQTLEILDITPCSFGGVSVITPGTNTSNQVAVLYQDVNCTEVPVAIHADQLTPTWRVYSTGSNVFQTRAGCLIGAEHVNNSYECDIPIGAGICASYQTQTNSPRRARSVASQSIIAYTMSLGAENSVAYSNNSIAIPTNFTISVTTEILPVSMTKTSVDCTMYICGDSTECSNLLLQYGSFCTQLNRALTGIAVEQDKNTQEVFAQVKQIYKTPPIKDFGGFNFSQILPDPSKPSKRSFIEDLLFNKVTLADAGFIKQYGDCLGDIAARDLICAQKFNGLTVLPPLLTDEMIAQYTSALLAGTITSGWTFGAGAALQIPFAMQMAYRFNGIGVTQNVLYENQKLIANQFNSAIGKIQDSLSSTASALGKLQDVVNQNAQALNTLVKCLSSNFGAISSVLNDILSRLDKVEAEVQIDRLITGRLQCLQTYVTQQLIRAAEIRASANLAATKMSECVLGQSKRVDFCGKGYHLMSFPQSAPHGVVFLHVTYVPAQEKNFTTAPAICHDGKAHFPREGVFVSNGTHWFVTQRNFYEPQIITTDNTFVSGNCDVVIGIVNNTVYDPLQPELDSGGGGSDIDPYKEFGSSYQLLNFLPLDFFPDLNALVDTATALYEEELTGREHCSPHHTAIRQALVCWDELTKLIAWMSSNITSEQVRTIIVNHVNDTWGLKVRQSLWFHLSCLTFGQHTVQEFLVSFGVWIRTPAPYRPPNAPILSTLPEHTVIC

SEQ ID NO: 11368 - protein, 1301 aa, Artificial Sequence
  SARS-CoV-2/SARS-CoV-2/Yunnan-01/human/2020/CHN__MT049951.1 spike protein (1-1147)(Q965C_S1003C) WhcAg construct
MFVFLVLLPLVSSQCVNLTTRTQLPPANTNSFTRGVYYPDKVFRSSVLHSTQDLFLPFFSNVTWFHAIHVSGTNGTKRFDNPVLPFNDGVYFASTEKSNIIRGWIFGTTLDSKTQSLLIVNNATNVVIKVCEFQFCNDPFLGVYYHKNNKSWMESEFRVYSSANNCTFEYVSQPFLMDLEGKQGNFKNLREFVFKNIDGYFKIYSKHTPINLVRDLPQGFSALEPLVDLPIGINITRFQTLLALHRSYLTPGDSSSGWTAGAAAYYVGYLQPRTFLLKYNENGTITDAVDCALDPLSETKCTLKSFTVEKGIYQTSNFRVQPTESIVRFPNITNLCPFGEVFNATRFASVYAWNRKRISNCVADYSVLYNSASFSTFKCYGVSPTKLNDLCFTNVYADSFVIRGDEVRQIAPGQTGKIADYNYKLPDDFTGCVIAWNSNNLDSKVGGNYNYLYRLFRKSNLKPFERDISTEIYQAGSTPCNGVEGFNCYFPLQSYGFQPTNGVGYQPYRVVVLSFELLHAPATVCGPKKSTNLVKNKCVNFNFNGLTGTGVLTESNKKFLPFQQFGRDIADTTDAVRDPQTLEILDITPCSFGGVSVITPGTNTSNQVAVLYQDVNCTEVPVAIHADQLTPTWRVYSTGSNVFQTRAGCLIGAEHVNNSYECDIPIGAGICASYQTQTNSPRRARSVASQSIIAYTMSLGAENSVAYSNNSIAIPTNFTISVTTEILPVSMTKTSVDCTMYICGDSTECSNLLLQYGSFCTQLNRALTGIAVEQDKNTQEVFAQVKQIYKTPPIKDFGGFNFSQILPDPSKPSKRSFIEDLLFNKVTLADAGFIKQYGDCLGDIAARDLICAQKFNGLTVLPPLLTDEMIAQYTSALLAGTITSGWTFGAGAALQIPFAMQMAYRFNGIGVTQNVLYENQKLIANQFNSAIGKIQDSLSSTASALGKLQDVVNQNAQALNTLVKCLSSNFGAISSVLNDILSRLDKVEAEVQIDRLITGRLQCLQTYVTQQLIRAAEIRASANLAATKMSECVLGQSKRVDFCGKGYHLMSFPQSAPHGVVFLHVTYVPAQEKNFTTAPAICHDGKAHFPREGVFVSNGTHWFVTQRNFYEPQIITTDNTFVSGNCDVVIGIVNNTVYDPLQPELDSGGGGSDIDPYKEFGSSYQLLNFLPLDFFPDLNALVDTATALYEEELTGREHCSPHHTAIRQALVCWDELTKLIAWMSSNITSEQVRTIIVNHVNDTWGLKVRQSLWFHLSCLTFGQHTVQEFLVSFGVWIRTPAPYRPPNAPILSTLPEHTVIC

SEQ ID NO: 11369 - protein, 1301 aa, Artificial Sequence
  SARS-CoV-2/USA/WA-UW292/2020__EPI_ISL_418077 spike protein (1-1147)(Q965C_S1003C) WhcAg construct
MFVFLVLLPLVSSQCVNLTTRTQLPPAYTNSFTRGVYYPDKVFRSSVLHSTQDLFLPFFSNVTWFHAIHVSGTNGTKRFDNPVLPFNDGVYFASTEKSNIIRGWIFGTTLDSKTQSLLIVNNATNVVIKVCEFQFCNDPFLGVYYHKNNKSWMESEFRVYSSANNCTFEYVSQPFLMDLEGKQGNFKNLREFVFKNIDGYFKIYSKHTPINLVRDLPQGFSALEPLVDLPIGINITRFQTLLALHRSYLTPGDSSSGWTAGAAAYYVGYLQPRTFLLKYNENGTITDAVDCALDPLSETKCTLKSFTVEKGIYQTSNFRVQPTESIVRFPNITNLCPFGEVFNATRFASVYAWNRKRISNCVADYSVLYNSASFSTFKCYGVSPTKLNDLCFTNVYADSFVIRGDEVRQIAPGQTGKIADYNYKLPDDFTGCVIAWNSNNLDSKVGGNYNYLYRLFRKSNLKPFERDISTEIYQASSTPCNGVEGFNCYFPLQSYGFQPTNGVGYQPYRVVVLSFELLHAPATVCGPKKSTNLVKNKCVNFNFNGLTGTGVLTESNKKFLPFQQFGRDIADTTDAVRDPQTLEILDITPCSFGGVSVITPGTNTSNQVAVLYQDVNCTEVPVAIHADQLTPTWRVYSTGSNVFQTRAGCLIGAEHVNNSYECDIPIGAGICASYQTQTNSPRRARSVASQSIIAYTMSLGAENSVAYSNNSIAIPTNFTISVTTEILPVSMTKTSVDCTMYICGDSTECSNLLLQYGSFCTQLNRALTGIAVEQDKNTQEVFAQVKQIYKTPPIKDFGGFNFSQILPDPSKPSKRSFIEDLLFNKVTLADAGFIKQYGDCLGDIAARDLICAQKFNGLTVLPPLLTDEMIAQYTSALLAGTITSGWTFGAGAALQIPFAMQMAYRFNGIGVTQNVLYENQKLIANQFNSAIGKIQDSLSSTASALGKLQDVVNQNAQALNTLVKCLSSNFGAISSVLNDILSRLDKVEAEVQIDRLITGRLQCLQTYVTQQLIRAAEIRASANLAATKMSECVLGQSKRVDFCGKGYHLMSFPQSAPHGVVFLHVTYVPAQEKNFTTAPAICHDGKAHFPREGVFVSNGTHWFVTQRNFYEPQIITTDNTFVSGNCDVVIGIVNNTVYDPLQPELDSGGGGSDIDPYKEFGSSYQLLNFLPLDFFPDLNALVDTATALYEEELTGREHCSPHHTAIRQALVCWDELTKLIAWMSSNITSEQVRTIIVNHVNDTWGLKVRQSLWFHLSCLTFGQHTVQEFLVSFGVWIRTPAPYRPPNAPILSTLPEHTVIC

SEQ ID NO: 11370 - protein, 1301 aa, Artificial Sequence
  SARS-CoV-2/Iceland/192/2020__EPI_ISL_417819 spike protein (1-1147)(Q965C_S1003C) WhcAg construct
MFVFFVLLPLVSSQCVNLTTRTQLPPAYTNSFTRGVYYPDKVFRSSVLHSTQDLFLPFFSNVTWFHAIHVSGTNGTKRFDNPVLPFNDGVYFASTEKSNIIRGWIFGTTLDSKTQSLLIVNNATNVVIKVCEFQFCNDPFLGVYYHKNNKSWMESEFRVYSSANNCTFEYVSQPFLMDLEGKQGNFKNLREFVFKNIDGYFKIYSKHTPINLVRDLPQGFSALEPLVDLPIGINITRFQTLLALHRSYLTPGDSSSGWTAGAAAYYVGYLQPRTFLLKYNENGTITDAVDCALDPLSETKCTLKSFTVEKGIYQTSNFRVQPTESIVRFPNITNLCPFGEVFNATRFASVYAWNRKRISNCVADYSVLYNSASFSTFKCYGVSPTKLNDLCFTNVYADSFVIRGDEVRQIAPGQTGKIADYNYKLPDDFTGCVIAWNSNNLDSKVGGNYNYLYRLFRKSNLKPFERDISTEIYQAGSTPCNGVEGFNCYFPLQSYGFQPTNGVGYQPYRVVVLSFELLHAPATVCGPKKSTNLVKNKCVNFNFNGLTGTGVLTESNKKFLPFQQFGRDIADTTDAVRDPQTLEILDITPCSFGGVSVITPGTNTSNQVAVLYQGVNCTEVPVAIHADQLTPTWRVYSTGSNVFQTRAGCLIGAEHVNNSYECDIPIGAGICASYQTQTNSPRRARSVASQSIIAYTMSLGAENSVAYSNNSIAIPTNFTISVTTEILPVSMTKTSVDCTMYICGDSTECSNLLLQYGSFCTQLNRALTGIAVEQDKNTQEVFAQVKQIYKTPPIKDFGGFNFSQILPDPSKPSKRSFIEDLLFNKVTLADAGFIKQYGDCLGDIAARDLICAQKFNGLTVLPPLLTDEMIAQYTSALLAGTITSGWTFGAGAALQIPFAMQMAYRFNGIGVTQNVLYENQKLIANQFNSAIGKIQDSLSSTASALGKLQDVVNQNAQALNTLVKCLSSNFGAISSVLNDILSRLDKVEAEVQIDRLITGRLQCLQTYVTQQLIRAAEIRASANLAATKMSECVLGQSKRVDFCGKGYHLMSFPQSAPHGVVFLHVTYVPAQEKNFTTAPAICHDGKAHFPREGVFVSNGTHWFVTQRNFYEPQIITTDNTFVSGNCDVVIGIVNNTVYDPLQPELDSGGGGSDIDPYKEFGSSYQLLNFLPLDFFPDLNALVDTATALYEEELTGREHCSPHHTAIRQALVCWDELTKLIAWMSSNITSEQVRTIIVNHVNDTWGLKVRQSLWFHLSCLTFGQHTVQEFLVSFGVWIRTPAPYRPPNAPILSTLPEHTVIC

SEQ ID NO: 11371 - protein, 1301 aa, Artificial Sequence
  SARS-CoV-2/Belgium/ULG-6939/2020__EPI_ISL_417020 spike protein (1-1147)(Q965C_S1003C) WhcAg construct
MFVFLVLLPLVSSQCVNLTTRTQLPPAYTNSFTRGVYYPDKVFRSSVLHSTQDLFLPFFSNVTWFHAIHVSGTNGTKRFDNPVLPFNDGVYFASTEKSNIIRGWIFGTTLDSKTQSLLIVNNATNVVIKVCEFQFCNDPFLGVYYHKNNKSWMESEFRVYSSANNCTFEYVSQPFLMDLEGKQGNFKNLREFVFKNIDGYFKIYSKHTPINLVRDLPQGFSALEPLVDLPIGINITRFQTLLALHRSYLTPGDSSSGWTAGAAAYYVGYLQPRTFLLKYNENGTITDAVDCALDPLSETKCTLKSFTVEKGIYQTSNFRVQPTESIVRFPNITNLCPFGEVFNATRFASVYAWNRKRISNCVADYSVLYNSASFSTFKCYGVSPTKLNDLCFTNVYADSFVIRGDEVRQIAPGQTGKIADYNYKLPDDFTGCVIAWNSNNLDSKVGGNYNYLYRLFRKSNLKPFERDISTEIYQAGSTPCNGVEGFNCYFPLQSYGFQPTNGVGYQPYRVVVLSFELLHAPATVCGPKKSTNLVKNKCVNFNFNGLTGTGVLTESNKKFLPFQQFGRDIADTTDAVRDPQTLEILDITPCSFGGVSVITPGTNTSNQVAVLYQGVNCTEVPVAIHADQLTPTWRVYSTGSNVFQTRAGCLIGAEHVNNSYECDIPIGAGICASYQTQTNSPRRARSVASQSIIAYTMSLGAENSVVYSNNSIAIPTNFTISVTTEILPVSMTKTSVDCTMYICGDSTECSNLLLQYGSFCTQLNRALTGIAVEQDKNTQEVFAQVKQIYKTPPIKDFGGFNFSQILPDPSKPSKRSFIEDLLFNKVTLADAGFIKQYGDCLGDIAARDLICAQKFNGLTVLPPLLTDEMIAQYTSALLAGTITSGWTFGAGAALQIPFAMQMAYRFNGIGVTQNVLYENQKLIANQFNSAIGKIQDSLSSTASALGKLQDVVNQNAQALNTLVKCLSSNFGAISSVLNDILSRLDKVEAEVQIDRLITGRLQCLQTYVTQQLIRAAEIRASANLAATKMSECVLGQSKRVDFCGKGYHLMSFPQSAPHGVVFLHVTYVPAQEKNFTTAPAICHDGKAHFPREGVFVSNGTHWFVTQRNFYEPQIITTDNTFVSGNCDVVIGIVNNTVYDPLQPELDSGGGGSDIDPYKEFGSSYQLLNFLPLDFFPDLNALVDTATALYEEELTGREHCSPHHTAIRQALVCWDELTKLIAWMSSNITSEQVRTIIVNHVNDTWGLKVRQSLWFHLSCLTFGQHTVQEFLVSFGVWIRTPAPYRPPNAPILSTLPEHTVIC

SEQ ID NO: 11372 - protein, 1301 aa, Artificial Sequence
  SARS-CoV-2/France/HF2496/2020__EPI_ISL_418231 spike protein (1-1147)(Q965C_S1003C) WhcAg construct
MFVFLVLLPLVSSQCVNLTTRTQLPPAYTNSFTRGVYYPDKVFRSSVLHSTQDLFLPFFSNVTWFHAIHVSGTNGTKRFDNPVLPFNDGVYFASTEKSNIIRGWIFGTTLDSKTQSLLIVNNATNVVIKVCEFQFCNDPFLGVYYHKNNKSWMESEFRVYSSANNCTFEYVSQPFLMDLEGKQGNFKNLREFVFKNIDGYFKIYSKHTPINLVRDLPQGFSALEPLVDLPIGINITRFQTLLALHRSYLTPGDSSSGWTAGAAAYYVGYLQPRTFLLKYNENGTITDAVDCALDPLSETKCTLKSFTVEKGIYQTSNFRVQPTESIVRFPNITNLCPFGEVFNATRFASVYAWNRKRISNCVADYSVLYNSASFSTFKCYGVSPTKLNDLCFTNVYADSFVIRGDEVRQIAPGQTGKIADYNYKLPDDFTGCVIAWNSNNLDSKVGGNYNYLYRLFRKSNLKPFERDISTEIYQAGSTPCNGVEGFNCYFPLQSYGFQPTNGVGYQPYRVVVLSFELLHAPATVCGPKKSTNLVKNKCVNFNFNGLTGTGVLTESNKKFLPFQQFGRDIADTTDAVRDPQTLEILDITPCSFGGVSVITPGTNTSNQVAVLYQGVNCTEVPVAIHADQLTPTWRVYSTGSNVFQTRAGCLIGAEHVNNSYECDIPIGAGICASYQTQTNSPRRARSVASQSIIAYTMSLGAENSVAYSNNSIAIPTNFTISVTTEILPVSMTKTSVDCTMYICGDSTECSNLLLQYGSFCTQLNRALTGIAVEQDKNTQEVFAQVKQIYKTPPIKDFGGFNFSQILPDPSKPSKRSFIEDLLFNKVTLADAGFIKQYGDCLGDIVARDLICAQKFNGLTVLPPLLTDEMIAQYTSALLAGTITSGWTFGAGAALQIPFAMQMAYRFNGIGVTQNVLYENQKLIANQFNSAIGKIQDSLSSTASALGKLQDVVNQNAQALNTLVKCLSSNFGAISSVLNDILSRLDKVEAEVQIDRLITGRLQCLQTYVTQQLIRAAEIRASANLAATKMSECVLGQSKRVDFCGKGYHLMSFPQSAPHGVVFLHVTYVPAQEKNFTTAPAICHDGKAHFPREGVFVSNGTHWFVTQRNFYEPQIITTDNTFVSGNCDVVIGIVNNTVYDPLQPELDSGGGGSDIDPYKEFGSSYQLLNFLPLDFFPDLNALVDTATALYEEELTGREHCSPHHTAIRQALVCWDELTKLIAWMSSNITSEQVRTIIVNHVNDTWGLKVRQSLWFHLSCLTFGQHTVQEFLVSFGVWIRTPAPYRPPNAPILSTLPEHTVIC

SEQ ID NO: 11373 - protein, 1301 aa, Artificial Sequence
  SARS-CoV-2/USA/WA-UW291/2020__EPI_ISL_418076 spike protein (1-1147)(Q965C_S1003C) WhcAg construct
MFVFLVLLPLVSSQCVNLTTRTQLPPAYTNSFTRGVYYPDKVFRSSVLHSTQDLFLPFFSNVTWFHAIHVSGTNGTKRFDNPVLPFNDGVYFASTEKSNIIRGWIFGTTLDSKTQSLLIVNNATNVVIKVCEFQFCNDPFLGVYYHKNNKSWMESEFRVYSSANNCTFEYVSQPFLMDLEGKQGNFKNLREFVFKNIDGYFKIYSKHTPINLVRDLPQGFSALEPLVDLPIGINITRFQTLLALHRSYLTPGDSSSGWTAGAAAYYVGYLQPRTFLLKYNENGTITDAVDCALDPLSETKCTLKSFTVEKGIYQTSNFRVQPTESIVRFPNITNLCPFGEVFNATRFASVYAWNRKRISNCVADYSVLYNSASFSTFKCYGVSPTKLNDLCFTNVYADSFVIRGDEVRQIAPGQTGKIADYNYKLPDDFTGCVIAWNSNNLDSKVGGNYNYLYRLFRKSNLKPFERDISTEIYQAGSTPCNGVEGFNCYFPLQSYGFQPTNGVGYQPYRVVVLSFELLHAPATVCGPKKSTNLVKNKCVNFNFNGLTGTGVLTESNKKFLPFQQFGRDIADTTDAVRDPQTLEILDITPCSFGGVSVITPGTNTSNQVAVLYQGVNCTEVPVAIHADQLTPTWRVYSTGSNVFQTRAGCLIGAEHVNNSYECDIPIGAGICASYQTQTNSPRRARSVASQSIIAYTMSLGAENSVAYSNNSIAIPTNFTISVTTEILPVSMTKTSVDCTMYICGDSTECSNLLLQYGSFCTQLNRALTGIAVEQDKNTQEVFAQVKQIYKTPPIKDFGGFNFSQILPDPSKPSKRSFIEDLLFNKVTLADAGFIKQYGDCLGDIAARDLICAQKFNGLTVLPPLLTDEMIAQYTSALLAGTITSGWTFGAGAALQIPFAMQMAYRFNGIGVTQNVLYENQKLIANQFNSAIGKIQYSLSSTASALGKLQDVVNQNAQALNTLVKCLSSNFGAISSVLNDILSRLDKVEAEVQIDRLITGRLQCLQTYVTQQLIRAAEIRASANLAATKMSECVLGQSKRVDFCGKGYHLMSFPQSAPHGVVFLHVTYVPAQEKNFTTAPAICHDGKAHFPREGVFVSNGTHWFVTQRNFYEPQIITTDNTFVSGNCDVVIGIVNNTVYDPLQPELDSGGGGSDIDPYKEFGSSYQLLNFLPLDFFPDLNALVDTATALYEEELTGREHCSPHHTAIRQALVCWDELTKLIAWMSSNITSEQVRTIIVNHVNDTWGLKVRQSLWFHLSCLTFGQHTVQEFLVSFGVWIRTPAPYRPPNAPILSTLPEHTVIC

SEQ ID NO: 11374 - protein, 1301 aa, Artificial Sequence; identical to SEQ ID NO: 11337
  SARS-CoV-2/Portugal/PT0034/2020__EPI_ISL_418019 spike protein (1-1147)(Q965C_S1003C) WhcAg construct

SEQ ID NO: 11375 - protein, 1301 aa, Artificial Sequence; identical to SEQ ID NO: 11329
  SARS-CoV-2/Iceland/202/2020__EPI_ISL_417750 spike protein (1-1147)(Q965C_S1003C) WhcAg construct

SEQ ID NO: 11376 - protein, 1301 aa, Artificial Sequence
  SARS-CoV-2/USA/WA-UW261/2020__EPI_ISL_418046 spike protein (1-1147)(Q965C_S1003C) WhcAg construct
MFVFLVLLPLVSSQCVNLTTRTQLPPAYTNSFTRGVYYPDKVFRSSVLHSTQDLFLPFFSNVTWFHAIHVSGTNGTKRFDNPVLPFNDGVYFASTEKSNIIRGWIFGTTLDSKTQSLLIVNNATNVVIKVCEFQFCNDPFLGVYYHKNNKSWMESEFRVYSSANNCTFEYVSQPFLMDLEGKQGNFKNLREFVFKNIDGYFKIYSKHTPINLVRDLPQGFSALEPLVDLPIGINITRFQTLLALHRSYLTPGDSSSGWTAGAAAYYVGYLQPRTFLLKYNENGTITDAVDCALDPLSETKCTLKSFTVEKGIYQTSNFRVQPTESIVRFPNITNLCPFGEVFNATRFTSVYAWNRKRISNCVADYSVLYNSASFSTFKCYGVSPTKLNDLCFTNVYADSFVIRGDEVRQIAPGQTGKIADYNYKLPDDFTGCVIAWNSNNLDSKVGGNYNYLYRLFRKSNLKPFERDISTEIYQAGSTPCNGVEGFNCYFPLQSYGFQPTNGVGYQPYRVVVLSFELLHAPATVCGPKKSTNLVKNKCVNFNFNGLTGTGVLTESNKKFLPFQQFGRDIADTTDAVRDPQTLEILDITPCSFGGVSVITPGTNTSNQVAVLYQDVNCTEVPVAIHADQLTPTWRVYSTGSNVFQTRAGCLIGAEHVNNSYECDIPIGAGICASYQTQTNSPRRARSVASQSIIAYTMSLGAENSVAYSNNSIAIPTNFTISVTTEILPVSMTKTSVDCTMYICGDSTECSNLLLQYGSFCTQLNRALTGIAVEQDKNTQEVFAQVKQIYKTPPIKDFGGFNFSQILPDPSKPSKRSFIEDLLFNKVTLADAGFIKQYGDCLGDIAARDLICAQKFNGLTVLPPLLTDEMIAQYTSALLAGTITSGWTFGAGAALQIPFAMQMAYRFNGIGVTQNVLYENQKLIANQFNSAIGKIQDSLSSTASALGKLQDVVNQNAQALNTLVKCLSSNFGAISSVLNDILSRLDKVEAEVQIDRLITGRLQCLQTYVTQQLIRAAEIRASANLAATKMSECVLGQSKRVDFCGKGYHLMSFPQSAPHGVVFLHVTYVPAQEKNFTTAPAICHDGKAHFPREGVFVSNGTHWFVTQRNFYEPQIITTDNTFVSGNCDVVIGIVNNTVYDPLQPELDSGGGGSDIDPYKEFGSSYQLLNFLPLDFFPDLNALVDTATALYEEELTGREHCSPHHTAIRQALVCWDELTKLIAWMSSNITSEQVRTIIVNHVNDTWGLKVRQSLWFHLSCLTFGQHTVQEFLVSFGVWIRTPAPYRPPNAPILSTLPEHTVIC

SEQ ID NO: 11377 - protein, 1301 aa, Artificial Sequence
  SARS-CoV-2/Portugal/PT0035/2020__EPI_ISL_418020 spike protein (1-1147)(Q965C_S1003C) WhcAg construct
MFVFLVLLPLVSSQCVNLTTRTQLPPAYTNSFTRGVYYPDKVFRSSVLHSTQDLFLPFFSNVTWFHAIHVSGTNGTKRFDNPVLPFNDGVYFASTEKSNIIRGWIFGTTLDSKTQSLLIVNNATNVVIKVCEFQFCNDPFLGVYYHKNNKSWMESEFRVYSSANNCTFEYVSQPFLMDLEGKQGNFKNLREFVFKNIDGYFKIYSKHTPINLVRDLPQGFSALEPLVDLPIGINITRFQTLLALHRSYLTPGDSSSGWTAGAAAYYVGYLQPRTFLLKYNENGTITDAVDCALDPLSETKCTLKSFTVEKGIYQTSNFRVQPTESIVRFPNITNLCPFGEVFNATRFASVYAWNRKRISNCVADYSVLYNSASFSTFKCYGVSPTKLNDLCFTNVYADSFVIRGDEVRQIAPGQTGKIADYNYKLPDDFTGCVIAWNSNNLDSKVGGNYNYLYRLFRKSNLKPFERDISTEIYQAGSTPCNGVEGFNCYFPLQSYGFQPTNGVGYQPYRVVVLSFELLHAPATVCGPKKSTNLVKNKCVNFNFNGLTGTGVLTESNKKFLPFQQFGRDIADTTDAVRDPQTLEILDITPCSFGGVSVITPGTNTSNQVAVLYQDVNCTEVPVAIHADQLTPTWRVYSTGSNVFQTRAGCLIGAEHVNNSYECDIPIGAGICASYQTQTNSPRRARSVASQSIIAYTMSLGAENSVAYSNNSIAIPTNFTISVTTEILPVSMTKTSVDCTMYICGDSTECSNLLLQYGSFCTQLNRALTGIAVEQDKNTQEVFAQVKQIYKTPPIKDFGGFNFSQILPDPSKPSKRSFIEDLLFNKVTLADAGFIKQYGDCLGDISARDLICAQKFNGLTVLPPLLTDEMIAQYTSALLAGTITSGWTFGAGAALQIPFAMQMAYRFNGIGVTQNVLYENQKLIANQFNSAIGKIQDSLSSTASALGKLQDVVNQNAQALNTLVKCLSSNFGAISSVLNDILSRLDKVEAEVQIDRLITGRLQCLQTYVTQQLIRAAEIRASANLAATKMSECVLGQSKRVDFCGKGYHLMSFPQSAPHGVVFLHVTYVPAQEKNFTTAPAICHDGKAHFPREGVFVSNGTHWFVTQRNFYEPQIITTDNTFVSGNCDVVIGIVNNTVYDPLQPELDSGGGGSDIDPYKEFGSSYQLLNFLPLDFFPDLNALVDTATALYEEELTGREHCSPHHTAIRQALVCWDELTKLIAWMSSNITSEQVRTIIVNHVNDTWGLKVRQSLWFHLSCLTFGQHTVQEFLVSFGVWIRTPAPYRPPNAPILSTLPEHTVIC

SEQ ID NO: 11378 - protein, 1301 aa, Artificial Sequence
  SARS-CoV-2/USA/NY-NYUMC7/2020__EPI_ISL_418192 spike protein (1-1147)(Q965C_S1003C) WhcAg construct
MFVFLVLLPLVSSQCVNLTTRTQLPPAYTNSFTRGVYYPDKVFRSSVLHSTQDLFLPFFSNVTWFHAIHVSGTNGTKRFDNPVLPFNDGVYFASTEKSNIIRGWIFGTTLDSKTQSLLIVNNATNVVIKVCEFQFCNDPFLGVYHHKNNKSWMESEFRVYSSANNCTFEYVSQPFLMDLEGKQGNFKNLREFVFKNIDGYFKIYSKHTPINLVRDLPQGFSALEPLVDLPIGINITRFQTLLALHRSYLTPGDSSSGWTAGAAAYYVGYLQPRTFLLKYNENGTITDAVDCALDPLSETKCTLKSFTVEKGIYQTSNFRVQPTESIVRFPNITNLCPFGEVFNATRFASVYAWNRKRISNCVADYSVLYNSASFSTFKCYGVSPTKLNDLCFTNVYADSFVIRGDEVRQIAPGQTGKIADYNYKLPDDFTGCVIAWNSNNLDSKVGGNYNYLYRLFRKSNLKPFERDISTEIYQAGSTPCNGVEGFNCYFPLQSYGFQPTNGVGYQPYRVVVLSFELLHAPATVCGPKKSTNLVKNKCVNFNFNGLTGTGVLTESNKKFLPFQQFGRDIADTTDAVRDPQTLEILDITPCSFGGVSVITPGTNTSNQVAVLYQGVNCTEVPVAIHADQLTPTWRVYSTGSNVFQTRAGCLIGAEHVNNSYECDIPIGAGICASYQTQTNSPRRARSVASQSIIAYTMSLGAENSVAYSNNSIAIPTNFTISVTTEILPVSMTKTSVDCTMYICGDSTECSNLLLQYGSFCTQLNRALTGIAVEQDKNTQEVFAQVKQIYKTPPIKDFGGFNFSQILPDPSKPSKRSFIEDLLFNKVTLADAGFIKQYGDCLGDIAARDLICAQKFNGLTVLPPLLTDEMIAQYTSALLAGTITSGWTFGAGAALQIPFAMQMAYRFNGIGVTQNVLYENQKLIANQFNSAIGKIQDSLSSTASALGKLQDVVNQNAQALNTLVKCLSSNFGAISSVLNDILSRLDKVEAEVQIDRLITGRLQCLQTYVTQQLIRAAEIRASANLAATKMSECVLGQSKRVDFCGKGYHLMSFPQSAPHGVVFLHVTYVPAQEKNFTTAPAICHDGKAHFPREGVFVSNGTHWFVTQRNFYEPQIITTDNTFVSGNCDVVIGIVNNTVYDPLQPELDSGGGGSDIDPYKEFGSSYQLLNFLPLDFFPDLNALVDTATALYEEELTGREHCSPHHTAIRQALVCWDELTKLIAWMSSNITSEQVRTIIVNHVNDTWGLKVRQSLWFHLSCLTFGQHTVQEFLVSFGVWIRTPAPYRPPNAPILSTLPEHTVIC

SEQ ID NO: 11379 - protein, 1301 aa, Artificial Sequence
  SARS-CoV-2/Iceland/189/2020__EPI_ISL_417709 spike protein (1-1147)(Q965C_S1003C) WhcAg construct
MFVFLVLLPLVSSQCVNLTTRTQLPPAYTNSFTRGVYYPDKVFRSSVLHSTQDLFLPFFSNVTWFHAIHVSGTNGTKRFDNPVLPFNDGVYFASTEKSNIIRGWIFGTTLDSKTQSLLIVNNATNVVIKVCEFQFCNDPFLGVYYHKNNKSWMESEFRVYSSANNCTFEYVSQPFLMDLEGKQGNFKNLREFVFKNIDGYFKIYSKHTPINLVRDLPQGFSALEPLVDLPIGINITRFQTLLALHRSYLTPGDSSSGWTAGAAAYYVGYLQPRTFLLKYNENGTITDAVDCALDPLSETKCTLKSFTVEKGIYQTSNFRVQPTESIVRFPNITNLCPFGEVFNATRFASVYAWNRKRISNCVADYSVLYNSASFSTFKCYGVSPTKLNDLCFTNVYADSFVIRGDEVRQIAPGQTGKIADYNYKLPDDFTGCVIAWNSNNLDSKVGGNYNYLYRLFRKSNLKPFERDISTEIYQAGSTPCNGVEGFNCYFPLQSYGFQPTNGVGYQPYRVVVLSFELLHAPATVCGPKKSTNLVKNKCVNFNFNGLTGTGVLTESNKKFLPFQQFGRDIADTTDAVRDPQTLEILDITPCSFGGVSVITPGTNTSNQVAVLYQGVNCTEVPVAIHADQLTPTWRVYSTGSNVFQTRAGCLIGAEHVNNSYECDIPIGAGICASYQTQTNSPRRARSVASQSIIAYTMSLGAENSVAYSNNSIAIPTNFTISVTTEILPVSMTKTSVDCTMYICGDSTECSNLLLQYGSFCTQLNRALTGIAVEQDKNTQEVFAQVKQIYKTPPIKDFGGFNFSQILPDPSKPSKRSFIEDLLFNKVTLADAGFTKQYGDCLGDIAARDLICAQKFNGLTVLPPLLTDEMIAQYTSALLAGTITSGWTFGAGAALQIPFAMQMAYRFNGIGVTQNVLYENQKLIANQFNSAIGKIQDSLSSTASALGKLQDVVNQNAQALNTLVKCLSSNFGAISSVLNDILSRLDKVEAEVQIDRLITGRLQCLQTYVTQQLIRAAEIRASANLAATKMSECVLGQSKRVDFCGKGYHLMSFPQSAPHGVVFLHVTYVPAQEKNFTTAPAICHDGKAHFPREGVFVSNGTHWFVTQRNFYEPQIITTDNTFVSGNCDVVIGIVNNTVYDPLQPELDSGGGGSDIDPYKEFGSSYQLLNFLPLDFFPDLNALVDTATALYEEELTGREHCSPHHTAIRQALVCWDELTKLIAWMSSNITSEQVRTIIVNHVNDTWGLKVRQSLWFHLSCLTFGQHTVQEFLVSFGVWIRTPAPYRPPNAPILSTLPEHTVIC

SEQ ID NO: 11380 - protein, 1301 aa, Artificial Sequence
  SARS-CoV-2/Australia/NSW56/2020__EPI_ISL_417408 spike protein (1-1147)(Q965C_S1003C) WhcAg construct
MFVFLVLLPLVSSQCVNLTTRTQLPPAYTNSFTRGVYYPDKVFRSSVLHSTQDLFLPFFSNVTWFHAIHVSGTNGTKRFDNPVLPFNDGVYFASTEKSNIIRGWIFGTTLDSKTQSLLIVNNATNVVIKVCEFQFCNDPFLGVYYHKNNKSWMESEFRVYSSANNCTFEYVSQPFLMDLEGKQGNFKNLREFVFKNIDGYFKIYSKHTPINLVRDLPQGFSALEPLVDLPIGINITRFQTLLALHRSYLTPGDSSSGWTAGAAAYYVGYLQPRTFLLKYNENGTITDAVDCALDPLSETKCTLKSFTVEKGIYQTSNFRVQPTESIVRFPNITNLCPFGEVFNATRFASVYAWNRKRISNCVADYSVLYNSASFSTFKCYGVSPTKLNDLCFTNVYADSFVIRGDEVRQIAPGQTGKIADYNYKLPDDFTGCVIAWNSNNLDSKVGGNYNYLYRLFRKSNLKPFERDISTEIYQAGSTPCNGVEGFNCYFPLQSYGFQPTNGVGYQPYRVVVLSFELLHAPATVCGPKKSTNLVKNKCVNFNFNGLTGTGVLTESNKKFLPFQQFGRDIADTTDAVRDPQTLEILDITPCSFGGVSVITPGTNTSNQVAVLYQDVNCTEVPVAIHADQLTPTWRVYSTGSNVFQTRAGCLIGAEHVNNSYECDIPIGAGICASYQTQTNSPRRARSVASQSIIAYTMSLGAENSVAYSNNSIAIPTNFTISVTTEILPVSMTKTSVDCTMYICGDSTECSNLLLQYGSFCTQLNRALTGIAVEQDKNTQEVFAQVKQIYKTPPIKDFGGFNFSQILPDSSKPSKRSFIEDLLFNKVTLADAGFIKQYGDCLGDIAARDLICAQKFNGLTVLPPLLTDEMIAQYTSALLAGTITSGWTFGAGAALQIPFAMQMAYRFNGIGVTQNVLYENQKLIANQFNSAIGKIQDSLSSTASALGKLQDVVNQNAQALNTLVKCLSSNFGAISSVLNDILSRLDKVEAEVQIDRLITGRLQCLQTYVTQQLIRAAEIRASANLAATKMSECVLGQSKRVDFCGKGYHLMSFPQSAPHGVVFLHVTYVPAQEKNFTTAPAICHDGKAHFPREGVFVSNGTHWFVTQRNFYEPQIITTDNTFVSGNCDVVIGIVNNTVYDPLQPELDSGGGGSDIDPYKEFGSSYQLLNFLPLDFFPDLNALVDTATALYEEELTGREHCSPHHTAIRQALVCWDELTKLIAWMSSNITSEQVRTIIVNHVNDTWGLKVRQSLWFHLSCLTFGQHTVQEFLVSFGVWIRTPAPYRPPNAPILSTLPEHTVIC

SEQ ID NO: 11381 - protein, 1301 aa, Artificial Sequence
  SARS-CoV-2/Iceland/280/2020__EPI_ISL_417608 spike protein (1-1147)(Q965C_S1003C) WhcAg construct
MFVFLVLLPLVSSQCVNLTTRTQLPPAYTNSFTRGVYYPDKVFRSSVLHSTQDLFLPFFSNVTWFHAIHVSGTNGTKRFDNPVLPFNDGVYFASTEKSNIIRGWIFGTTLDSKTQSLLIVNNATNVVIKVCEFQFCNDPFLGVYYHKNNKSWMESEFRVYSSANNCTFEYVSQPFLMDLEGKQGNFKNLREFVFKNIDGYFKIYSKHTPINLVRDLPQGFSALEPLVDLPIGINITRFQTLLALHRSYLTPGDSSSGWTAGAAAYYVGYLQPRTFLLKYNENGTITDAVDCALDPLSETKCTLKSFTVEKGIYQTSNFRVQPTESIVRFPNITNLCPFGEVFNATRFASVYAWNRKRISNCVADYSVLYNSASFSTFKCYGVSPTKLNDLCFTNVYADSFVIRGDEVRQIAPGQTGKIADYNYKLPDDFTGCVIAWNSNNLDSKVGGNYNYLYRLFRKSNLKPFERDISTEIYQAGSTPCNGVEGFNCYFPLQSYGFQPTNGVGYQPYRVVVLSFELLHAPATVCGPKKSTNLVKNKCVNFNFNGLTGTGVLTESNKKFLPFQQFGRDIADTTDAVRDPQTLEILDITPCSFGGVSVITPGTNTSNQVAVLYQGVNCTEVPVAIHADQLTPTWRVYSTGSNVFQTRAGCLIGAEHVNNSYECDIPIGAGICASYHTQTNSPRRARSVASQSIIAYTMSLGAENSVAYSNNSIAIPTNFTISVTTEILPVSMTKTSVDCTMYICGDSTECSNLLLQYGSFCTQLNRALTGIAVEQDKNTQEVFAQVKQIYKTPPIKDFGGFNFSQILPDPSKPSKRSFIEDLLFNKVTLADAGFIKQYGDCLGDIAARDLICAQKFNGLTVLPPLLTDEMIAQYTSALLAGTITSGWTFGAGAALQIPFAMQMAYRFNGIGVTQNVLYENQKLIANQFNSAIGKIQDSLSSTASALGKLQDVVNQNAQALNTLVKCLSSNFGAISSVLNDILSRLDKVEAEVQIDRLITGRLQCLQTYVTQQLIRAAEIRASANLAATKMSECVLGQSKRVDFCGKGYHLMSFPQSAPHGVVFLHVTYVPAQEKNFTTAPAICHDGKAHFPREGVFVSNGTHWFVTQRNFYEPQIITTDNTFVSGNCDVVIGIVNNTVYDPLQPELDSGGGGSDIDPYKEFGSSYQLLNFLPLDFFPDLNALVDTATALYEEELTGREHCSPHHTAIRQALVCWDELTKLIAWMSSNITSEQVRTIIVNHVNDTWGLKVRQSLWFHLSCLTFGQHTVQEFLVSFGVWIRTPAPYRPPNAPILSTLPEHTVIC

SEQ ID NO: 11382 - protein, 1301 aa, Artificial Sequence; identical to SEQ ID NO: 11337
  SARS-CoV-2/Iceland/247/2020__EPI_ISL_417575 spike protein (1-1147)(Q965C_S1003C) WhcAg construct

SEQ ID NO: 11383 - protein, 1301 aa, Artificial Sequence
  SARS-CoV-2/Iceland/238/2020__EPI_ISL_417566 spike protein (1-1147)(Q965C_S1003C) WhcAg construct
MFVFLVLLPLVSSQCVNLTTRTQLPPAYTNSFTRGVYYPDKVFRSSVLHSTQDLFLPFFSNVTWFHAIHVSGTNGTKRFDNPVLPFNDGVYFASTEKSNIIRGWIFGTTLDSKTQSLLIVNNATNVVIKVCEFQFCNDPFLGVYYHKNNKSWMESEFRVYSSANNCTFEYVSQPFLMDLEGKQGNFKNLREFVFKNIDGYFKIYSKHTPINLVRDLPQGFSALEPLVDLPIGINITRFQTLLALHRSYLTPGDSSSGWTAGAAAYYVGYLQPRTFLLKYNENGTITDAVDCALDPLSETKCTLKSFTVEKGIYQTSNFRVQPTESIVRFPNITNLCPFGEVFNATRFASVYAWNRKRISNCVADYSVLYNSASFSTFKCYGVSPTKLNDLCFTNVYADSFVIRGDEVRQIAPGQTGKIADYNYKLPDDFTGCVIAWNSNNLDSKVGGNYNYLYRLFRKSNLKPFERDISTEIYQAGSTPCNGVEGFNCYFPLQSYGFQPTNGVGYQPYRVVVLSFELLHAPATVCGPKKSTNLVKNKCVNFNFNGLTGTGVLTESNKKFLPFQQFGRDIADTTDAVRDPQTLEILDITPCSFGGVSVITPGTNTSNQVAVLYQGVNCTEVPVAIHADQLTPTWRVYSTGSNVFQTRAGCLIGAEHVNNSYECDIPIGAGICASYQTQTNSPRRARSVASQSIIAYTMSLGAENSVAYSNNSIAIPTNFTISVTTEILPVSMTKTSVDCTMYICGDSTECSNLLLQYGSFCTQLNRALTGIAVEQDKNTQEVFAQVKQIYKTPPIKDFGGFNFSQILPDPSKPSKRSFIEDLLFNKVTLADVGFIKQYGDCLGDIAARDLICAQKFNGLTVLPPLLTDEMIAQYTSALLAGTITSGWTFGAGAALQIPFAMQMAYRFNGIGVTQNVLYENQKLIANQFNSAIGKIQDSLSSTASALGKLQDVVNQNAQALNTLVKCLSSNFGAISSVLNDILSRLDKVEAEVQIDRLITGRLQCLQTYVTQQLIRAAEIRASANLAATKMSECVLGQSKRVDFCGKGYHLMSFPQSAPHGVVFLHVTYVPAQEKNFTTAPAICHDGKAHFPREGVFVSNGTHWFVTQRNFYEPQIITTDNTFVSGNCDVVIGIVNNTVYDPLQPELDSGGGGSDIDPYKEFGSSYQLLNFLPLDFFPDLNALVDTATALYEEELTGREHCSPHHTAIRQALVCWDELTKLIAWMSSNITSEQVRTIIVNHVNDTWGLKVRQSLWFHLSCLTFGQHTVQEFLVSFGVWIRTPAPYRPPNAPILSTLPEHTVIC

SEQ ID NO: 11384 - protein, 1301 aa, Artificial Sequence
  SARS-CoV-2/Greece/16/2020__EPI_ISL_418265 spike protein (1-1147)(Q965C_S1003C) WhcAg construct
MFVFLVLLPLVSSQCVNLTTRTQLPPAYTNSFTRGVYYPDKVFRSSVLHSTQDLFLPFFSNVTWFHAIHVSGTNGTKRFDNPVLPFNDGVYFASTEKSNIIRGWIFGTTLDSKTQSLLIVNNATNVVIKVCEFQFCNDPFLGVYYHKNNKSWMESEFRVYSSANNCTFEYVSQPFLMDLEGKQGNFKNLREFVFKNVDGYFKIYSKHTPINLVRDLPQGFSALEPLVDLPIGINITRFQTLLALHRSYLTPGDSSSGWTAGAAAYYVGYLQPRTFLLKYNENGTITDAVDCALDPLSETKCTLKSFTVEKGIYQTSNFRVQPTESIVRFPNITNLCPFGEVFNATRFASVYAWNRKRISNCVADYSVLYNSASFSTFKCYGVSPTKLNDLCFTNVYADSFVIRGDEVRQIAPGQTGKIADYNYKLPDDFTGCVIAWNSNNLDSKVGGNYNYLYRLFRKSNLKPFERDISTEIYQAGSTPCNGVEGFNCYFPLQSYGFQPTNGVGYQPYRVVVLSFELLHAPATVCGPKKSTNLVKNKCVNFNFNGLTGTGVLTESNKKFLPFQQFGRDIADTTDAVRDPQTLEILDITPCSFGGVSVITPGTNTSNQVAVLYQDVNCTEVPVAIHADQLTPTWRVYSTGSNVFQTRAGCLIGAEHVNNSYECDIPIGAGICASYQTQTNSPRRARSVASQSIIAYTMSLGAENSVAYSNNSIAIPTNFTISVTTEILPVSMTKTSVDCTMYICGDSTECSNLLLQYGSFCTQLNRALTGIAVEQDKNTQEVFAQVKQIYKTPPIKDFGGFNFSQILPDPSKPSKRSFIEDLLFNKVTLADAGFIKQYGDCLGDIAARDLICAQKFNGLTVLPPLLTDEMIAQYTSALLAGTITSGWTFGAGAALQIPFAMQMAYRFNGIGVTQNVLYENQKLIANQFNSAIGKIQDSLSSTASALGKLQDVVNQNAQALNTLVKCLSSNFGAISSVLNDILSRLDKVEAEVQIDRLITGRLQCLQTYVTQQLIRAAEIRASANLAATKMSECVLGQSKRVDFCGKGYHLMSFPQSAPHGVVFLHVTYVPAQEKNFTTAPAICHDGKAHFPREGVFVSNGTHWFVTQRNFYEPQIITTDNTFVSGNCDVVIGIVNNTVYDPLQPELDSGGGGSDIDPYKEFGSSYQLLNFLPLDFFPDLNALVDTATALYEEELTGREHCSPHHTAIRQALVCWDELTKLIAWMSSNITSEQVRTIIVNHVNDTWGLKVRQSLWFHLSCLTFGQHTVQEFLVSFGVWIRTPAPYRPPNAPILSTLPEHTVIC

SEQ ID NO: 11385 - protein, 1301 aa, Artificial Sequence
  SARS-CoV-2/Iceland/319/2020__EPI_ISL_417648 spike protein (1-1147)(Q965C_S1003C) WhcAg construct
MFVFLVLLPLVSSQCVNLTTRTQLPPAYTNSFTRGVYYPDKVFRSSVLHSTQDLFLPFFSNVTWFHAIHVSGTNGTKRFDNPVLPFNDGVYFASTEKSNIIRGWIFGTTLDSKTQSLLIVNNATNVVIKVCEFQFCNDPFLGVYYHKNNKSWMESEFRVYSSANNCTFEYVSQPFLIDLEGKQGNFKNLREFVFKNIDGYFKIYSKHTPINLVRDLPQGFSALEPLVDLPIGINITRFQTLLALHRSYLTPGDSSSGWTAGAAAYYVGYLQPRTFLLKYNENGTITDAVDCALDPLSETKCTLKSFTVEKGIYQTSNFRVQPTESIVRFPNITNLCPFGEVFNATRFASVYAWNRKRISNCVADYSVLYNSASFSTFKCYGVSPTKLNDLCFTNVYADSFVIRGDEVRQIAPGQTGKIADYNYKLPDDFTGCVIAWNSNNLDSKVGGNYNYLYRLFRKSNLKPFERDISTEIYQAGSTPCNGVEGFNCYFPLQSYGFQPTNGVGYQPYRVVVLSFELLHAPATVCGPKKSTNLVKNKCVNFNFNGLTGTGVLTESNKKFLPFQQFGRDIADTTDAVRDPQTLEILDITPCSFGGVSVITPGTNTSNQVAVLYQGVNCTEVPVAIHADQLTPTWRVYSTGSNVFQTRAGCLIGAEHVNNSYECDIPIGAGICASYQTQTNSPRRARSVASQSIIAYTMSLGAENSVAYSNNSIAIPTNFTISVTTEILPVSMTKTSVDCTMYICGDSTECSNLLLQYGSFCTQLNRALTGIAVEQDKNTQEVFAQVKQIYKTPPIKDFGGFNFSQILPDPSKPSKRSFIEDLLFNKVTLADAGFIKQYGDCLGDIAARDLICAQKFNGLTVLPPLLTDEMIAQYTSALLAGTITSGWTFGAGAALQIPFAMQMAYRFNGIGVTQNVLYENQKLIANQFNSAIGKIQDSLSSTASALGKLQDVVNQNAQALNTLVKCLSSNFGAISSVLNDILSRLDKVEAEVQIDRLITGRLQCLQTYVTQQLIRAAEIRASANLAATKMSECVLGQSKRVDFCGKGYHLMSFPQSAPHGVVFLHVTYVPAQEKNFTTAPAICHDGKAHFPREGVFVSNGTHWFVTQRNFYEPQIITTDNTFVSGNCDVVIGIVNNTVYDPLQPELDSGGGGSDIDPYKEFGSSYQLLNFLPLDFFPDLNALVDTATALYEEELTGREHCSPHHTAIRQALVCWDELTKLIAWMSSNITSEQVRTIIVNHVNDTWGLKVRQSLWFHLSCLTFGQHTVQEFLVSFGVWIRTPAPYRPPNAPILSTLPEHTVIC

SEQ ID NO: 11386 - protein, 1301 aa, Artificial Sequence
  SARS-CoV-2/Congo/94/2020__EPI_ISL_417947 spike protein (1-1147)(Q965C_S1003C) WhcAg construct
MFVFLVLLPLVSSQCVNLTTRTQLPPAYTNSFTRGVYYPDKVFRSSVLHSTQDLFLPFFSNVTWFHAIHVSGTNGTKRFDNPVLPFNDGVYFASTEKSNIIRGWIFGTTLDSKTQSLLIVNNATNVVIKVCEFQFCNDPFLGVYYHKNNKSWMESEFRVYSSANNCTFEYVSQPFLMDLEGKQGNFKNLREFVFKNIDGYFKIYSKHTPINLVRDLPQGFSALEPLVDLPIGINITRFQTLLALHRSYLTPGDSSSGWTAGAAAYYVGYLQPRTFLLKYNENGTITDAVDCALDPLSETKCTLKSFTVEKGIYQTSNFRVQPTESIVRFPNITNLCPFGEVFNATRFASVYAWNRKRISNCVADYSVLYNSASFSTFKCYGVSPTKLNDLCFTNVYADSFVIRGDEVRQIAPGQTGKIADYNYKLPDDFTGCVIAWNSNNLDSKVGGNYNYLYRLFRKSNLKPFERDISTEIYQAGSTPCNGVEGFNCYFPLQSYGFQPTNGVGYQPYRVVVLSFELLHAPATVCGPKKSTNLVKNKCVNFNFNGLTGTGVLTESNKKFLPFQQFGRDIADTTDAVRDPQTLEILDITPCSFGGVSVITPGTNTSNQVAVLYQGVNCTEVPVAIHADQLTPTWRVYSTGSNVFQTRAGCLIGAEHVNNSYECDIPIGAGICASYQTQTNSPRRARSVASQSIIAYTMSLGAENSVAYSNNSIAIPTNFTISVTTEILPVSMTKTSVDCTMYICGDSTECSNLLLQYGSFCTQLNRALTGIAVEQDKNTQEVFAQVKQIYKTPPIKDFGGFNFSQILPDPSKPSKRSFIEDILFNKVTLADAGFIKQYGDCLGDIAARDLICAQKFNGLTVLPPLLTDEMIAQYTSALLAGTITSGWTFGAGAALQIPFAMQMAYRFNGIGVTQNVLYENQKLIANQFNSAIGKIQDSLSSTASALGKLQDVVNQNAQALNTLVKCLSSNFGAISSVLNDILSRLDKVEAEVQIDRLITGRLQCLQTYVTQQLIRAAEIRASANLAATKMSECVLGQSKRVDFCGKGYHLMSFPQSAPHGVVFLHVTYVPAQEKNFTTAPAICHDGKAHFPREGVFVSNGTHWFVTQRNFYEPQIITTDNTFVSGNCDVVIGIVNNTVYDPLQPELDSGGGGSDIDPYKEFGSSYQLLNFLPLDFFPDLNALVDTATALYEEELTGREHCSPHHTAIRQALVCWDELTKLIAWMSSNITSEQVRTIIVNHVNDTWGLKVRQSLWFHLSCLTFGQHTVQEFLVSFGVWIRTPAPYRPPNAPILSTLPEHTVIC

SEQ ID NO: 11387 - protein, 1301 aa, Artificial Sequence
  SARS-CoV-2/Congo/158/2020__EPI_ISL_417950 spike protein (1-1147)(Q965C_S1003C) WhcAg construct
MFVFLVLLPLVSSQCVNLTTRTQLPPAYTNSFTRGVYYPDKVFRSSVLHSTQDLFLPFFSNVTWFHAIHVSGTNGTKRFDNPVLPFNDGVYFASTEKSNIIRGWIFGTTLDSKTQSLLIVNNATNVVIKVCEFQFCNDPFLGVYYHKNNKSWMESEFRVYSSANNCTFEYVSQPFLMDLEGKQGNFKNLREFVFKNIDGYFKIYSKHTPINLVRDLPQGFSALEPLVDLPIGINITRFQTLLALHRSYLTPGDSSSGWTAGAAAYYVGYLQPRTFLLKYNENGTITDAVDCALDPLSETKCTLKSFTVEKGIYQTSNFRVQPTESIVRFPNITNLCPFGEVFNATRFASVYAWNRKRISNCVADYSVLYNSASFSTFKCYGVSPTKLNDLCFTNVYADSFVIRGDEVRQIAPGQTGKIADYNYKLPDDFTGCVIAWNSNNLDSKVGGNYNYLYRLFRKSNLKPFERDISTEIYQAGSTPCNGVEGFNCYFPLQSYGFQPTNGVGYQPYRVVVLSFELLHAPATVCGPKKSTNLVKNKCVNFNFNGLTGTGVLTESNKKFLPFQQFGRDIADTTDAVRDPQTLEILDITPCSFGGVSVITPGTNTSNQVAVLYQDVNCTEVPVAIHADQLTPTWRVYSTGSNVFQTRAGCLIGAEHVNNSYECDIPIGAGICASYQTQTNSPRRARSVASQSIIAYTMSLGAENSVAYSNNSIAIPTNFTISVTTEILPVSMTKTSVDCTMYICGDSTECSNLLLQYGSFCTQLNRALTGIAVEQDKNTQEVFAQVKQIYKTPPIKDFGGFNFSQILPDPSKPSKRSFIEDLLFNKVTLADAGFIKQYGDCLGDIAARDLICAQKFNGLTVLPPLLTDEMIAQYTSALLAGTITSGWTFGAGAALQIPFAMQMAYRFNGIGVTQNVLYENQKLIANQFNSAIGKIQDSLSSTASALGKLQDVVNQNAQALNTLVKCLSSNFGAISSVLNDILSRLDKVEAEVQIDRLITGRLQCLQTYVTQQLIRAAEIRASANLAATKMSECVLGQSKRVDFCGKGYHLMSFPQSAPHGVVFLHVTYVPAQEKNFTTAPAICHDGKAHFPREGVFVSNGTHWFVTQRNFYEPQIITTDNTFLSGNCDVVIGIVNNTVYDPLQPELDSGGGGSDIDPYKEFGSSYQLLNFLPLDFFPDLNALVDTATALYEEELTGREHCSPHHTAIRQALVCWDELTKLIAWMSSNITSEQVRTIIVNHVNDTWGLKVRQSLWFHLSCLTFGQHTVQEFLVSFGVWIRTPAPYRPPNAPILSTLPEHTVIC

SEQ ID NO: 11388 - protein, 1301 aa, Artificial Sequence
  SARS-CoV-2/USA/UT-00034/2020__EPI_ISL_417977 spike protein (1-1147)(Q965C_S1003C) WhcAg construct
MFVFLVLLPLVSSQCVNLTTRTQLPPAYTNSFTRGVYYPDKVFRSSVLHSTQDLFLPFFSNVTWFHAIHVSGTNGTKRFDNPVLPFNDGVYFASTEKSNIIRGWIFGTTLDSKTQSLLIVNNATNVVIKVCEFQFCNDPFLGVYYYKNNKSWMESEFRVYSSANNCTFEYVSQPFLMDLEGKQGNFKNLREFVFKNIDGYFKIYSKHTPINLVRDLPQGFSALEPLVDLPIGINITRFQTLLALHRSYLTPGDSSSGWTAGAAAYYVGYLQPRTFLLKYNENGTITDAVDCALDPLSETKCTLKSFTVEKGIYQTSNFRVQPTESIVRFPNITNLCPFGEVFNATRFASVYAWNRKRISNCVADYSVLYNSASFSTFKCYGVSPTKLNDLCFTNVYADSFVIRGDEVRQIAPGQTGKIADYNYKLPDDFTGCVIAWNSNNLDSKVGGNYNYLYRLFRKSNLKPFERDISTEIYQAGSTPCNGVEGFNCYFPLQSYGFQPTNGVGYQPYRVVVLSFELLHAPATVCGPKKSTNLVKNKCVNFNFNGLTGTGVLTESNKKFLPFQQFGRDIADTTDAVRDPQTLEILDITPCSFGGVSVITPGTNTSNQVAVLYQGVNCTEVPVAIHADQLTPTWRVYSTGSNVFQTRAGCLIGAEHVNNSYECDIPIGAGICASYQTQTNSPRRARSVASQSIIAYTMSLGAENSVAYSNNSIAIPTNFTISVTTEILPVSMTKTSVDCTMYICGDSTECSNLLLQYGSFCTQLNRALTGIAVEQDKNTQEVFAQVKQIYKTPPIKDFGGFNFSQILPDPSKPSKRSFIEDLLFNKVTLADAGFIKQYGDCLGDIAARDLICAQKFNGLTVLPPLLTDEMIAQYTSALLAGTITSGWTFGAGAALQIPFAMQMAYRFNGIGVTQNVLYENQKLIANQFNSAIGKIQDSLSSTASALGKLQDVVNQNAQALNTLVKCLSSNFGAISSVLNDILSRLDKVEAEVQIDRLITGRLQCLQTYVTQQLIRAAEIRASANLAATKMSECVLGQSKRVDFCGKGYHLMSFPQSAPHGVVFLHVTYVPAQEKNFTTAPAICHDGKAHFPREGVFVSNGTHWFVTQRNFYEPQIITTDNTFVSGNCDVVIGIVNNTVYDPLQPELDSGGGGSDIDPYKEFGSSYQLLNFLPLDFFPDLNALVDTATALYEEELTGREHCSPHHTAIRQALVCWDELTKLIAWMSSNITSEQVRTIIVNHVNDTWGLKVRQSLWFHLSCLTFGQHTVQEFLVSFGVWIRTPAPYRPPNAPILSTLPEHTVIC

SEQ ID NO: 11389 - protein, 1301 aa, Artificial Sequence
  SARS-CoV-2/USA/UT-00033/2020__EPI_ISL_417976 spike protein (1-1147)(Q965C_S1003C) WhcAg construct
MFVFLVLLPLVSSQCVNLTTRTQLPPAYTNSFTRGVYYPDKVFRSSVLHSTQDLFLPFFSNVTWFHAIHVSGTNGTKRFDNPVLPFNDGVYFASTEKSNIIRGWIFGTTLDSKTQSLLIVNNATNVVIKVCEFQFCNDPFLGVYYHKNNKSWMESEFRVYSSANNCTFEYVSQPFLMDLEGKQGNFKNLREFVFKNIDGYFKIYSKHTPINLVRDLPQGFSALEPLVDLPIGINITRFQTLLALHRSYLTPGDSSSGLTAGAAAYYVGYLQPRTFLLKYNENGTITDAVDCALDPLSETKCTLKSFTVEKGIYQTSNFRVQPTESIVRFPNITNLCPFGEVFNATRFASVYAWNRKRISNCVADYSVLYNSASFSTFKCYGVSPTKLNDLCFTNVYADSFVIRGDEVRQIAPGQTGKIADYNYKLPDDFTGCVIAWNSNNLDSKVGGNYNYLYRLFRKSNLKPFERDISTEIYQAGSTPCNGVEGFNCYFPLQSYGFQPTNGVGYQPYRVVVLSFELLHAPATVCGPKKSTNLVKNKCVNFNFNGLTGTGVLTESNKKFLPFQQFGRDIADTTDAVRDPQTLEILDITPCSFGGVSVITPGTNTSNQVAVLYQGVNCTEVPVAIHADQLTPTWRVYSTGSNVFQTRAGCLIGAEHVNNSYECDIPIGAGICASYQTQTNSPRRARSVASQSIIAYTMSLGAENSVAYSNNSIAIPTNFTISVTTEILPVSMTKTSVDCTMYICGDSTECSNLLLQYGSFCTQLNRALTGIAVEQDKNTQEVFAQVKQIYKTPPIKDFGGFNFSQILPDPSKPSKRSFIEDLLFNKVTLADAGFIKQYGDCLGDIAARDLICAQKFNGLTVLPPLLTDEMIAQYTSALLAGTITSGWTFGAGAALQIPFAMQMAYRFNGIGVTQNVLYENQKLIANQFNSAIGKIQDSLSSTASALGKLQDVVNQNAQALNTLVKCLSSNFGAISSVLNDILSRLDKVEAEVQIDRLITGRLQCLQTYVTQQLIRAAEIRASANLAATKMSECVLGQSKRVDFCGKGYHLMSFPQSAPHGVVFLHVTYVPAQEKNFTTAPAICHDGKAHFPREGVFVSNGTHWFVTQRNFYEPQIITTDNTFVSGNCDVVIGIVNNTVYDPLQPELDSGGGGSDIDPYKEFGSSYQLLNFLPLDFFPDLNALVDTATALYEEELTGREHCSPHHTAIRQALVCWDELTKLIAWMSSNITSEQVRTIIVNHVNDTWGLKVRQSLWFHLSCLTFGQHTVQEFLVSFGVWIRTPAPYRPPNAPILSTLPEHTVIC

SEQ ID NO: 11390 - protein, 1301 aa, Artificial Sequence
  SARS-CoV-2/USA/WI-13/2020__EPI_ISL_417516 spike protein (1-1147)(Q965C_S1003C) WhcAg construct
MFVFLVLLPLVSSQCVNLTTRTQLPPAYTNSFTRGVYYPDKVFRSSVLHSTQDLFLPFFSNVTWFHAIHVSGTNGTKRFDNPVLPFNDGVYFASTEKSNIIRGWIFGTTLDSKTQSLLIVNNATNVVIKVCEFQFCNDPFLGVYYHKNNKSWMESEFRVYSSANNCTFEYVSQPFLMDLEGKQGNFKNLREFVFKNIDGYFKIYSKHTPINLVRDLPQGFSALEPLVDLPIGINITRFQTLLALHRSYLTPGDSSSGWTAGAAAYYVGYLQPRTFLLKYNENGTITDAVDCALDPLSETKCTLKSFTVEKGIYQTSNFRVLPTESIVRFPNITNLCPFGEVFNATRFASVYAWNRKRISNCVADYSVLYNSASFSTFKCYGVSPTKLNDLCFTNVYADSFVIRGDEVRQIAPGQTGKIADYNYKLPDDFTGCVIAWNSNNLDSKVGGNYNYLYRLFRKSNLKPFERDISTEIYQAGSTPCNGVEGFNCYFPLQSYGFQPTNGVGYQPYRVVVLSFELLHAPATVCGPKKSTNLVKNKCVNFNFNGLTGTGVLTESNKKFLPFQQFGRDIADTTDAVRDPQTLEILDITPCSFGGVSVITPGTNTSNQVAVLYQGVNCTEVPVAIHADQLTPTWRVYSTGSNVFQTRAGCLIGAEHVNNSYECDIPIGAGICASYQTQTNSPRRARSVASQSIIAYTMSLGAENSVAYSNNSIAIPTNFTISVTTEILPVSMTKTSVDCTMYICGDSTECSNLLLQYGSFCTQLNRALTGIAVEQDKNTQEVFAQVKQIYKTPPIKDFGGFNFSQILPDPSKPSKRSFIEDLLFNKVTLADAGFIKQYGDCLGDIAARDLICAQKFNGLTVLPPLLTDEMIAQYTSALLAGTITSGWTFGAGAALQIPFAMQMAYRFNGIGVTQNVLYENQKLIANQFNSAIGKIQDSLSSTASALGKLQDVVNQNAQALNTLVKCLSSNFGAISSVLNDILSRLDKVEAEVQIDRLITGRLQCLQTYVTQQLIRAAEIRASANLAATKMSECVLGQSKRVDFCGKGYHLMSFPQSAPHGVVFLHVTYVPAQEKNFTTAPAICHDGKAHFPREGVFVSNGTHWFVTQRNFYEPQIITTDNTFVSGNCDVVIGIVNNTVYDPLQPELDSGGGGSDIDPYKEFGSSYQLLNFLPLDFFPDLNALVDTATALYEEELTGREHCSPHHTAIRQALVCWDELTKLIAWMSSNITSEQVRTIIVNHVNDTWGLKVRQSLWFHLSCLTFGQHTVQEFLVSFGVWIRTPAPYRPPNAPILSTLPEHTVIC

SEQ ID NO: 11391 - protein, 1300 aa, Artificial Sequence
  SARS-CoV-2/India/1-27/2020__EPI_ISL_413522 spike protein (1-1146)(Q964C_S1002C) WhcAg construct
MFVFLVLLPLVSSQCVNLTTRTQLPPAYTNSFTRGVYYPDKVFRSSVLHSTQDLFLPFFSNVTWFHAIHVSGTNGTKRFDNPVLPFNDGVYFASTEKSNIIRGWIFGTTLDSKTQSLLIVNNATNVVIKVCEFQFCNDPFLGVYHKNNKSWMESEFRVYSSANNCTFEYVSQPFLMDLEGKQGNFKNLREFVFKNIDGYFKIYSKHTPINLVRDLPQGFSALEPLVDLPIGINITRFQTLLALHRSYLTPGDSSSGWTAGAAAYYVGYLQPRTFLLKYNENGTITDAVDCALDPLSETKCTLKSFTVEKGIYQTSNFRVQPTESIVRFPNITNLCPFGEVFNATRFASVYAWNRKRISNCVADYSVLYNSASFSTFKCYGVSPTKLNDLCFTNVYADSFVIRGDEVIQIAPGQTGKIADYNYKLPDDFTGCVIAWNSNNLDSKVGGNYNYLYRLFRKSNLKPFERDISTEIYQAGSTPCNGVEGFNCYFPLQSYGFQPTNGVGYQPYRVVVLSFELLHAPATVCGPKKSTNLVKNKCVNFNFNGLTGTGVLTESNKKFLPFQQFGRDIADTTDAVRDPQTLEILDITPCSFGGVSVITPGTNTSNQVAVLYQDVNCTEVPVAIHADQLTPTWRVYSTGSNVFQTRAGCLIGAEHVNNSYECDIPIGAGICASYQTQTNSPRRARSVASQSIIAYTMSLGAENSVAYSNNSIAIPTNFTISVTTEILPVSMTKTSVDCTMYICGDSTECSNLLLQYGSFCTQLNRALTGIAVEQDKNTQEVFAQVKQIYKTPPIKDFGGFNFSQILPDPSKPSKRSFIEDLLFNKVTLADAGFIKQYGDCLGDIAARDLICAQKFNGLTVLPPLLTDEMIAQYTSALLAGTITSGWTFGAGAALQIPFAMQMAYRFNGIGVTQNVLYENQKLIANQFNSAIGKIQDSLSSTASALGKLQDVVNQNAQALNTLVKCLSSNFGAISSVLNDILSRLDKVEAEVQIDRLITGRLQCLQTYVTQQLIRAAEIRASANLAATKMSECVLGQSKRVDFCGKGYHLMSFPQSAPHGVVFLHVTYVPAQEKNFTTAPAICHDGKAHFPREGVFVSNGTHWFVTQRNFYEPQIITTDNTFVSGNCDVVIGIVNNTVYDPLQPELDSGGGGSDIDPYKEFGSSYQLLNFLPLDFFPDLNALVDTATALYEEELTGREHCSPHHTAIRQALVCWDELTKLIAWMSSNITSEQVRTIIVNHVNDTWGLKVRQSLWFHLSCLTFGQHTVQEFLVSFGVWIRTPAPYRPPNAPILSTLPEHTVIC

SEQ ID NO: 11392 - protein, 1295 aa, Artificial Sequence
  SARS-CoV-2/pangolin/Guangxi/P4L/2017__EPI_ISL_410538 spike protein (1-1141)(Q959C_S997C) WhcAg construct
MFVFLFVLPLVSSQCVNLTTRTGIPPGYTNSSTRGVYYPDKVFRSSILHLTQDLFLPFFSNVTWFNTINYQGGFKKFDNPVLPFNDGVYFASTEKSNIIRGWIFGTTLDARTQSLLIVNNATNVVIKVCEFQFCTDPFLGVYYHNNNKTWVENEFRVYSSANNCTFEYISQPFLMDLEGKQGNFKNLREFVFKNVDGYFKIYSKHTPIDLVRDLPRGFAALEPLVDLPIGINITRFQTLLALHRSYLTPGNLESGWTTGAAAYYVGYLQQRTFLLSYNQNGTITDAVDCSLDPLSETKCTLKSLTVEKGIYQTSNFRVQPTISIVRFPNITNLCPFGEVFNASKFASVYAWNRKRISNCVADYSVLYNSTSFSTFKCYGVSPTKLNDLCFTNVYADSFVVKGDEVRQIAPGQTGVIADYNYKLPDDFTGCVIAWNSVKQDALTGGNYGYLYRLFRKSKLKPFERDISTEIYQAGSTPCNGQVGLNCYYPLERYGFHPTTGVNYQPFRVVVLSFELLNGPATVCGPKLSTTLVKDKCVNFNFNGLTGTGVLTTSKKQFLPFQQFGRDISDTTDAVRDPQTLEILDITPCSFGGVSVITPGTNTSNQVAVLYQDVNCTEVPMAIHAEQLTPAWRVYSAGANVFQTRAGCLVGAEHVNNSYECDIPVGAGICASYHSMSSLRSVNQRSIIAYTMSLGAENSVAYSNNSIAIPTNFTISVTTEILPVSMTKTSVDCTMYICGDSIECSNLLLQYGSFCTQLNRALTGIAVEQDKNTQEVFAQVKQIYKTPPIKDFGGFNFSQILPDPSKPSKRSFIEDLLFNKVTLADAGFIKQYGDCLGDIAARDLICAQKFNGLTVLPPLLTDEMIAQYTSALLAGTITSGWTFGAGAALQIPFAMQMAYRFNGIGVTQNVLYENQKLIANQFNSAIGKIQDSLSSTASALGKLQDVVNQNAQALNTLVKCLSSNFGAISSVLNDILSRLDKVEAEVQIDRLITGRLQCLQTYVTQQLIRAAEIRASANLAATKMSECVLGQSKRVDFCGKGYHLMSFPQSAPHGVVFLHVTYVPAQEKNFTTAPAICHEGKAHFPREGVFVSNGTHWFITQRNFYEPQIITTDNTFVSGSCDVVIGIVNNTVYDPLQPELDSGGGGSDIDPYKEFGSSYQLLNFLPLDFFPDLNALVDTATALYEEELTGREHCSPHHTAIRQALVCWDELTKLIAWMSSNITSEQVRTIIVNHVNDTWGLKVRQSLWFHLSCLTFGQHTVQEFLVSFGVWIRTPAPYRPPNAPILSTLPEHTVIC

SEQ ID NO: 11393 - protein, 1295 aa, Artificial Sequence
  SARS-CoV-2/pangolin/Guangxi/P5L/2017__EPI_ISL_410540 spike protein (1-1141)(Q959C_S997C) WhcAg construct
MFVFLFVLPLVSSQCVNLTTRTGIPPGYTNSSTRGVYYPDKVFRSSILHLTQDLFLPFFSNVTWFNTINYQGGFKKFDNPVLPFNDGVYFASTEKSNIIRGWIFGTTLDARTQSLLIVNNATNVVIKVCEFQFCTDPFLGVYYHNNNKTWVENEFRVYSSANNCTFEYISQPFLMDLEGKQGNFKNLREFVFKNVDGYFKIYSKHTPIDLVRDLPRGFAALEPLVDLPIGINITRFQTLLALHRSYLTPGKLESGWTTGAAAYYVGYLQQRTFLLSYNQNGTITDAVDCSLDPLSETKCTLKSLTVEKGIYQTSNFRVQPTISIVRFPNITNLCPFGEVFNASKFASVYAWNRKRISNCVADYSVLYNSTSFSTFKCYGVSPTKLNDLCFTNVYADSFVVKGDEVRQIAPGQTGVIADYNYKLPDDFTGCVIAWNSVKQDALTGGNYGYLYRLFRKSKLKPFERDISTEIYQAGSTPCNGQVGLNCYYPLERYGFHPTTGVNYQPFRVVVLSFELLNGPATVCGPKLSTTLVKDKCVNFNFNGLTGTGVLTTSKKQFLPFQQFGRDISDTTDAVRDPQTLEILDITPCSFGGVSVITPGTNTSNQVAVLYQDVNCTEVPMAIHAEQLTPAWRVYSAGANVFQTRAGCLVGAEHVNNSYECDIPVGAGICASYHSMSSFRSVNQRSIIAYTMSLGAENSVAYSNNSIAIPTNFTISVTTEILPVSMTKTSVDCTMYICGDSIECSNLLLQYGSFCTQLNRALTGIAVEQDKNTQEVFAQVKQIYKTPPIKDFGGFNFSQILPDPSKPSKRSFIEDLLFNKVTLADAGFIKQYGDCLGDIAARDLICAQKFNGLTVLPPLLTDEMIAQYTSALLAGTITSGWTFGAGAALQIPFAMQMAYRFNGIGVTQNVLYENQKLIANQFNSAIGKIQDSLSSTASALGKLQDVVNQNAQALNTLVKCLSSNFGAISSVLNDILSRLDKVEAEVQIDRLITGRLQCLQTYVTQQLIRAAEIRASANLAATKMSECVLGQSKRVDFCGKGYHLMSFPQSAPHGVVFLHVTYVPAQEKNFTTAPAICHEGKAHFPREGVFVSNGTHWFITQRNFYEPQIITTDNTFVSGSCDVVIGIVNNTVYDPLQPELDSGGGGSDIDPYKEFGSSYQLLNFLPLDFFPDLNALVDTATALYEEELTGREHCSPHHTAIRQALVCWDELTKLIAWMSSNITSEQVRTIIVNHVNDTWGLKVRQSLWFHLSCLTFGQHTVQEFLVSFGVWIRTPAPYRPPNAPILSTLPEHTVIC

SEQ ID NO: 11394 - protein, 1295 aa, Artificial Sequence
  SARS-CoV-2/pangolin/Guangxi/P5E/2017__EPI_ISL_410541 spike protein (1-1141)(Q959C_S997C) WhcAg construct
MFVFLFVLPLVSSQCVNLTTRTGIPPGYTNSSTRGVYYPDKVFRSSILHLTQDLFLPFFSNVTWFNTITYQGGSKKFDNPVLPFNDGVYFASTEKSNIIRGWIFGTTLDARTQSLLIVNNATNVVIKVCEFQFCTDPFLGVYYHNNNKTWVENEFRVYSSANNCTFEYISQPFLMDLEGKQGNFKNLREFVFKNVDGYFKIYSKHTPIDLVRDLPRGFAALEPLVDLPIGINITRFQTLLALHRSYLTPGKLESGWTTGAAAYYVGYLQQRTFLLSYNQNGTITDAVDCSLDPLSETKCTLKSLTVEKGIYQTSNFRVQPTISIVRFPNITNLCPFGEVFNASKFASVYAWNRKRISNCVADYSVLYNSTSFSTFKCYGVSPTKLNDLCFTNVYADSFVVKGDEVRQIAPGQTGVIADYNYKLPDDFTGCVIAWNSVKQDALTGDNYGYLYRLFRKSKLKPFERDISTEIYQAGSTPCNGQVGLNCYYPLERYGFHPTTGVNYQPFRVVVLSFELLNGPATVCGPKLSTTLVKDKCVNFNFNGLTGTGVLTTSKKQFLPFQQFGRDISDTTDAVRDPQTLEILDITPCSFGGVSVITPGTNTSNQVAVLYQDVNCTEVPMAIHAEQLTPAWRVYSAGANVFQTRAGCLVGAEHVNNSYECDIPVGAGICASYHSMSSFRSVNQRSIIAYTMSLGAENSVAYSNNSIAIPTNFTISVTTEILPVSMTKTSVDCTMYICGDSIECSNLLLQYGSFCTQLNRALTGIAVEQDKNTQEVFAQVKQIYKTPPIKDFGGFNFSQILPDPSKPSKRSFIEDLLFNKVTLADAGFIKQYGDCLGDIAARDLICAQKFNGLTVLPPLLTDEMIAQYTSALLAGTITSGWTFGAGAALQIPFAMQMAYRFNGIGVTQNVLYENQKLIANQFNSAIGKIQDSLSSTASALGKLQDVVNQNAQALNTLVKCLSSNFGAISSVLNDILSRLDKVEAEVQIDRLITGRLQCLQTYVTQQLIRAAEIRASANLAATKMSECVLGQSKRVDFCGKGYHLMSFPQSAPHGVVFLHVTYVPAQEKNFTTAPAICHEGKAHFPREGVFVSNGTHWFITQRNFYEPQIITTDNTFVSGSCDVVIGIVNNTVYDPLQPELDSGGGGSDIDPYKEFGSSYQLLNFLPLDFFPDLNALVDTATALYEEELTGREHCSPHHTAIRQALVCWDELTKLIAWMSSNITSEQVRTIIVNHVNDTWGLKVRQSLWFHLSCLTFGQHTVQEFLVSFGVWIRTPAPYRPPNAPILSTLPEHTVIC

SEQ ID NO: 11395 - protein, 1293 aa, Artificial Sequence
  SARS-CoV-2/pangolin/Guangxi/P1E/2017__EPI_ISL_410539 spike protein (1-1139)(Q957C_S995C) WhcAg construct
MFVFLFVLPLVSSQCVNLTTRTGIQPGYTNSSTRGVYYPDKVFRSSILHLTQDLFLPFFSNVTWFNTINYQGGFKKFDNPVLPFNDGVYFASTEKSNIIRGWIFGTTLDARTQSLLIVNNATNVVIKVCEFQFCTDPFLGVYYHNNNKTWVENEFRVYSSANNCTFEYISQPFLMDLEGKQGNFKNLREFVFKNVDGYFKIYSKHTPIDLVRDLPRGFAALEPLVDLPIGINITRFQTLLALHRSYLTPGKLESGWTTGAAAYYVGYLQQRTFLLSYNQNGTITDAVDCSLDPLSETKCTLKSLTVEKGIYQTSNFRVQPTISIVRFPNITNLCPFGEVFNASKFASVYAWNRKRISNCVADYSVLYNSTSFSTFKCYGVSPTKLNDLCFTNVYADSFVVKGDEVRQIAPGQTGVIADYNYKLPDDFTGCVIAWNSVKQDALTGGNYLYRLFRKSKLKPFERDISTEIYQAGSTPCNGQVGLNCYYPLERYGFHPTTGVNYQPFRVVVLSFELLNGPATVCGPKLSTTLVKDKCVNFNFNGLTGTGVLTTSKKQFLPFQQFGRDISDTTDAVRDPQTLEILDITPCSFGGVSVITPGTNTSNQVAVLYQDVNCTEVPMAIHAEQLTPAWRVYSAGANVFQTRAGCLVGAEHVNNSYECDIPVGAGICASYHSMSSLRSVNQRSIIAYTMSLGAENSVAYSNNSIAIPTNFTISVTTEILPVSMTKTSVDCTMYICGDSIECSNLLLQYGSFCTQLNRALTGIAVEQDKNTQEVFAQVKQIYKTPPIKDFGGFNFSQILPDPSKPSKRSFIEDLLFNKVTLADAGFIKQYGDCLGDIAARDLICAQKFNGLTVLPPLLTDEMIAQYTSALLAGTITSGWTFGAGAALQIPFAMQMAYRFNGIGVTQNVLYENQKLIANQFNSAIGKIQDSLSSTASALGKLQDVVNQNAQALNTLVKCLSSNFGAISSVLNDILSRLDKVEAEVQIDRLITGRLQCLQTYVTQQLIRAAEIRASANLAATKMSECVLGQSKRVDFCGKGYHLMSFPQSAPHGVVFLHVTYVPAQEKNFTTAPAICHEGKAHFPREGVFVSNGTHWFITQRNFYEPQIITTDNTFVSGSCDVVIGIVNNTVYDPLQPELDSGGGGSDIDPYKEFGSSYQLLNFLPLDFFPDLNALVDTATALYEEELTGREHCSPHHTAIRQALVCWDELTKLIAWMSSNITSEQVRTIIVNHVNDTWGLKVRQSLWFHLSCLTFGQHTVQEFLVSFGVWIRTPAPYRPPNAPILSTLPEHTVIC

SEQ ID NO: 11396 - protein, 1301 aa, Artificial Sequence
  SARS-CoV-2/Wuhan/WIV05/2019__EPI_ISL_402128 spike protein (1-1147)(F970C_G999C) WhcAg construct
MFVFLVLLPLVSSQCVNLTTRTQLPPAYTNSFTRGVYYPDKVFRSSVLHSTQDLFLPFFSNVTWFHAIHVSGTNGTKRFDNPVLPFNDGVYFASTEKSNIIRGWIFGTTLDSKTQSLLIVNNATNVVIKVCEFQFCNDPFLGVYYHKNNKSWMESEFRVYSSANNCTFEYVSQPFLMDLEGKQGNFKNLREFVFKNIDGYFKIYSKHTPINLVRDLPQGFSALEPLVDLPIGINITRFQTLLALHRSYLTPGDSSSGWTAGAAAYYVGYLQPRTFLLKYNENGTITDAVDCALDPLSETKCTLKSFTVEKGIYQTSNFRVQPTESIVRFPNITNLCPFGEVFNATRFASVYAWNRKRISNCVADYSVLYNSASFSTFKCYGVSPTKLNDLCFTNVYADSFVIRGDEVRQIAPGQTGKIADYNYKLPDDFTGCVIAWNSNNLDSKVGGNYNYLYRLFRKSNLKPFERDISTEIYQAGSTPCNGVEGFNCYFPLQSYGFQPTNGVGYQPYRVVVLSFELLHAPATVCGPKKSTNLVKNKCVNFNFNGLTGTGVLTESNKKFLPFQQFGRDIADTTDAVRDPQTLEILDITPCSFGGVSVITPGTNTSNQVAVLYQDVNCTEVPVAIHADQLTPTWRVYSTGSNVFQTRAGCLIGAEHVNNSYECDIPIGAGICASYQTQTNSPRRARSVASQSIIAYTMSLGAENSVAYSNNSIAIPTNFTISVTTEILPVSMTKTSVDCTMYICGDSTECSNLLLQYGSFCTQLNRALTGIAVEQDKNTQEVFAQVKQIYKTPPIKDFGGFNFSQILPDPSKPSKRSFIEDLLFNKVTLADAGFIKQYGDCLGDIAARDLICAQKFNGLTVLPPLLTDEMIAQYTSALLAGTITSGWTFGAGAALQIPFAMQMAYRFNGIGVTQNVLYENQKLIANQFNSAIGKIQDSLSSTASALGKLQDVVNQNAQALNTLVKQLSSNCGAISSVLNDILSRLDKVEAEVQIDRLITCRLQSLQTYVTQQLIRAAEIRASANLAATKMSECVLGQSKRVDFCGKGYHLMSFPQSAPHGVVFLHVTYVPAQEKNFTTAPAICHDGKAHFPREGVFVSNGTHWFVTQRNFYEPQIITTDNTFVSGNCDVVIGIVNNTVYDPLQPELDSGGGGSDIDPYKEFGSSYQLLNFLPLDFFPDLNALVDTATALYEEELTGREHCSPHHTAIRQALVCWDELTKLIAWMSSNITSEQVRTIIVNHVNDTWGLKVRQSLWFHLSCLTFGQHTVQEFLVSFGVWIRTPAPYRPPNAPILSTLPEHTVIC

SEQ ID NO: 11397 - protein, 1297 aa, Artificial Sequence
  SARS-CoV-2/bat/Yunnan/RaTG13/2013__EPI_ISL_402131 spike protein (1-1143)(F966C_G995C) WhcAg construct
MFVFLVLLPLVSSQCVNLTTRTQLPPAYTNSSTRGVYYPDKVFRSSVLHLTQDLFLPFFSNVTWFHAIHVSGTNGIKRFDNPVLPFNDGVYFASTEKSNIIRGWIFGTTLDSKTQSLLIVNNATNVVIKVCEFQFCNDPFLGVYYHKNNKSWMESEFRVYSSANNCTFEYVSQPFLMDLEGKQGNFKNLREFVFKNIDGYFKIYSKHTPINLVRDLPPGFSALEPLVDLPIGINITRFQTLLALHRSYLTPGDSSSGWTAGAAAYYVGYLQPRTFLLKYNENGTITDAVDCALDPLSETKCTLKSFTVEKGIYQTSNFRVQPTDSIVRFPNITNLCPFGEVFNATTFASVYAWNRKRISNCVADYSVLYNSTSFSTFKCYGVSPTKLNDLCFTNVYADSFVITGDEVRQIAPGQTGKIADYNYKLPDDFTGCVIAWNSKHIDAKEGGNFNYLYRLFRKANLKPFERDISTEIYQAGSKPCNGQTGLNCYYPLYRYGFYPTDGVGHQPYRVVVLSFELLNAPATVCGPKKSTNLVKNKCVNFNFNGLTGTGVLTESNKKFLPFQQFGRDIADTTDAVRDPQTLEILDITPCSFGGVSVITPGTNASNQVAVLYQDVNCTEVPVAIHADQLTPTWRVYSTGSNVFQTRAGCLIGAEHVNNSYECDIPIGAGICASYQTQTNSRSVASQSIIAYTMSLGAENSVAYSNNSIAIPTNFTISVTTEILPVSMTKTSVDCTMYICGDSTECSNLLLQYGSFCTQLNRALTGIAVEQDKNTQEVFAQVKQIYKTPPIKDFGGFNFSQILPDPSKPSKRSFIEDLLFNKVTLADAGFIKQYGDCLGDIAARDLICAQKFNGLTVLPPLLTDEMIAQYTSALLAGTITSGWTFGAGAALQIPFAMQMAYRFNGIGVTQNVLYENQKLIANQFNSAIGKIQDSLSSTASALGKLQDVVNQNAQALNTLVKQLSSNCGAISSVLNDILSRLDKVEAEVQIDRLITCRLQSLQTYVTQQLIRAAEIRASANLAATKMSECVLGQSKRVDFCGKGYHLMSFPQSAPHGVVFLHVTYVPAQEKNFTTAPAICHDGKAHFPREGVFVSNGTHWFVTQRNFYEPQIITTDNTFVSGSCDVVIGIVNNTVYDPLQPELDSGGGGSDIDPYKEFGSSYQLLNFLPLDFFPDLNALVDTATALYEEELTGREHCSPHHTAIRQALVCWDELTKLIAWMSSNITSEQVRTIIVNHVNDTWGLKVRQSLWFHLSCLTFGQHTVQEFLVSFGVWIRTPAPYRPPNAPILSTLPEHTVIC

SEQ ID NO: 11398 - protein, 1301 aa, Artificial Sequence
  SARS-CoV-2/Wuhan/HBCDC-HB-01/2019__EPI_ISL_402132 spike protein (1-1147)(F970C_G999C) WhcAg construct
MFVFLVLLPLVSSQCVNLTTRTQLPPAYTNSITRGVYYPDKVFRSSVLHSTQDLFLPFFSNVTWFHAIHVSGTNGTKRFDNPVLPFNDGVYFASTEKSNIIRGWIFGTTLDSKTQSLLIVNNATNVVIKVCEFQFCNDPFLGVYYHKNNKSWMESEFRVYSSANNCTFEYVSQPFLMDLEGKQGNFKNLREFVFKNIDGYFKIYSKHTPINLVRDLPQGFSALEPLVDLPIGINITRFQTLLALHRSYLTPGDSSSGWTAGAAAYYVGYLQPRTFLLKYNENGTITDAVDCALDPLSETKCTLKSFTVEKGIYQTSNFRVQPTESIVRFPNITNLCPFGEVFNATRFASVYAWNRKRISNCVADYSVLYNSASFSTFKCYGVSPTKLNDLCFTNVYADSFVIRGDEVRQIAPGQTGKIADYNYKLPDDFTGCVIAWNSNNLDSKVGGNYNYLYRLFRKSNLKPFERDISTEIYQAGSTPCNGVEGFNCYFPLQSYGFQPTNGVGYQPYRVVVLSFELLHAPATVCGPKKSTNLVKNKCVNFNFNGLTGTGVLTESNKKFLPFQQFGRDIADTTDAVRDPQTLEILDITPCSFGGVSVITPGTNTSNQVAVLYQDVNCTEVPVAIHADQLTPTWRVYSTGSNVFQTRAGCLIGAEHVNNSYECDIPIGAGICASYQTQTNSPRRARSVASQSIIAYTMSLGAENSVAYSNNSIAIPTNFTISVTTEILPVSMTKTSVDCTMYICGDSTECSNLLLQYGSFCTQLNRALTGIAVEQDKNTQEVFAQVKQIYKTPPIKDFGGFNFSQILPDPSKPSKRSFIEDLLFNKVTLADAGFIKQYGDCLGDIAARDLICAQKFNGLTVLPPLLTDEMIAQYTSALLAGTITSGWTFGAGAALQIPFAMQMAYRFNGIGVTQNVLYENQKLIANQFNSAIGKIQDSLSSTASALGKLQDVVNQNAQALNTLVKQLSSNCGAISSVLNDILSRLDKVEAEVQIDRLITCRLQSLQTYVTQQLIRAAEIRASANLAATKMSECVLGQSKRVDFCGKGYHLMSFPQSAPHGVVFLHVTYVPAQEKNFTTAPAICHDGKAHFPREGVFVSNGTHWFVTQRNFYEPQIITTDNTFVSGNCDVVIGIVNNTVYDPLQPELDSGGGGSDIDPYKEFGSSYQLLNFLPLDFFPDLNALVDTATALYEEELTGREHCSPHHTAIRQALVCWDELTKLIAWMSSNITSEQVRTIIVNHVNDTWGLKVRQSLWFHLSCLTFGQHTVQEFLVSFGVWIRTPAPYRPPNAPILSTLPEHTVIC

SEQ ID NO: 11399 - protein, 1301 aa, Artificial Sequence
  SARS-CoV-2/Guangdong/20SF028/2020__EPI_ISL_403936 spike protein (1-1147)(F970C_G999C) WhcAg construct
MFVFLVLLPLVSSQCVNLTTRTQLPPAYTNSFTRGVYYPDKVFRSSVLYSTQDLFLPFFSNVTWFHAIHVSGTNGTKRFDNPVLPFNDGVYFASTEKSNIIRGWIFGTTLDSKTQSLLIVNNATNVVIKVCEFQFCNDPFLGVYYHKNNKSWMESEFRVYSSANNCTFEYVSQPFLMDLEGKQGNFKNLREFVFKNIDGYFKIYSKHTPINLVRDLPQGFSALEPLVDLPIGINITRFQTLLALHRSYLTPGDSSSGWTAGAAAYYVGYLQPRTFLLKYNENGTITDAVDCALDPLSETKCTLKSFTVEKGIYQTSNFRVQPTESIVRFPNITNLCPFGEVFNATRFASVYAWNRKRISNCVADYSVLYNSASFSTFKCYGVSPTKLNDLCFTNVYADSFVIRGDEVRQIAPGQTGKIADYNYKLPDDFTGCVIAWNSNNLDSKVGGNYNYLYRLFRKSNLKPFERDISTEIYQAGSTPCNGVEGFNCYFPLQSYGFQPTNGVGYQPYRVVVLSFELLHAPATVCGPKKSTNLVKNKCVNFNFNGLTGTGVLTESNKKFLPFQQFGRDIADTTDAVRDPQTLEILDITPCSFGGVSVITPGTNTSNQVAVLYQDVNCTEVPVAIHADQLTPTWRVYSTGSNVFQTRAGCLIGAEHVNNSYECDIPIGAGICASYQTQTNSPRRARSVASQSIIAYTMSLGAENSVAYSNNSIAIPTNFTISVTTEILPVSMTKTSVDCTMYICGDSTECSNLLLQYGSFCTQLNRALTGIAVEQDKNTQEVFAQVKQIYKTPPIKDFGGFNFSQILPDPSKPSKRSFIEDLLFNKVTLADAGFIKQYGDCLGDIAARDLICAQKFNGLTVLPPLLTDEMIAQYTSALLAGTITSGWTFGAGAALQIPFAMQMAYRFNGIGVTQNVLYENQKLIANQFNSAIGKIQDSLSSTASALGKLQDVVNQNAQALNTLVKQLSSNCGAISSVLNDILSRLDKVEAEVQIDRLITCRLQSLQTYVTQQLIRAAEIRASANLAATKMSECVLGQSKRVDFCGKGYHLMSFPQSAPHGVVFLHVTYVPAQEKNFTTAPAICHDGKAHFPREGVFVSNGTHWFVTQRNFYEPQIITTDNTFVSGNCDVVIGIVNNTVYDPLQPELDSGGGGSDIDPYKEFGSSYQLLNFLPLDFFPDLNALVDTATALYEEELTGREHCSPHHTAIRQALVCWDELTKLIAWMSSNITSEQVRTIIVNHVNDTWGLKVRQSLWFHLSCLTFGQHTVQEFLVSFGVWIRTPAPYRPPNAPILSTLPEHTVIC

SEQ ID NO: 11400 - protein, 1301 aa, Artificial Sequence
  SARS-CoV-2/Shenzhen/SZTH-001/2020__EPI_ISL_406592 spike protein (1-1147)(F970C_G999C) WhcAg construct
MFVFLVLLPLVSSQCVNLTTRTQLPPAYTNSFTRGVYYPDKVFRSSVLHSTQDLFLPFFSNVTWFHAIHVSGTNGTKRFDNPVLPFNDGVYFASTEKSNIIRGWIFGTTLDSKTQSLLIVNNATNVVIKVCEFQFCNDPFLGVYYHKNNKSWMESEFRVYSSANNCTFEYVSQPFLMDLEGKQGNFKNLREFVFKNIDGYFKIYSKHTPINLVRDLPQGFSALEPLVDLPIGINITRFQTLLALHRSYLTPGDSSSGWTAGAAAYYVGYLQPRTFLLKYNENGTITDAVDCALDPLSETKCTLKSFTVEKGIYQTSNFRVQPTESIVRFPNITNLCPFGEVFNATRFASVYAWNRKRISNCVADYSVLYNSASFSTFKCYGVSPTKLNDLCFTNVYADSFVIRGDEVRQIAPGQTGKIADYNYKLPDDFTGCVIAWNSNNLDSKVGGNYNYLYRLFRKSNLKPFERDISTEIYQAGSTPCNGVEGFNCYFPLQSYGFQPTNGVGYQPYRVVVLSFELLHAPATVCGPKKSTNLVKNKCVNFNFNGLTGTGVLTESNKKFLPFQQFGRDIADTTDAVRDPQTLEILDITPCSFGGVSVITPGTNTSNQVAVLYQDVNCTEVPVAIHADQLTPTWRVYSTGSNVFQTRAGCLIGAEHVNNSYECDIPIGAGICASYQTQTNSPRRARSVASQSIIAYTMSLGAENSVAYSNNSIAIPTNFTISVTTEILPVSMTKTSVDCTMYICGDSTECSNLLLQYGSFCTQLNRALTGIAVEQDKNTQEVFAQVKQIYKTPPIKDFGGFNFSQILPDPSKPSKRSFIEDLLFNKVTLADAGFIKQYGDCLGDIAARDLICAQKFNGLTVLPPLLTDEMIAQYTSALLAGTITSGWTFGAGAALQIPFAMQMAYRFNGIGVTQNVLYENQKLIANQFNSAIGKIQDSLSSTASALGKLQDVVNQNAQALNTLVKQLSSNCGAISSVLNDILSRLDKVEAEVQIDRLITCRLQSLQTYVTQQLIRAAEIRASANLAATKMSECVLGQSKRVDFCGKGYHLMSFPQSAPHGVVFLHVTYVPAQEKNFTTAPAICHDGKAHFPREGVFVSNGTHWFVTQRNFYEPQIITTDNTFVSGNCDVLIGIVNNTVYDPLQPELDSGGGGSDIDPYKEFGSSYQLLNFLPLDFFPDLNALVDTATALYEEELTGREHCSPHHTAIRQALVCWDELTKLIAWMSSNITSEQVRTIIVNHVNDTWGLKVRQSLWFHLSCLTFGQHTVQEFLVSFGVWIRTPAPYRPPNAPILSTLPEHTVIC

SEQ ID NO: 11401 - protein, 1301 aa, Artificial Sequence
  SARS-CoV-2/Shenzhen/SZTH-004/2020__EPI_ISL_406595 spike protein (1-1147)(F970C_G999C) WhcAg construct
MFVFLVLLPLVSSQCVNLTTRTQLPPAYTNSFTRGVYYPDKVFRSSVLHSTQDLFLPFFSNVTWFHAIHVSGTNGTKRFDNPVLPFNDGVYFASTEKSNIIRGWIFGTTLDSKTQSLLIVNNATNVVIKVCEFQFCNDPFLGVYYHKNNKSWMESEFRVYSSANNCTFEYVSQPFLMDLEGKQGNFKNLREFVFKNIDGYFKIYSKHTPINLVRDLPQGFSALEPLVDLPIGINITRFQTLLALHRSYLTPGDSSSGWTAGAAAYYVGYLQPRTFLLKYNENGTITDAVDCALDPLSETKCTLKSFTVEKGIYQTSNFRVQPTESIVRFPNITNLCPFGEVFNATRFASVYAWDRKRISNCVAYYSVLYNSASFSTFKCYGVSPTKLNDLCFTNVYADSFVIRGDEVRQIAPGQTGKIADYNYKLPDDFTGCVIAWNSNNLDSKVGGNYNYLYRLFRKSNLKPFERDISTEIYQAGSTPCNGVEGFNCYFPLQSYGFQPTNGVGYQPYRVVVLSFELLHAPATVCGPKKSTNLVKNKCVNFNFNGLTGTGVLTESNKKFLPFQQFGRDIADTTDAVRDPQTLEILDITPCSFGGVSVITPGTNTSNQVAVLYQDVNCTEVPVAIHADQLTPTWRVYSTGSNVFQTRAGCLIGAEHVNNSYECDIPIGAGICASYQTQTNSPRRARSVASQSIIAYTMSLGAENSVAYSNNSIAIPTNFTISVTTEILPVSMTKTSVDCTMYICGDSTECSNLLLQYGSFCTQLNRALTGIAVEQDKNTQEVFAQVKQIYKTPPIKDFGGFNFSQILPDPSKPSKRSFIEDLLFNKVTLADAGFIKQYGDCLGDIAARDLICAQKFNGLTVLPPLLTDEMIAQYTSALLAGTITSGWTFGAGAALQIPFAMQMAYRFNGIGVTQNVLYENQKLIANQFNSAIGKIQDSLSSTASALGKLQDVVNQNAQALNTLVKQLSSNCGAISSVLNDILSRLDKVEAEVQIDRLITCRLQSLQTYVTQQLIRAAEIRASANLAATKMSECVLGQSKRVDFCGKGYHLMSFPQSAPHGVVFLHVTYVPAQEKNFTTAPAICHDGKAHFPREGVFVSNGTHWFVTQRNFYEPQIITTDNTFVSGNCDVVIGIVNNTVYDPLQPELDSGGGGSDIDPYKEFGSSYQLLNFLPLDFFPDLNALVDTATALYEEELTGREHCSPHHTAIRQALVCWDELTKLIAWMSSNITSEQVRTIIVNHVNDTWGLKVRQSLWFHLSCLTFGQHTVQEFLVSFGVWIRTPAPYRPPNAPILSTLPEHTVIC

SEQ ID NO: 11402 - protein, 1301 aa, Artificial Sequence
  SARS-CoV-2/France/IDF0372/2020__EPI_ISL_406596 spike protein (1-1147)(F970C_G999C) WhcAg construct
MFVFLVLLPLVSSQCVNLTTRTQLPPAYTNSFTRGVYYPDKVFRSSVLHSTQDLFLPFFSNVTWFHAIHVSGTNGTKRFDNPVLPFNDGVYFASTEKSNIIRGWIFGTTLDSKTQSLLIVNNATNVVIKVCEFQFCNDPFLGVYYHKNNKSWMESEFRVYSSANNCTFEYVSQPFLMDLEGKQGNFKNLREFVFKNIDGYFKIYSKHTPINLVRDLPQGFSALEPLVDLPIGINITRFQTLLALHRSYLTPGDSSSGWTAGAAAYYVGYLQPRTFLLKYNENGTITDAVDCALDPLSETKCTLKSFTVEKGIYQTSNFRVQPTESIVRFPNITNLCPFGEVFNATRFASVYAWNRKRISNCVADYSFLYNSASFSTFKCYGVSPTKLNDLCFTNVYADSFVIRGDEVRQIAPGQTGKIADYNYKLPDDFTGCVIAWNSNNLDSKVGGNYNYLYRLFRKSNLKPFERDISTEIYQAGSTPCNGVEGFNCYFPLQSYGFQPTNGVGYQPYRVVVLSFELLHAPATVCGPKKSTNLVKNKCVNFNFNGLTGTGVLTESNKKFLPFQQFGRDIADTTDAVRDPQTLEILDITPCSFGGVSVITPGTNTSNQVAVLYQDVNCTEVPVAIHADQLTPTWRVYSTGSNVFQTRAGCLIGAEHVNNSYECDIPIGAGICASYQTQTNSPRRARSVASQSIIAYTMSLGAENSVAYSNNSIAIPTNFTISVTTEILPVSMTKTSVDCTMYICGDSTECSNLLLQYGSFCTQLNRALTGIAVEQDKNTQEVFAQVKQIYKTPPIKDFGGFNFSQILPDPSKPSKRSFIEDLLFNKVTLADAGFIKQYGDCLGDIAARDLICAQKFNGLTVLPPLLTDEMIAQYTSALLAGTITSGWTFGAGAALQIPFAMQMAYRFNGIGVTQNVLYENQKLIANQFNSAIGKIQDSLSSTASALGKLQDVVNQNAQALNTLVKQLSSNCGAISSVLNDILSRLDKVEAEVQIDRLITCRLQSLQTYVTQQLIRAAEIRASANLAATKMSECVLGQSKRVDFCGKGYHLMSFPQSAPHGVVFLHVTYVPAQEKNFTTAPAICHDGKAHFPREGVFVSNGTHWFVTQRNFYEPQIITTDNTFVSGNCDVVIGIVNNTVYDPLQPELDSGGGGSDIDPYKEFGSSYQLLNFLPLDFFPDLNALVDTATALYEEELTGREHCSPHHTAIRQALVCWDELTKLIAWMSSNITSEQVRTIIVNHVNDTWGLKVRQSLWFHLSCLTFGQHTVQEFLVSFGVWIRTPAPYRPPNAPILSTLPEHTVIC

SEQ ID NO: 11403 - protein, 1301 aa, Artificial Sequence
  SARS-CoV-2/Australia/VIC01/2020__EPI_ISL_406844 spike protein (1-1147)(F970C_G999C) WhcAg construct
MFVFLVLLPLVSSQCVNLTTRTQLPPAYTNSFTRGVYYPDKVFRSSVLHSTQDLFLPFFSNVTWFHAIHVSGTNGTKRFDNPVLPFNDGVYFASTEKSNIIRGWIFGTTLDSKTQSLLIVNNATNVVIKVCEFQFCNDPFLGVYYHKNNKSWMESEFRVYSSANNCTFEYVSQPFLMDLEGKQGNFKNLREFVFKNIDGYFKIYSKHTPINLVRDLPQGFSALEPLVDLPIGINITRFQTLLALHRRYLTPGDSSSGWTAGAAAYYVGYLQPRTFLLKYNENGTITDAVDCALDPLSETKCTLKSFTVEKGIYQTSNFRVQPTESIVRFPNITNLCPFGEVFNATRFASVYAWNRKRISNCVADYSVLYNSASFSTFKCYGVSPTKLNDLCFTNVYADSFVIRGDEVRQIAPGQTGKIADYNYKLPDDFTGCVIAWNSNNLDSKVGGNYNYLYRLFRKSNLKPFERDISTEIYQAGSTPCNGVEGFNCYFPLQSYGFQPTNGVGYQPYRVVVLSFELLHAPATVCGPKKSTNLVKNKCVNFNFNGLTGTGVLTESNKKFLPFQQFGRDIADTTDAVRDPQTLEILDITPCSFGGVSVITPGTNTSNQVAVLYQDVNCTEVPVAIHADQLTPTWRVYSTGSNVFQTRAGCLIGAEHVNNSYECDIPIGAGICASYQTQTNSPRRARSVASQSIIAYTMSLGAENSVAYSNNSIAIPTNFTISVTTEILPVSMTKTSVDCTMYICGDSTECSNLLLQYGSFCTQLNRALTGIAVEQDKNTQEVFAQVKQIYKTPPIKDFGGFNFSQILPDPSKPSKRSFIEDLLFNKVTLADAGFIKQYGDCLGDIAARDLICAQKFNGLTVLPPLLTDEMIAQYTSALLAGTITSGWTFGAGAALQIPFAMQMAYRFNGIGVTQNVLYENQKLIANQFNSAIGKIQDSLSSTASALGKLQDVVNQNAQALNTLVKQLSSNCGAISSVLNDILSRLDKVEAEVQIDRLITCRLQSLQTYVTQQLIRAAEIRASANLAATKMSECVLGQSKRVDFCGKGYHLMSFPQSAPHGVVFLHVTYVPAQEKNFTTAPAICHDGKAHFPREGVFVSNGTHWFVTQRNFYEPQIITTDNTFVSGNCDVVIGIVNNTVYDPLQPELDSGGGGSDIDPYKEFGSSYQLLNFLPLDFFPDLNALVDTATALYEEELTGREHCSPHHTAIRQALVCWDELTKLIAWMSSNITSEQVRTIIVNHVNDTWGLKVRQSLWFHLSCLTFGQHTVQEFLVSFGVWIRTPAPYRPPNAPILSTLPEHTVIC

SEQ ID NO: 11404 - protein, 1301 aa, Artificial Sequence
  SARS-CoV-2/Germany/BavPat1/2020__EPI_ISL_406862 spike protein (1-1147)(F970C_G999C) WhcAg construct
MFVFLVLLPLVSSQCVNLTTRTQLPPAYTNSFTRGVYYPDKVFRSSVLHSTQDLFLPFFSNVTWFHAIHVSGTNGTKRFDNPVLPFNDGVYFASTEKSNIIRGWIFGTTLDSKTQSLLIVNNATNVVIKVCEFQFCNDPFLGVYYHKNNKSWMESEFRVYSSANNCTFEYVSQPFLMDLEGKQGNFKNLREFVFKNIDGYFKIYSKHTPINLVRDLPQGFSALEPLVDLPIGINITRFQTLLALHRSYLTPGDSSSGWTAGAAAYYVGYLQPRTFLLKYNENGTITDAVDCALDPLSETKCTLKSFTVEKGIYQTSNFRVQPTESIVRFPNITNLCPFGEVFNATRFASVYAWNRKRISNCVADYSVLYNSASFSTFKCYGVSPTKLNDLCFTNVYADSFVIRGDEVRQIAPGQTGKIADYNYKLPDDFTGCVIAWNSNNLDSKVGGNYNYLYRLFRKSNLKPFERDISTEIYQAGSTPCNGVEGFNCYFPLQSYGFQPTNGVGYQPYRVVVLSFELLHAPATVCGPKKSTNLVKNKCVNFNFNGLTGTGVLTESNKKFLPFQQFGRDIADTTDAVRDPQTLEILDITPCSFGGVSVITPGTNTSNQVAVLYQGVNCTEVPVAIHADQLTPTWRVYSTGSNVFQTRAGCLIGAEHVNNSYECDIPIGAGICASYQTQTNSPRRARSVASQSIIAYTMSLGAENSVAYSNNSIAIPTNFTISVTTEILPVSMTKTSVDCTMYICGDSTECSNLLLQYGSFCTQLNRALTGIAVEQDKNTQEVFAQVKQIYKTPPIKDFGGFNFSQILPDPSKPSKRSFIEDLLFNKVTLADAGFIKQYGDCLGDIAARDLICAQKFNGLTVLPPLLTDEMIAQYTSALLAGTITSGWTFGAGAALQIPFAMQMAYRFNGIGVTQNVLYENQKLIANQFNSAIGKIQDSLSSTASALGKLQDVVNQNAQALNTLVKQLSSNCGAISSVLNDILSRLDKVEAEVQIDRLITCRLQSLQTYVTQQLIRAAEIRASANLAATKMSECVLGQSKRVDFCGKGYHLMSFPQSAPHGVVFLHVTYVPAQEKNFTTAPAICHDGKAHFPREGVFVSNGTHWFVTQRNFYEPQIITTDNTFVSGNCDVVIGIVNNTVYDPLQPELDSGGGGSDIDPYKEFGSSYQLLNFLPLDFFPDLNALVDTATALYEEELTGREHCSPHHTAIRQALVCWDELTKLIAWMSSNITSEQVRTIIVNHVNDTWGLKVRQSLWFHLSCLTFGQHTVQEFLVSFGVWIRTPAPYRPPNAPILSTLPEHTVIC

SEQ ID NO: 11405 - protein, 1301 aa, Artificial Sequence
  SARS-CoV-2/Wuhan/HBCDC-HB-02/2020__EPI_ISL_412978 spike protein (1-1147)(F970C_G999C) WhcAg construct
MFVFLVLLPLVSSQCVNLTTRTQLPPAYTNSFTRGVYYPDKVFRSSVLHSTQDLFLPFFSNVTWFHAIHVSGTNGTKRFDNPVLPFNDGVYFASTEKSNIIRGWIFGTTLDSKTQSLLIVNNATNVVIKVCEFQFCNDPFLGVYYHKNNKSWMESEFRVYSSANNCTFEYVSQPFLMDLEGKQGNFKNLREFVFKNIDGYFKIYSKHTPINLVRDLPQGFSALEPLVDLPIGINITRFQTLLALHRSYLTPGDSSSGWTAGAAAYYVGYLQPRTFLLKYNENGTITDAVDCALDPLSETKCTLKSFTVEKGIYQTSNFRVQPTESIVRFPNITNLCPFGEVFNATRFASVYAWNRKRISNCVADYSVLYNSASFSTFKCYGVSPTKLNDLCFTNVYADSFVIRGDEVRQIAPGQTGKIADYNYKLPDDFTGCVIAWNSNNLDSKVGGNYNYLYRLFRKSNLKPFERDISTEIYQAGSTPCNGVEGFNCYFPLQSYGFQPTNGVGYQPYRVVVLSFELLHAPATVCGPKKSTNLVKNKCVNFNFNGLTGTGVLTESNKKFLPFQQFGRDIADTTDAVRDPQTLEILDITPCSFGGVSVITPGTNTSNQVAVLYQDVNCTEVPVAIHADQLTPTWRVYSTGSNVFQTRAGCLIGAEHVNNSYECDIPIGAGICASYQTQTNSPRRARSVASQSIIAYTMSLGAENSVAYSNNSIAIPTNFTISVTTEILPVSMTKTSVDCTMYICGDSTECSNFLLQYGSFCTQLNRALTGIAVEQDKNTQEVFAQVKQIYKTPPIKDFGGFNFSQILPDPSKPSKRSFIEDLLFNKVTLADAGFIKQYGDCLGDIAARDLICAQKFNGLTVLPPLLTDEMIAQYTSALLAGTITSGWTFGAGAALQIPFAMQMAYRFNGIGVTQNVLYENQKLIANQFNSAIGKIQDSLSSTASALGKLQDVVNQNAQALNTLVKQLSSNCGAISSVLNDILSRLDKVEAEVQIDRLITCRLQSLQTYVTQQLIRAAEIRASANLAATKMSECVLGQSKRVDFCGKGYHLMSFPQSAPHGVVFLHVTYVPAQEKNFTTAPAICHDGKAHFPREGVFVSNGTHWFVTQRNFYEPQIITTDNTFVSGNCDVVIGIVNNTVYDPLQPELDSGGGGSDIDPYKEFGSSYQLLNFLPLDFFPDLNALVDTATALYEEELTGREHCSPHHTAIRQALVCWDELTKLIAWMSSNITSEQVRTIIVNHVNDTWGLKVRQSLWFHLSCLTFGQHTVQEFLVSFGVWIRTPAPYRPPNAPILSTLPEHTVIC

SEQ ID NO: 11406 - protein, 1301 aa, Artificial Sequence
  SARS-CoV-2/Australia/QLD02/2020__EPI_ISL_407896 spike protein (1-1147)(F970C_G999C) WhcAg construct
MFVFLVLLPLVSSQCVNLTTRTQLPPAYTNSFTRGVYYPDKVFRSSVLHSTQDLFLPFFSNVTWFHAIHVSGTNGTKRFDNPVLPFNDGVYFASTEKSNIIRGWIFGTTLDSKTQSLLIVNNATNVVIKVCEFQFCNDPFLGVYYHKNNKSWMESEFRVYSSANNCTFEYVSQPFLMDLEGKQGNFKNLREFVFKNIDGYFKIYSKHTPINLVRDLPQGFSALEPLVDLPIGINITRFQTLLALHRSYLTPGDSSSGWTAGAAAYYVGYLQPRTFLLKYNENGTITDAVDCALDPLSETKCTLKSFTVEKGIYQTSNFRVQPTESIVRFPNITNLCPFGEVFNATRFASVYAWNRKRISNCVADYSVLYNSASFSTFKCYGVSPTKLNDLCFTNVYADSFVIRGDEVRQIAPGQTGKIADYNYKLPDDFTGCVIAWNSNNLDSKVGGNYNYLYRLFRKSNLKPFERDISTEIYQAGSTPCNGVEGFNCYFPLQSYGFQPTNGVGYQPYRVVVLSFELLHAPATVCGPKKSTNLVKNKCVNFNFNGLTGTGVLTESNKKFLPFQQFGRDIADTTDAVRDPQTLEILDITPCSFGGVSVITPGTNTSNQVAVLYQDVNCTEVPVAIHADQLTPTWRVYSTGSNVFQTRAGCLIGAEHVNNSYECDIPIGAGICASYQTQTNSPRRARSVASQSIIAYTMSLGAENSVAYSNNSIAIPTNFTISVTTEILPVSMTKTSVDCTMYICGDSTECSNLLLQYGSFCTQLNRALTGIAVEQDKNTQEVFAQVKQIYKTPPIKDFGGFNFSQILPDPSKPSKRSFIEDLLFNKVTLADAGFIKQYGDCLGDIAARDLICAQKFNGLTVLPPLLTDEMIAQYTSALLAGTITSGWTFGAGAALQIPFAMQMAYRFNGIGVTQNVLYENQKLIANQFNSAIGKIQDSLSSTASALGKLQDVVNQNAQALNTLVKQLSSNCGAISSVLNDILSRLDKVEAEVQIDRLITCRLQSLQTYVTQQLIRAAEIRASANLAATKMSECVLGQSKRVDFCGKGYHLMSFPQSAPHGVVFLHVTYVPAQEKNFTTAPAICHDGKAHFPREGVFVSNGTHWFVTQRNFYEPQIITTDNTFVSGNCDVVIGIVNNTVYDPLQLELDSGGGGSDIDPYKEFGSSYQLLNFLPLDFFPDLNALVDTATALYEEELTGREHCSPHHTAIRQALVCWDELTKLIAWMSSNITSEQVRTIIVNHVNDTWGLKVRQSLWFHLSCLTFGQHTVQEFLVSFGVWIRTPAPYRPPNAPILSTLPEHTVIC

SEQ ID NO: 11407 - protein, 1301 aa, Artificial Sequence
  SARS-CoV-2/India/1-31/2020__EPI_ISL_413523 spike protein (1-1147)(F970C_G999C) WhcAg construct
MFVFLVLLPLVSSQCVNLTTRTQLPPAYTNSFTRGVYYPDKVFRSSVLHSTQDLFLPFFSNVTWFHAIHVSGTNGTKRFDNPVLPFNDGVYFASTEKSNIIRGWIFGTTLDSKTQSLLIVNNATNVVIKVCEFQFCNDPFLGVYYHKNNKSWMESEFRVYSSANNCTFEYVSQPFLMDLEGKQGNFKNLREFVFKNIDGYFKIYSKHTPINLVRDLPQGFSALEPLVDLPIGINITRFQTLLALHRSYLTPGDSSSGWTAGAAAYYVGYLQPRTFLLKYNENGTITDAVDCALDPLSETKCTLKSFTVEKGIYQTSNFRVQPTESIVRFPNITNLCPFGEVFNATRFASVYAWNRKRISNCVADYSVLYNSASFSTFKCYGVSPTKLNDLCFTNVYADSFVIRGDEVRQIAPGQTGKIADYNYKLPDDFTGCVIAWNSNNLDSKVGGNYNYLYRLFRKSNLKPFERDISTEIYQAGSTPCNGVEGFNCYFPLQSYGFQPTNGVGYQPYRVVVLSFELLHAPATVCGPKKSTNLVKNKCVNFNFNGLTGTGVLTESNKKFLPFQQFGRDIADTTDAVRDPQTLEILDITPCSFGGVSVITPGTNTSNQVAVLYQDVNCTEVPVAIHADQLTPTWRVYSTGSNVFQTRAGCLIGAEHVNNSYECDIPIGAGICASYQTQTNSPRRARSVASQSIIAYTMSLGAENSVAYSNNSIAIPTNFTISVTTEILPVSMTKTSVDCTMYICGDSTECSNLLLQYGSFCTQLNRALTGIAVEQDKNTQEVFAQVKQIYKTPPIKDFGGFNFSQILPDPSKPSKRSFIEDLLFNKVTLADAGFIKQYGDCLGDIAARDLICAQKFNGLTVLPPLLTDEMIAQYTSALLAGTITSGWTFGAGAALQIPFAMQMAYRFNGIGVTQNVLYENQKLIANQFNSVIGKIQDSLSSTASALGKLQDVVNQNAQALNTLVKQLSSNCGAISSVLNDILSRLDKVEAEVQIDRLITCRLQSLQTYVTQQLIRAAEIRASANLAATKMSECVLGQSKRVDFCGKGYHLMSFPQSAPHGVVFLHVTYVPAQEKNFTTAPAICHDGKAHFPREGVFVSNGTHWFVTQRNFYEPQIITTDNTFVSGNCDVVIGIVNNTVYDPLQPELDSGGGGSDIDPYKEFGSSYQLLNFLPLDFFPDLNALVDTATALYEEELTGREHCSPHHTAIRQALVCWDELTKLIAWMSSNITSEQVRTIIVNHVNDTWGLKVRQSLWFHLSCLTFGQHTVQEFLVSFGVWIRTPAPYRPPNAPILSTLPEHTVIC

SEQ ID NO: 11408 - protein, 1301 aa, Artificial Sequence
  SARS-CoV-2/Guangdong/GD2020087-P0008/2020__EPI_ISL_413863 spike protein (1-1147)(F970C_G999C) WhcAg construct
MFVFLVLLPLVSSQCVNLTTRTQLPPAYTNSFTRGVYYPDKVFRSSVLHSTQDLFLPFFSNVTWFHAIHVSGTNGTKRFDNPVLPFNDGVYFASTEKSNIIRGWIFGTTLDSKTQSLLIVNNATNVVIKVCEFQFCNDPFLGVYYHKNNKSWMESEFRVYSSANNCTFEYVSQPFLMDLEGKQGNFKNLREFVFKNIDGYFKIYSKHTPINLVRDLPQGFSALEPLVDLPIGINITRFQTLLALHRSYLTPGDSSSGWTAGAAAYYVGYLQPRTFLLKYNENGTITDAVDCALDPLSETKCTLKSFTVEKGIYQTSNFRVQPTESIVRFPNITNLCPFGEVFNATRFASVYAWNRKRISNCVADYSVLYNSASFSTFKCYGVSPTKLNDLCFTNVYADSFVIRGDEVREIAPGQTGKIADYNYKLPDDFTGCVIAWNSNNLDSKVGGNYNYLYRLFRKSNLKPFERDISTEIYQAGSTPCNGVEGFNCYFPLQSYGFQPTNGVGYQPYRVVVLSFELLHAPATVCGPKKSTNLVKNKCVNFNFNGLTGTGVLTESNKKFLPFQQFGRDIADTTDAVRDPQTLEILDITPCSFGGVSVITPGTNTSNQVAVLYQDVNCTEVPVAIHADQLTPTWRVYSTGSNVFQTRAGCLIGAEHVNNSYECDIPIGAGICASYQTQTNSPRRARSVASQSIIAYTMSLGAENSVAYSNNSIAIPTNFTISVTTEILPVSMTKTSVDCTMYICGDSTECSNLLLQYGSFCTQLNRALTGIAVEQDKNTQEVFAQVKQIYKTPPIKDFGGFNFSQILPDPSKPSKRSFIEDLLFNKVTLADAGFIKQYGDCLGDIAARDLICAQKFNGLTVLPPLLTDEMIAQYTSALLAGTITSGWTFGAGAALQIPFAMQMAYRFNGIGVTQNVLYENQKLIANQFNSAIGKIQDSLSSTASALGKLQDVVNQNAQALNTLVKQLSSNCGAISSVLNDILSRLDKVEAEVQIDRLITCRLQSLQTYVTQQLIRAAEIRASANLAATKMSECVLGQSKRVDFCGKGYHLMSFPQSAPHGVVFLHVTYVPAQEKNFTTAPAICHDGKAHFPREGVFVSNGTHWFVTQRNFYEPQIITTDNTFVSGNCDVVIGIVNNTVYDPLQPELDSGGGGSDIDPYKEFGSSYQLLNFLPLDFFPDLNALVDTATALYEEELTGREHCSPHHTAIRQALVCWDELTKLIAWMSSNITSEQVRTIIVNHVNDTWGLKVRQSLWFHLSCLTFGQHTVQEFLVSFGVWIRTPAPYRPPNAPILSTLPEHTVIC

SEQ ID NO: 11409 - protein, 1301 aa, Artificial Sequence
  SARS-CoV-2/Sweden/01/2020__EPI_ISL_411951 spike protein (1-1147)(F970C_G999C) WhcAg construct
MFVFLVLLPLVSSQCVNLTTRTQLPPAYTNSFTRGVYYPDKVFRSSVLHSTQDLFLPFFSNVTWFHAIHVSGTNGTKRFDNPVLPFNDGVYFASTEKSNIIRGWIFGTTLDSKTQSLLIVNNATNVVIKVCEFQFCNDPFLGVYYHKNNKSWMESEFRVYSSANNCTFEYVSQPFLMDLEGKQGNFKNLREFVFKNIDGYFKIYSKHTPINLVRDLPQGFSALEPLVDLPIGINITRFQTLLALHRSYLTPGDSSSGWTAGAAAYYVGYLQPRTFLLKYNENGTITDAVDCALDPLSETKCTLKSFTVEKGIYQTSNFRVQPTESIVRFPNITNLCPFGEVFNATRFASVYAWNRKRISNCVADYSVLYNSASFSTFKCYGVSPTKLNDLCFTNVYADSFVIRGDEVRQIAPGQTGKIADYNYKLPDDFTGCVIAWNSNNLDSKVGGNYNYLYRLFRKSNLKPFERDISTEIYQAGSTPCNGVEGFNCYFPLQSYGFQPTNGVGYQPYRVVVLSFELLHAPATVCGPKKSTNLVKNKCVNFNFNGLTGTGVLTESNKKFLPFQQFGRDIADTTDAVRDPQTLEILDITPCSFGGVSVITPGTNTSNQVAVLYQDVNCTEVPVAIHADQLTPTWRVYSTGSNVFQTRAGCLIGAEHVNNSYECDIPIGAGICASYQTQTNSPRRARSVASQSIIAYTMSLGAENSVAYSNNSIAIPTNFTISVTTEILPVSMTKTSVDCTMYICGDSTECSNLLLQYGSFCTQLNRALTGIAVEQDKNTQEVFAQVKQIYKTPPIKDCGGFNFSQILPDPSKPSKRSFIEDLLFNKVTLADAGFIKQYGDCLGDIAARDLICAQKFNGLTVLPPLLTDEMIAQYTSALLAGTITSGWTFGAGAALQIPFAMQMAYRFNGIGVTQNVLYENQKLIANQFNSAIGKIQDSLSSTASALGKLQDVVNQNAQALNTLVKQLSSNCGAISSVLNDILSRLDKVEAEVQIDRLITCRLQSLQTYVTQQLIRAAEIRASANLAATKMSECVLGQSKRVDFCGKGYHLMSFPQSAPHGVVFLHVTYVPAQEKNFTTAPAICHDGKAHFPREGVFVSNGTHWFVTQRNFYEPQIITTDNTFVSGNCDVVIGIVNNTVYDPLQPELDSGGGGSDIDPYKEFGSSYQLLNFLPLDFFPDLNALVDTATALYEEELTGREHCSPHHTAIRQALVCWDELTKLIAWMSSNITSEQVRTIIVNHVNDTWGLKVRQSLWFHLSCLTFGQHTVQEFLVSFGVWIRTPAPYRPPNAPILSTLPEHTVIC

SEQ ID NO: 11410 - protein, 1301 aa, Artificial Sequence
  SARS-CoV-2/Tianmen/HBCDC-HB-07/2020__EPI_ISL_412983 spike protein (1-1147)(F970C_G999C) WhcAg construct
MFVFLVLLPLVSSQCVNLTTRTQLPPAYTNSFTRGVYYPDKVFRSSVLHSTQDLFLPFFSNVTWFHAIHVSGTNGTKRFDNPVLPFNDGVYFASTEKSNIIRGWIFGTTLDSKTQSLLIVNNATNVVIKVCEFQFCNDPFLGVYYHKNNKSWMESEFRVYSSANNCTFEYVSQPFLMDLEGKQGNFKNLREFVFKNIDGYFKIYSKHTPINLVRDLPQGFSALEPLVDLPIGINITRFQTLLALHRSYLTPGDSSSGWTAGAAAYYVGYLQPRTFLLKYNENGTITDAVDCALDPLSETKCTLKSFTVEKGIYQTSNFRVQPTESIVRFPNITNLCPFGEVFNATRFASVYAWNRKRISNCVADYSVLYNSASFSTFKCYGVSPTKLNDLCFTNVYADSFVIRGDEVRQIAPGQTGKIADYNYKLPDDFTGCVIAWNSNNLDSKVGGNYNYLYRLFRKSNLKPFERDISTEIYQAGSTPCNGVEGFNCYFPLQSYGFQPTNGVGYQPYRVVVLSFELLHAPATVCGPKKSTNLVKNKCVNFNFNGLTGTGVLTESNKKFLPFQQFGRDIADTTDAVRDPQTLEILDITPCSFGGVSVITPGTNTSNQVAVLYQDLNCTEVPVAIHADQLTPTWRVYSTGSNVFQTRAGCLIGAEHVNNSYECDIPIGAGICASYQTQTNSPRRARSVASQSIIAYTMSLGAENSVAYSNNSIAIPTNFTISVTTEILPVSMTKTSVDCTMYICGDSTECSNLLLQYGSFCTQLNRALTGIAVEQDKNTQEVFAQVKQIYKTPPIKDFGGFNFSQILPDPSKPSKRSFIEDLLFNKVTLADAGFIKQYGDCLGDIAARDLICAQKFNGLTVLPPLLTDEMIAQYTSALLAGTITSGWTFGAGAALQIPFAMQMAYRFNGIGVTQNVLYENQKLIANQFNSAIGKIQDSLSSTASALGKLQDVVNQNAQALNTLVKQLSSNCGAISSVLNDILSRLDKVEAEVQIDRLITCRLQSLQTYVTQQLIRAAEIRASANLAATKMSECVLGQSKRVDFCGKGYHLMSFPQSAPHGVVFLHVTYVPAQEKNFTTAPAICHDGKAHFPREGVFVSNGTHWFVTQRNFYEPQIITTDNTFVSGNCDVVIGIVNNTVYDPLQPELDSGGGGSDIDPYKEFGSSYQLLNFLPLDFFPDLNALVDTATALYEEELTGREHCSPHHTAIRQALVCWDELTKLIAWMSSNITSEQVRTIIVNHVNDTWGLKVRQSLWFHLSCLTFGQHTVQEFLVSFGVWIRTPAPYRPPNAPILSTLPEHTVIC

SEQ ID NO: 11411 - protein, 1301 aa, Artificial Sequence
  SARS-CoV-2/Hong Kong/case42_VM20002493/2020__EPI_ISL_414527 spike protein (1-1147)(F970C_G999C) WhcAg construct
MFVFLVLLPLVSSQCVNLTTRTQLPPAYTNSFTRGVYYPDKVFRSSVLHSTQDLFLPFFSNVTWFHAIHVSGTNGTKRFDNPVLPFNDGVYFASTEKSNIIRGWIFGTTLDSKTQSLLIVNNATNVVIKVCEFQFCNDPFLGVYYHKNNKSWMESEFRVYSSANNCTFEYVSQPFLMDLEGKQGNFKNLREFVFKNIDGYFKIYSKHTPINLVRDLPQGFSALEPLVDLPIGINITRFQTLLALHRSYLTPGDSSSGWTAGAAAYYVGYLQPRTFLLKYNENGTITDAVDCALDPLSETKCTLKSFTVEKGIYQTSNFRVQPTESIVRFPNITNLCPFGEVFNATRFASVYAWNRKRISNCVADYSVLYNSASFSTFKCYGVSPTKLNDLCFTNVYADSFVIRGDEVRQIAPGQTGKIADYNYKLPDDFTGCVIAWNSNNLDSKVGGNYNYLYRLFRKSNLKPFERDISTEIYQAGSTPCNGVEGFNCYFPLQSYGFQPTNGVGYQPYRVVVLSFELLHAPATVCGPKKSTNLVKNKCVNFNFNGLTGTGVLTESNKKFLPFQQFGRDIADTTDAVRDPQTLEILDITPCSFGGVSVITPGTNTSNQVAVLYQDVNCTEVPVAIHADQLTPTWRVYSTGSNVFQTRAGCLIGAEHVNNSYECDIPIGAGICASYQTQTNSPRRARSVASQSIIAYTMSLGAENSVAYSNNSIAIPTNFAISVTTEILPVSMTKTSVDCTMYICGDSTECSNLLLQYGSFCTQLNRALTGIAVEQDKNTQEVFAQVKQIYKTPPIKDFGGFNFSQILPDPSKPSKRSFIEDLLFNKVTLADAGFIKQYGDCLGDIAARDLICAQKFNGLTVLPPLLTDEMIAQYTSALLAGTITSGWTFGAGAALQIPFAMQMAYRFNGIGVTQNVLYENQKLIANQFNSAIGKIQDSLSSTASALGKLQDVVNQNAQALNTLVKQLSSNCGAISSVLNDILSRLDKVEAEVQIDRLITCRLQSLQTYVTQQLIRAAEIRASANLAATKMSECVLGQSKRVDFCGKGYHLMSFPQSAPHGVVFLHVTYVPAQEKNFTTAPAICHDGKAHFPREGVFVSNGTHWFVTQRNFYEPQIITTDNTFVSGNCDVVIGIVNNTVYDPLQPELDSGGGGSDIDPYKEFGSSYQLLNFLPLDFFPDLNALVDTATALYEEELTGREHCSPHHTAIRQALVCWDELTKLIAWMSSNITSEQVRTIIVNHVNDTWGLKVRQSLWFHLSCLTFGQHTVQEFLVSFGVWIRTPAPYRPPNAPILSTLPEHTVIC

SEQ ID NO: 11412 - protein, 1301 aa, Artificial Sequence
  SARS-CoV-2/USA/CruiseA-23/2020__EPI_ISL_414482 spike protein (1-1147)(F970C_G999C) WhcAg construct
MFVFLVLLPLVSSQCVNLTTRTQLPPAYTNSFTRGVYYPDKVFRSSVLHSTQDLFLPFFSNVTWFHAIHVSGTNGTKRFDNPVLPFNDGVYFASTEKSNIIRGWIFGTTLDSKTQSLLIVNNATNVVIKVCEFQFCNDPFLGVYYHKNNKSWMESEFRVYSSANNCTFEYVSQPFLMDLEVKQGNFKNLREFVFKNIDGYFKIYSKHTPINLVRDLPQGFSALEPLVDLPIGINITRFQTLLALHRSYLTPGDSSSGWTAGAAAYYVGYLQPRTFLLKYNENGTITDAVDCALDPLSETKCTLKSFTVEKGIYQTSNFRVQPTESIVRFPNITNLCPFGEVFNATRFASVYAWNRKRISNCVADYSVLYNSASFSTFKCYGVSPTKLNDLCFTNVYADSFVIRGDEVRQIAPGQTGKIADYNYKLPDDFTGCVIAWNSNNLDSKVGGNYNYLYRLFRKSNLKPFERDISTEIYQAGSTPCNGVEGFNCYFPLQSYGFQPTNGVGYQPYRVVVLSFELLHAPATVCGPKKSTNLVKNKCVNFNFNGLTGTGVLTESNKKFLPFQQFGRDIADTTDAVRDPQTLEILDITPCSFGGVSVITPGTNTSNQVAVLYQDVNCTEVPVAIHADQLTPTWRVYSTGSNVFQTRAGCLIGAEHVNNSYECDIPIGAGICASYQTQTNSPRRARSVASQSIIAYTMSLGAENSVAYSNNSIAIPTNFTISVTTEILPVSMTKTSVDCTMYICGDSTECSNLLLQYGSFCTQLNRALTGIAVEQDKNTQEVFAQVKQIYKTPPIKDFGGFNFSQILPDPSKPSKRSFIEDLLFNKVTLADAGFIKQYGDCLGDIAARDLICAQKFNGLTVLPPLLTDEMIAQYTSALLAGTITSGWTFGAGAALQIPFAMQMAYRFNGIGVTQNVLYENQKLIANQFNSAIGKIQDSLSSTASALGKLQDVVNQNAQALNTLVKQLSSNCGAISSVLNDILSRLDKVEAEVQIDRLITCRLQSLQTYVTQQLIRAAEIRASANLAATKMSECVLGQSKRVDFCGKGYHLMSFPQSAPHGVVFLHVTYVPAQEKNFTTAPAICHDGKAHFPREGVFVSNGTHWFVTQRNFYEPQIITTDNTFVSGNCDVVIGIVNNTVYDPLQPELDSGGGGSDIDPYKEFGSSYQLLNFLPLDFFPDLNALVDTATALYEEELTGREHCSPHHTAIRQALVCWDELTKLIAWMSSNITSEQVRTIIVNHVNDTWGLKVRQSLWFHLSCLTFGQHTVQEFLVSFGVWIRTPAPYRPPNAPILSTLPEHTVIC

SEQ ID NO: 11413 - protein, 1301 aa, Artificial Sequence
  SARS-CoV-2/Hong Kong/case85_VM20002868/2020__EPI_ISL_414519 spike protein (1-1147)(F970C_G999C) WhcAg construct
MFVFLVLVPLVSSQCVNLTTRTQLPPAYTNSFTRGVYYPDKVFRSSVLHSTQDLFLPFFSNVTWFHAIHVSGTNGTKRFDNPVLPFNDGVYFASTEKSNIIRGWIFGTTLDSKTQSLLIVNNATNVVIKVCEFQFCNDPFLGVYYHKNNKSWMESEFRVYSSANNCTFEYVSQPFLMDLEGKQGNFKNLREFVFKNIDGYFKIYSKHTPINLVRDLPQGFSALEPLVDLPIGINITRFQTLLALHRSYLTPGDSSSGWTAGAAAYYVGYLQPRTFLLKYNENGTITDAVDCALDPLSETKCTLKSFTVEKGIYQTSNFRVQPTESIVRFPNITNLCPFGEVFNATRFASVYAWNRKRISNCVADYSVLYNSASFSTFKCYGVSPTKLNDLCFTNVYADSFVIRGDEVRQIAPGQTGKIADYNYKLPDDFTGCVIAWNSNNLDSKVGGNYNYLYRLFRKSNLKPFERDISTEIYQAGSTPCNGVEGFNCYFPLQSYGFQPTNGVGYQPYRVVVLSFELLHAPATVCGPKKSTNLVKNKCVNFNFNGLTGTGVLTESNKKFLPFQQFGRDIADTTDAVRDPQTLEILDITPCSFGGVSVITPGTNTSNQVAVLYQDVNCTEVPVAIHADQLTPTWRVYSTGSNVFQTRAGCLIGAEHVNNSYECDIPIGAGICASYQTQTNSPRRARSVASQSIIAYTMSLGAENSVAYSNNSIAIPTNFTISVTTEILPVSMTKTSVDCTMYICGDSTECSNLLLQYGSFCTQLNRALTGIAVEQDKNTQEVFAQVKQIYKTPPIKDFGGFNFSQILPDPSKPSKRSFIEDLLFNKVTLADAGFIKQYGDCLGDIAARDLICAQKFNGLTVLPPLLTDEMIAQYTSALLAGTITSGWTFGAGAALQIPFAMQMAYRFNGIGVTQNVLYENQKLIANQFNSAIGKIQDSLSSTASALGKLQDVVNQNAQALNTLVKQLSSNCGAISSVLNDILSRLDKVEAEVQIDRLITCRLQSLQTYVTQQLIRAAEIRASANLAATKMSECVLGQSKRVDFCGKGYHLMSFPQSAPHGVVFLHVTYVPAQEKNFTTAPAICHDGKAHFPREGVFVSNGTHWFVTQRNFYEPQIITTDNTFVSGNCDVVIGIVNNTVYDPLQPELDSGGGGSDIDPYKEFGSSYQLLNFLPLDFFPDLNALVDTATALYEEELTGREHCSPHHTAIRQALVCWDELTKLIAWMSSNITSEQVRTIIVNHVNDTWGLKVRQSLWFHLSCLTFGQHTVQEFLVSFGVWIRTPAPYRPPNAPILSTLPEHTVIC

SEQ ID NO: 11414 - protein, 1301 aa, Artificial Sequence; identical to SEQ ID NO: 11404
  SARS-CoV-2/England/200990660/2020__EPI_ISL_414523 spike protein (1-1147)(F970C_G999C) WhcAg construct

SEQ ID NO: 11415 - protein, 1301 aa, Artificial Sequence
  SARS-CoV-2/Australia/NSW09/2020__EPI_ISL_413595 spike protein (1-1147)(F970C_G999C) WhcAg construct
MFVFLVLLPLVSSQCVNLTTRTQLPPAYTNSFTRGVYYPDKVFRSSVLHSTQDLFLPFFSNVTWFHAIHVSGTNGTKRFDNPVLPFNDGVYFASTEKSNIIRGWIFGTTLDSKTQSLLIVNNATNVVIKVCEFQFCNDPFLGVYYHKNNKSWMESEFRVYSSANNCTFEYVSQPFLMDLEGKQGNFKNLREFVFKNIDGYFKIYSKHTPINLVRDLPQGFSALEPLVDLPIGINITRFQTLLALHRSYLTPGDSSSGWTAGAAAYYVGYLQPRTFLLKYNENGTITDAVDCALDPLSETKCTLKSFTVEKGIYQTSNFRVQPTESIVRFPNITNLCPFGEVFNATRFASVYAWNRKRISNCVADYSVLYNSASFSTFKCYGVSPTKLNDLCFTNVYADSFVIRGDEVRQIAPGQTGKIADYNYKLPDDFTGCVIAWNSNNLDSKVGGNYNYLYRLFRKSNLKPFERDISTEIYQAGSTPCNGVEGFNCYFPLQSYGFQPTNGVGYQPYRVVVLSFELLHAPATVCGPKKSTNLVKNKCVNFNFNGLTGTGVLTESNKKFLPFQQFGRDIADTTDAVRDPQTLEILDITPCSFGGVSVITPGTNTSNQVAVLYQDVNCTEVPVAIHADQLTPTWRVYSTGSNVFQTRAGCLIGAEHVNNSYECDIPIGAGICASYQTQTNSPRRARSVASQSIIAYTMSLGAENSVAYSNNSIAIPTNFTISVTTEILPVSMTKTSVDCTMYICGDSTECSNLLLQYGSFCTQLNRALTGIAVEQDKNTQEVFAQVKQIYKTPPIKDFGGFNFSQILPDPSKPSKRSFIEDLLFNKVTLADAGFIKQYGDCLGDIAARDLICAQKFNGLTVLPPLLTDEMIAQYTSALLAGTITSGWTFGAGAALQIPFAMQMAYRFNGIGVTQNVLYENQKLIANQFNSAIGKIQDSLSFTASALGKLQDVVNQNAQALNTLVKQLSSNCGAISSVLNDILSRLDKVEAEVQIDRLITCRLQSLQTYVTQQLIRAAEIRASANLAATKMSECVLGQSKRVDFCGKGYHLMSFPQSAPHGVVFLHVTYVPAQEKNFTTAPAICHDGKAHFPREGVFVSNGTHWFVTQRNFYEPQIITTDNTFVSGNCDVVIGIVNNTVYDPLQPELDSGGGGSDIDPYKEFGSSYQLLNFLPLDFFPDLNALVDTATALYEEELTGREHCSPHHTAIRQALVCWDELTKLIAWMSSNITSEQVRTIIVNHVNDTWGLKVRQSLWFHLSCLTFGQHTVQEFLVSFGVWIRTPAPYRPPNAPILSTLPEHTVIC

SEQ ID NO: 11416 - protein, 1301 aa, Artificial Sequence; identical to SEQ ID NO: 11396
  SARS-CoV-2/Australia/NSW10/2020__EPI_ISL_413596 spike protein (1-1147)(F970C_G999C) WhcAg construct

SEQ ID NO: 11417 - protein, 1301 aa, Artificial Sequence
  SARS-CoV-2/Switzerland/1000477797/2020__EPI_ISL_413023 spike protein (1-1147)(F970C_G999C) WhcAg construct
MFVFLVLLPLVSSQCVNLTTRTQLPPAYTNSFTRGVYYPDKVFRSSVLHSTQDLFLPFFSNVTWFHAIHVSGTNGTKRFDNPVLPFNDGVYFASTEKSNIIRGWIFGTTLDSKTQSLLIVNNATNVVIKVCEFQFCNDPFLGVYYHKNNKSWMESEFRVYSSANNCTFEYVSQPFLMDLEGKQGNFKNLREFVFKNIDGYFNIYSKHTPINLVRDLPQGFSALEPLVDLPIGINITRFQTLLALHRSYLTPGDSSSGWTAGAAAYYVGYLQPRTFLLKYNENGTITDAVDCALDPLSETKCTLKSFTVEKGIYQTSNFRVQPTESIVRFPNITNLCPFGEVFNATRFASVYAWNRKRISNCVADYSVLYNSASFSTFKCYGVSPTKLNDLCFTNVYADSFVIRGDEVRQIAPGQTGKIADYNYKLPDDFTGCVIAWNSNNLDSKVGGNYNYLYRLFRKSNLKPFERDISTEIYQAGSTPCNGVEGFNCYFPLQSYGFQPTNGVGYQPYRVVVLSFELLHAPATVCGPKKSTNLVKNKCVNFNFNGLTGTGVLTESNKKFLPFQQFGRDIADTTDAVRDPQTLEILDITPCSFGGVSVITPGTNTSNQVAVLYQGVNCTEVPVAIHADQLTPTWRVYSTGSNVFQTRAGCLIGAEHVNNSYECDIPIGAGICASYQTQTNSPRRARSVASQSIIAYTMSLGAENSVAYSNNSIAIPTNFTISVTTEILPVSMTKTSVDCTMYICGDSTECSNLLLQYGSFCTQLNRALTGIAVEQDKNTQEVFAQVKQIYKTPPIKDFGGFNFSQILPDPSKPSKRSFIEDLLFNKVTLADAGFIKQYGDCLGDIAARDLICAQKFNGLTVLPPLLTDEMIAQYTSALLAGTITSGWTFGAGAALQIPFAMQMAYRFNGIGVTQNVLYENQKLIANQFNSAIGKIQDSLSSTASALGKLQDVVNQNAQALNTLVKQLSSNCGAISSVLNDILSRLDKVEAEVQIDRLITCRLQSLQTYVTQQLIRAAEIRASANLAATKMSECVLGQSKRVDFCGKGYHLMSFPQSAPHGVVFLHVTYVPAQEKNFTTAPAICHDGKAHFPREGVFVSNGTHWFVTQRNFYEPQIITTDNTFVSGNCDVVIGIVNNTVYDPLQPELDSGGGGSDIDPYKEFGSSYQLLNFLPLDFFPDLNALVDTATALYEEELTGREHCSPHHTAIRQALVCWDELTKLIAWMSSNITSEQVRTIIVNHVNDTWGLKVRQSLWFHLSCLTFGQHTVQEFLVSFGVWIRTPAPYRPPNAPILSTLPEHTVIC

SEQ ID NO: 11418 - protein, 1301 aa, Artificial Sequence
  SARS-CoV-2/Belgium/BA-02291/2020__EPI_ISL_415159 spike protein (1-1147)(F970C_G999C) WhcAg construct
MFVFLVLLPLVSSQCVNLTTRTQLPPAYTNSFTRGVYYPDKVFRSSVLHSTQDLFLPFFSNVTWFHAIHVSGTNGTKRFDNPVLPFNDGVYFASTEKSNIIRGWIFGTTLDSKTQSLLIVNNATNVVIKVCEFQFCNDPFLGVYYHKNNKSWMESEFRVYSSANNCTFEYVSQPFLMDLEGKQGNFKNLREFVFKNIDGYFKIYSKHTPINLVRDLPQGFSALEPLVDLPIGINITRFQTLLALHRSYLTPGDSSSGWTAGAAAYYVGYLQPRTFLLKYNENGTITDAVDCALDPLSETKCTLKSFTVEKGIYQTSNFRVQPTESIVRFPNITNLCPFGEVFNATRFASVYAWNRKRISNCVADYSVLYNSASFSTFKCYGVSPTKLNDLCFTNVYADSFVIRGDEVRQIAPGQTGKIADYNYKLPDDFTGCVIAWNSNNLDSKVGGNYNYLYRLFRRSNLKPFERDISTEIYQAGSTPCNGVEGFNCYFPLQSYGFQPTNGVGYQPYRVVVLSFELLPAPATVCGPKKSTNLVKNKCVNFNFNGLTGTGVLTESNKKFLPFQQFGRDIADTTDAVRDPQTLEILDITPCSFGGVSVITPGTNTSNQVAVLYQGVNCTEVPVAIHADQLTPTWRVYSTGSNVFQTRAGCLIGAEHVNNSYECDIPIGAGICASYQTQTNSPRRARSVASQSIIAYTMSLGAENSVAYSNNSIAIPTNFTISVTTEILPVSMTKTSVDCTMYICGDSTECSNLLLQYGSFCTQLNRALTGIAVEQDKNTQEVFAQVKQIYKTPPIKDFGGFNFSQILPDPSKPSKRSFIEDLLFNKVTLADAGFIKQYGDCLGDIAARDLICAQKFNGLTVLPPLLTDEMIAQYTSALLAGTITSGWTFGAGAALQIPFAMQMAYRFNGIGVTQNVLYENQKLIANQFNSAIGKIQDSLSSAAPALGKLQDVVNQNAQALNTLVKQLSSNCGAISSVLNDILSRLDKVEAEVQIDRLITCRLQSLQTYVTQQLIRAAEIRASANLAATKMSECVLGQSKRVDFCGKGYHLMSFPQSAPHGVVFLHVTYVPAQEKNFTTAPAICHDGKAHFPREGVFVSNGTHWFVTQRNFYEPQIITTDNTFVSGNCDVVIGIVNNTVYDPLQPELDSGGGGSDIDPYKEFGSSYQLLNFLPLDFFPDLNALVDTATALYEEELTGREHCSPHHTAIRQALVCWDELTKLIAWMSSNITSEQVRTIIVNHVNDTWGLKVRQSLWFHLSCLTFGQHTVQEFLVSFGVWIRTPAPYRPPNAPILSTLPEHTVIC

SEQ ID NO: 11419 - protein, 1301 aa, Artificial Sequence
  SARS-CoV-2/USA/WA8-UW5/2020__EPI_ISL_413486 spike protein (1-1147)(F970C_G999C) WhcAg construct
MFVFLVLLPLVSSQCVNLTTRTQLPPAYTNSFTRGVYYPDKVFRSSVLHSTQDLFLPFFSNVTWFHAIHVSGTNGTKRFDNPVLPFNDGVYFASTEKSNIIRGWIFGTTLDSKTQSLLIVNNATNVVIKVCEFQFCNDPFLGVYYHKNNKSWMESEFRVYSSANNCTFEYVSQPFLMDLEGKQGNFKNLREFVFKNIDGYFKIYSKHTPINLVRDLPQGFSALEPLVDLPIGINITRFQTLLALHRSYLTPGDSSSGWTAGAAAYYVGYLQPRTFLLKYNENGTITDAVDCALDPLSETKCTLKSFTVEKGIYQTSNFRVQPTESIVRFPNITNLCPFGEVFNATRFASVYAWNRKRISNCVADYSVLYNSASFSTFKCYGVSPTKLNDLCFTNVYADSFVIRGDEVRQIAPGQTGKIADYNYKLPDDFTGCVIAWNSNNLDSKVGGNYNYLYRLFRKSNLKPFERDISTEIYQAGSTPCNGVEGFNCYFPLQSYGFQPTNGVGYQPYRVVVLSFELLHAPATVCGPKKSTNLVKNKCVNFNFNGLTGTGVLTESNKKFLPFQQFGRDIADTTDAVRDPQTLEILDITPCSFGGVSVITPGTNTSNQVAVLYQDVNCTEVPVAIHADQLTPTWRVYSTGSNVFQTRAGCLIGAEYVNNSYECDIPIGAGICASYQTQTNSPRRARSVASQSIIAYTMSLGAENSVAYSNNSIAIPTNFTISVTTEILPVSMTKTSVDCTMYICGDSTECSNLLLQYGSFCTQLNRALTGIAVEQDKNTQEVFAQVKQIYKTPPIKDFGGFNFSQILPDPSKPSKRSFIEDLLFNKVTLADAGFIKQYGDCLGDIAARDLICAQKFNGLTVLPPLLTDEMIAQYTSALLAGTITSGWTFGAGAALQIPFAMQMAYRFNGIGVTQNVLYENQKLIANQFNSAIGKIQDSLSSTASALGKLQDVVNQNAQALNTLVKQLSSNCGAISSVLNDILSRLDKVEAEVQIDRLITCRLQSLQTYVTQQLIRAAEIRASANLAATKMSECVLGQSKRVDFCGKGYHLMSFPQSAPHGVVFLHVTYVPAQEKNFTTAPAICHDGKAHFPREGVFVSNGTHWFVTQRNFYEPQIITTDNTFVSGNCDVVIGIVNNTVYDPLQPELDSGGGGSDIDPYKEFGSSYQLLNFLPLDFFPDLNALVDTATALYEEELTGREHCSPHHTAIRQALVCWDELTKLIAWMSSNITSEQVRTIIVNHVNDTWGLKVRQSLWFHLSCLTFGQHTVQEFLVSFGVWIRTPAPYRPPNAPILSTLPEHTVIC

SEQ ID NO: 11420 - protein, 1301 aa, Artificial Sequence
  SARS-CoV-2/England/20102000506/2020__EPI_ISL_415147 spike protein (1-1147)(F970C_G999C) WhcAg construct
MFVFLVLLPLVSSQCVNLTTRTQLPPAYTNSFTRGVYYPDKVFRSSVLHSTQDLFLPFFSNVTWFHAIHVSGTNGTKRFDNPVLPFNDGVYFASTEKSNIIRGWIFGTTLDSKTQSLLIVNNATNVVIKVCEFQFCNDPFLGVYYHKNNKSWMESEFRVYSSANNCTFEYVSQPFLMDLEGKQGNFKNLREFVFKNIDGYFKIYSKHTPINLVRDLPQGFSALEPLVDLPIGINITRFQTLLALHRSYLTPGDSSSGWTAGAAAYYVGYLQPRTFLLKYNENGTITDAVDCALDPLSETKCTLKSFTVEKGIYQTSNFRVQPTESIVRFPNITNLCPFGEVFNATRFASVYAWNRKRISNCVADYSVLYNSASFSTFKCYGVSPTKLNDLCFTNVYADSFVIRGDEVRQIAPGQTGKIADYNYKLPDDFTGCVIAWNSNNLDSKVGGNYNYLYRLFRKSNLKPFERDISTEIYQAGSTPCNGVEGFNCYFPLQSYGFQPTNGVGYQPYRVVVLSFELLHAPATVCGPKKSTNLVKNKCVNFNFNGLTGTGVLTESNKKFLPFQQFGRDIADTTDAVRDPQTLEILDITPCSFGGVSVITPGTNTSNQVAVLYQGVNCTEVPVAIHADQLTPTWRVYSTGSNVFQTRAGCLIGAEHVNNSYECDIPIGAGICASYQTQTNSPRRARSVASQSIIAYTMSLGAENSVAYSNNSIAIPTNFTISVTTEILPVSMTKTSVDCTMYICGDSTECSNLLLQYGSFCTQLNRALTGIAVEQDKNTQEVFAQVKQIYKTPPIKDFGGFNFSQILPDPSKPSKRSFIEDLLFNKVTLADAGFIKQYGYCLGDIAARDLICAQKFNGLTVLPPLLTDEMIAQYTSALLAGTITSGWTFGAGAALQIPFAMQMAYRFNGIGVTQNVLYENQKLIANQFNSAIGKIQDSLSSTASALGKLQDVVNQNAQALNTLVKQLSSNCGAISSVLNDILSRLDKVEAEVQIDRLITCRLQSLQTYVTQQLIRAAEIRASANLAATKMSECVLGQSKRVDFCGKGYHLMSFPQSAPHGVVFLHVTYVPAQEKNFTTAPAICHDGKAHFPREGVFVSNGTHWFVTQRNFYEPQIITTDNTFVSGNCDVVIGIVNNTVYDPLQPELDSGGGGSDIDPYKEFGSSYQLLNFLPLDFFPDLNALVDTATALYEEELTGREHCSPHHTAIRQALVCWDELTKLIAWMSSNITSEQVRTIIVNHVNDTWGLKVRQSLWFHLSCLTFGQHTVQEFLVSFGVWIRTPAPYRPPNAPILSTLPEHTVIC

SEQ ID NO: 11421 - protein, 1301 aa, Artificial Sequence
  SARS-CoV-2/Belgium/VAG-03013/2020__EPI_ISL_415155 spike protein (1-1147)(F970C_G999C) WhcAg construct
MFVFLVLLPLVSSQCVNLTTRTQLPPAYTNSFTRGVYYPDKVFRSSVLHSTQDLFLPFFSNVTWFHAIHVSGTNGTKRFDNPVLPFNDGVYFASTEKSNIIRGWIFGTTLDSKTQSLLIVNNATNVVIKVCEFQFCNDPFLGVYYHKNNKSWMESEFRVYSSANNCTFEYVSQPFLMDLEGKQGNFKNLREFVFKNIDGYFKIYSKHTPINLVRDLPQGFSALEPLVDLPIGINITRFQTLLALHRSYLTPGDSSSGWTAGAAAYYVGYLQPRTFLLKYNENGTITDAVDCALDPLSETKCTLKSFTVEKGIYQTSNFRVQPTESIVRFPNITNLCPFGEVFNATRFASVYAWNRKRISNCVADYSVLYNSASFSTFKCYGVSPTKLNDLCFTNVYADSFVIRGDEVRQIAPGQTGKIADYNYKLPDDFTGCVIAWNSNNLDSKVGGNYNYLYRLFRKSNLKPFERDISTEIYQAGSTPCNGVEGFNCYFPLQSYGFQPTNGVGYQPYRVVVLSFELLHAPATVCGPKKSTNLVKNKCVNFNFNGLTGTGVLTESNKKFLPFQQFGRDIADTTDAVRDPQTLEILDITPCSFGGVSVITPGTNTSNQVAVLYQGVNCTEVPVAIHADQLTPTWRVYSTGSNVFQTRAGCLIGAEHVNNSYECDIPIGAGICASYQTQTNSPRRARSVASQSIIAYTMSLGAENSVAYSNNSIAIPTNFTISVTTEILPVSMTKTSVDCTMYICGDSTECSNLLLQYGSFCTQLNRALTGIAVEQDKNTQEVFAQVKQIYKTPPIKDFGGFNFSQILPDPSKPSKRSFIEDLLFNKVTLADAGFIKQYGDCLGDIAARDLICAQKFNGLTVLPPLLTDEMIAQYTSALLAGTITSGWTFGAGAALQIPFAMQMAYRFNGIGVTQNVLYENQKLIANQFNSAIGKIQDSLSSTATALGKLQDVVNQNAQALNTLVKQLSSNCGAISSVLNDILSRLDKVEAEVQIDRLITCRLQSLQTYVTQQLIRAAEIRASANLAATKMSECVLGQSKRVDFCGKGYHLMSFPQSAPHGVVFLHVTYVPAQEKNFTTAPAICHDGKAHFPREGVFVSNGTHWFVTQRNFYEPQIITTDNTFVSGNCDVVIGIVNNTVYDPLQPELDSGGGGSDIDPYKEFGSSYQLLNFLPLDFFPDLNALVDTATALYEEELTGREHCSPHHTAIRQALVCWDELTKLIAWMSSNITSEQVRTIIVNHVNDTWGLKVRQSLWFHLSCLTFGQHTVQEFLVSFGVWIRTPAPYRPPNAPILSTLPEHTVIC

SEQ ID NO: 11422 - protein, 1301 aa, Artificial Sequence
  SARS-CoV-2/Belgium/BC-03016/2020__EPI_ISL_415157 spike protein (1-1147)(F970C_G999C) WhcAg construct
MFVFLVLLPLVSSQCVNLTTRTQLPPAYTNSFTRGVYYPDKVFRSSVLHSTQDLFLPFFSNVTWFHAIHVSGTNGTKRFDNPVLPFNDGVYFASTEKSNIIRGWIFGTTLDSKTQSLLIVNNATNVVIKVCEFQFCNDPFLGVYYHKNNKSWMESEFRVYSSANNCTFEYVSQPFLMDLEGKQGNFKNLREFVFKNIDGYFKIYSKHTPINLVRDLPQGFSALEPLVDLPIGINITRFQTLLALHRSYLTPGDSSSGWTAGAAAYYVGYLQPRTFLLKYNENGTITDAVDCALDPLSETKCTLKSFTVEKGIYQTSNFRVQPTESIVRFPNITNLCPFGEVFNATRFASVYAWNRKRISNCVADYSVLYNSASFSTFKCYGVSPTKLNDLCFTNVYADSFVIRGDEVRQIAPGQTGKIADYNYKLPDDFTGCVIAWNSNNLDSKVGGNYNYLYRLFRKSNLKPFERDISTEIYQAGSTPCNGVEGFNCYFPLQSYGFQPTNGVGYQPYRVVVLSFELLHAPATVCGPKKSTNLVKNKCVNFNFNGLTGTGVLTESNKKFLPFQQFGRDIADTTDAVRDPQTLEILDITPCSFGGVSVITPGTNTSNQVAVLYQGVNCTEVPVAIHADQLTPTWRVYSTGSNVFQTRAGCLIGAEHVNNSYECDIPIGAGICASYQTQTNSPRRARSVASQSIIAYTMSLGAENSVAYSNNSIAIPTNFTISVTTEILPVSMTKTSVDCTMYICGDSTECSNLLLQYGSFCTQLNRALTGIAVEQDKNTQEVFAQVKQIYKTPPIKDFGGFNFSQILPDPSKPSKRSFIEDLLFNKVTLADAGFIKQYGDCLGDIAARDLICAQKFNGLTVLPPLLTDEMIAQYTSALLAGTITSGWTFGAGAALQIPFAMQMAYRFNGIGVTQNVLYENQKLIANQFNSAIGKIQDSLSSTAPALGKLQDVVNQNAQALNTLVKQLSSNCGAISSVLNDILSRLDKVEAEVQIDRLITCRLQSLQTYVTQQLIRAAEIRASANLAATKMSECVLGQSKRVDFCGKGYHLMSFPQSAPHGVVFLHVTYVPAQEKNFTTAPAICHDGKAHFPREGVFVSNGTHWFVTQRNFYEPQIITTDNTFVSGNCDVVIGIVNNTVYDPLQPELDSGGGGSDIDPYKEFGSSYQLLNFLPLDFFPDLNALVDTATALYEEELTGREHCSPHHTAIRQALVCWDELTKLIAWMSSNITSEQVRTIIVNHVNDTWGLKVRQSLWFHLSCLTFGQHTVQEFLVSFGVWIRTPAPYRPPNAPILSTLPEHTVIC

SEQ ID NO: 11423 - protein, 1301 aa, Artificial Sequence
  SARS-CoV-2/Germany/BavPat3/2020__EPI_ISL_414521 spike protein (1-1147)(F970C_G999C) WhcAg construct
MFVFLVLLPLVSSQCVNLTTRTQLPPAYTNSFTRGVYYPDKVFRSSVLHSTQDLFLPFFSNVTWFHAIHVSGTNGTKRFDNPVLPFNDGVYFASTEKSNIIRGWIFGTTLDSKTQSLLIVNNATNVVIKVCEFQFCNDPFLGVYYHKNNKSWMESEFRVYSSANNCTFEYVSQPFLMDLEGKQGNFKNLREFVFKNIDGYFKIYSKHTPINLVRDLPQGFSALEPLVDLPIGINITRFQTLLALHRSYLTPGDSSSGWTAGAAAYYVGYLQPRTFLLKYNENGTITDAVDCALDPLSETKCTLKSFTVEKGIYQTSNFRVQPTESIVRFPNITNLCPFGEVFNATRFASVYAWNRKRISNCVADYSVLYNSASFSTFKCYGVSPTKLNDLCFTNVYADSFVIRGDEVRQIAPGQTGKIADYNYKLPDDFTGCVIAWNSNNLDSKVGGNYNYLYRLFRKSNLKPFERDISTEIYQAGSTPCNGVEGFNCYFPLQSYGFQPTNGVGYQPYRVVVLSFELLHAPATVCGPKKSTNLVKNKCVNFNFNGLTGTGVLTESNKKFLPFQQFGRDIADTTDAVRDPQTLEILDITPCSFGGVSVITPGTNTSNQVAVLYQDVNCTEVPVAIHADQLTPTWRVYSTGSNVFQTRAGCLIGAEHVNNSYECDIPIGAGICASYQTQTNSPRRARSVASQSIIAYTMSLGAENSVAYSNNSIAIPTNFTISVTTEILPVSMTKTSVDCTMYICGDSTECSNLLLQYGSFCTQLNRALTGIAVEQDKNTQQVFAQVKQIYKTPPIKDFGGFNFSQILPDPSKPSKRSFIEDLLFNKVTLADAGFIKQYGDCLGDIAARDLICAQKFNGLTVLPPLLTDEMIAQYTSALLAGTITSGWTFGAGAALQIPFAMQMAYRFNGIGVTQNVLYENQKLIANQFNSAIGKIQDSLSSTASALGKLQDVVNQNAQALNTLVKQLSSNCGAISSVLNDILSRLDKVEAEVQIDRLITCRLQSLQTYVTQQLIRAAEIRASANLAATKMSECVLGQSKRVDFCGKGYHLMSFPQSAPHGVVFLHVTYVPAQEKNFTTAPAICHDGKAHFPREGVFVSNGTHWFVTQRNFYEPQIITTDNTFVSGNCDVVIGIVNNTVYDPLQPELDSGGGGSDIDPYKEFGSSYQLLNFLPLDFFPDLNALVDTATALYEEELTGREHCSPHHTAIRQALVCWDELTKLIAWMSSNITSEQVRTIIVNHVNDTWGLKVRQSLWFHLSCLTFGQHTVQEFLVSFGVWIRTPAPYRPPNAPILSTLPEHTVIC

SEQ ID NO: 11424 - protein, 1301 aa, Artificial Sequence
  SARS-CoV-2/France/HF1805/2020__EPI_ISL_414628 spike protein (1-1147)(F970C_G999C) WhcAg construct
MFVFLVLLPLVSSQCVNLTTRTQLPPAYTNSFTRGVYYPDKVFRSSVLHSTQDLFLPFFSNVTWFHAIHVSGTNGTKRFDNPVLPFNDGVYFASTEKSNIIRGWIFGTTLDSKTQSLLIVNNATNVVIKVCEFQFCNDPFLGVYYHKNNKSWMESEFRVYSSANNCTFEYVSQPFLMDLEGKQGNFKNLREFVFKNIDGYFKIYSKHTPINLVRDLPQGFSALEPLVDLPIGINITRFQTLLALHRSYLTPGDSSSGWTAGAAAYYVGYLQPRTFLLKYNENGTITDAVDCALDPLSETKCTLKSFTVEKGIYQTSNFRVQPTESIVRFPNITNLCPFGEVFNATRFASVYAWNRKRISNCVADYSVLYNSASFSTFKCYGVSPTKLNDLCFTNVYADSFVIRGDEVRQIAPGQTGKIADYNYKLPDDFTGCVIAWNSNNLDSKVGGNYNYLYRLFRKSNLKPFERDISTEIYQAGSTPCNGVEGFNCYFPLQSYGFQPTNGVGYQPYRVVVLSFELLHAPATVCGPKKSTNLVKNKCVNFNFNGLTGTGVLTESNKKFLPFQQFGRDIADTTDAVRDPQTLEILDITPCSFGGVSVITPGTNTSNQVAVLYQGVNCTEVPVAIHADQLTPTWRVYSTGSNVFQTRAGCLIGAEHVNNSYECDIPIGAGICASYQTQTNSPRRARSVASQSIIAYTMSLGAENSVAYSNNSIAIPTNFTISVTTEILPVSMTKTSVDCTMYICGDSTECSNLLLQYGSFCTQLNRALTGIAVEQDKNTQEVFAQVKQIYKTPPIKDFGGFNFSQILPDPSKPSKRSFIEDLLFNKVTLADAGFIKQYGDCLGDIAARDLICAQKFNGLTVLPPLLTDEMIAQYTSALLAGTITSGWTFGAGAALQIPFAMQMAYRFNGIGVTQNVLYENQKLIANQFNSAIGKIQDSLSSTASALGKLQDVVNQNAQALNTLVKQLSSNCGAISSVLNDILSRLDKVEAEVQIDRLITCRLQSLQTYVTQQLIRAAEIRASANLAATKMSECVLGQSKRVDFCGKGYHLMSFPQSAPHGVVFLHVTYVPAQEKNFTTAPAICHDGKAHFPREGVFVSNGTHWFVTQRNFYEPQIITTDNTFVSGNCDVVIGVVNNTVYDPLQPELDSGGGGSDIDPYKEFGSSYQLLNFLPLDFFPDLNALVDTATALYEEELTGREHCSPHHTAIRQALVCWDELTKLIAWMSSNITSEQVRTIIVNHVNDTWGLKVRQSLWFHLSCLTFGQHTVQEFLVSFGVWIRTPAPYRPPNAPILSTLPEHTVIC

SEQ ID NO: 11425 - protein, 1301 aa, Artificial Sequence
  SARS-CoV-2/Netherlands/ZuidHolland_9/2020__EPI_ISL_414445 spike protein (1-1147)(F970C_G999C) WhcAg construct
MFVFLVLLPLVSSQCVNLTTRTQLPPAYTNSFTRGVYYPDKVFRSSVLHSTQDLFLPFFSNVTWFHAIHVSGTNGTKRFDNPVLPFNDGVYFASTEKSNIIRGWIFGTTLDSKTQSLLIVNNATNVVIKVCEFQFCNDPFLGVYYHKNNKSWMESEFRVYSSANNCTFEYVSQPFLMDLEGKQGNFKNLREFVFKNIDGYFKIYSKHTPINLVRDLPQGFSALEPLVDLPIGINITRFQTLLALHRSYLTPGDSSSGWTAGAAAYYVGYLQPRTFLLKYNENGTITDAVDCALDPLSETKCTLKSFTVEKGIYQTSNFRVQPTESIVRFPNITNLCPFGEVFNATRFASVYAWNRKRISNCVADYSVLYNSASFSTFKCYGVSPTKLNDLCFTNVYADSFVIRGDEVRQIAPGQTGKIADYNYKLPDDFTGCVIAWNSNNLDSKVGGNYNYLYRLFRKSNLKPFERDISTEIYQAGSTPCNGVEGFNCYFPLQSYGFQPTNGVGYQPYRVVVLSFELLHAPATVCGPKKSTNLVKNKCVNFNFNGLTGTGVLTESNKKFLPFQQFGRDIADTTDAVRDPQTLEILDITPCSFGGVSVITPGTNTSNQVAVLYQGVNCTEVPVAIHADQLTPTWRVYSTGSNVFQTRAGCLIGAEHVNNSYECDIPIGAGICASYQTQTNSPRRARSVASQSIIAYTMSLGAENSVAYSNNSIAIPTNFTISVTTEILPVSMTKTSVDCTMYICGDSTECSNLLLQYGSFCTQLNRALTGIAVEQDKNTQEVFAQVKQIYKTPPIKDFGGFNFSQILPDPSKPSKRSFIEDLLFNKVTLADAGFIKQYGDCLGDIAARDLICVQKFNGLTVLPPLLTDEMIAQYTSALLAGTITSGWTFGAGAALQIPFAMQMAYRFNGIGVTQNVLYENQKLIANQFNSAIGKIQDSLSSTASALGKLQDVVNQNAQALNTLVKQLSSNCGAISSVLNDILSRLDKVEAEVQIDRLITCRLQSLQTYVTQQLIRAAEIRASANLAATKMSECVLGQSKRVDFCGKGYHLMSFPQSAPHGVVFLHVTYVPAQEKNFTTAPAICHDGKAHFPREGVFVSNGTHWFVTQRNFYEPQIITTDNTFVSGNCDVVIGIVNNTVYDPLQPELDSGGGGSDIDPYKEFGSSYQLLNFLPLDFFPDLNALVDTATALYEEELTGREHCSPHHTAIRQALVCWDELTKLIAWMSSNITSEQVRTIIVNHVNDTWGLKVRQSLWFHLSCLTFGQHTVQEFLVSFGVWIRTPAPYRPPNAPILSTLPEHTVIC

SEQ ID NO: 11426 - protein, 1301 aa, Artificial Sequence
  SARS-CoV-2/Finland/FIN03032020A/2020__EPI_ISL_413602 spike protein (1-1147)(F970C_G999C) WhcAg construct
MFVFLVLLPLVSSQCVNLTTRTQLPPAYTNSFTRGVYYPDKVFRSSVLHSTQDLFLPFFSNVTWFHAIHVSGTNGTKRFDNPVLPFNDGVYFASTEKSNIIRGWIFGTTLDSKTQSLLIVNNATNVVIKVCEFQFCNDPFLGVYYHKNNKSWMESEFRVYSSANNCTFEYVSQPFLMDLEGKQGNFKNLREFVFKNIDGYFKIYSKHTPINLVRDLPQGFSALEPLVDLPIGINITRFQTLLALHRSYLTPGDSSSGWTAGAAAYYVGYLQPRTFLLKYNENGTITDAVDCALDPLSETKCTLKSFTVEKGIYQTSNFRVQPTESIVRFPNITNLCPFGEVFNATRFASVYAWNRKRISNCVADYSVLYNSASFSTFKCYGVSPTKLNDLCFTNVYADSFVIRGDEVRQIAPGQTGKIADYNYKLPDDFTGCVISWNSNNLDSKVGGNYNYLYRLFRKSNLKPFERDISTEIYQAGSTPCNGVEGFNCYFPLQSYGFQPTNGVGYQPYRVVVLSFELLHAPATVCGPKKSTNLVKNKCVNFNFNGLTGTGVLTESNKKFLPFQQFGRDIADTTDAVRDPQTLEILDITPCSFGGVSVITPGTNTSNQVAVLYQGVNCTEVPVAIHADQLTPTWRVYSTGSNVFQTRAGCLIGAEHVNNSYECDIPIGAGICASYQTQTNSPRRARSVASQSIIAYTMSLGAENSVAYSNNSIAIPTNFTISVTTEILPVSMTKTSVDCTMYICGDSTECSNLLLQYGSFCTQLNRALTGIAVEQDKNTQEVFAQVKQIYKTPPIKDFGGFNFSQILPDPSKPSKRSFIEDLLFNKVTLADAGFIKQYGDCLGDIAARDLICAQKFNGLTVLPPLLTDEMIAQYTSALLAGTITSGWTFGAGAALQIPFAMQMAYRFNGIGVTQNVLYENQKLIANQFNSAIGKIQDSLSSTASALGKLQDVVNQNAQALNTLVKQLSSNCGAISSVLNDILSRLDKVEAEVQIDRLITCRLQSLQTYVTQQLIRAAEIRASANLAATKMSECVLGQSKRVDFCGKGYHLMSFPQSAPHGVVFLHVTYVPAQEKNFTTAPAICHDGKAHFPREGVFVSNGTHWFVTQRNFYEPQIITTDNTFVSGNCDVVIGIVNNTVYDPLQPELDSGGGGSDIDPYKEFGSSYQLLNFLPLDFFPDLNALVDTATALYEEELTGREHCSPHHTAIRQALVCWDELTKLIAWMSSNITSEQVRTIIVNHVNDTWGLKVRQSLWFHLSCLTFGQHTVQEFLVSFGVWIRTPAPYRPPNAPILSTLPEHTVIC

SEQ ID NO: 11427 - protein, 1301 aa, Artificial Sequence
  SARS-CoV-2/France/GE1977/2020__EPI_ISL_414632 spike protein (1-1147)(F970C_G999C) WhcAg construct
MFVFLVLLPLVSSQCVNLTTRTQLPPAYTNSFTRGVYYPDKVFRSSVLHSTQDLFLPFFSNVTWFHAIHVSGTNGTKRFDNPVLPFNDGVYFASTEKSNIIRGWIFGTTLDSKTQSLLIVNNATNVVIKVCEFQFCNDPFLGVYYHKNNKSWMESEFRVYSSANNCTFEYVSQPFLMDLEGKQGNFKNLREFVFKNIDGYFKIYSKHTPINLVRDLPQGFSALEPLVDLPIGINITRFQTLLALHRSYLTPGDSSSGWTAGAAAYYVGYLQPRTFLLKYNENGTITDAVDCALDPLSETKCTLKSFTVEKGIYQTSNFRVQPTESIVRFPNITNLCPFGEVFNATRFASVYAWNRKRISNCVADYSVLYNSASFSTFKCYGVSPTKLNDLCFTNVYADSFVIRGDEVRQIAPGQTGKIADYNYKLPDDFTGCVIAWNSNNLDSKVGGNYNYLYRLFRKSNLKPFERDISTEIYQAGSTPCNGVEGFNCYFPLQSYGFQPTNGVGYQPYRVVVLSFELLHAPATVCGPKKSTNLVKNKCVNFNFNGLTGTGVLTESNKKFLPFQQFGRDIADTTDAVRDPQTLEILDITPCSFGGVSVITPGTNTSNQVAVLYQGVNCTEVPVAIHADQLTPTWRVYSTGSNVFQTRAGCLIGAEHVNNSYECDIPIGAGICASYQTQTNSPRRARSVASQSIIAYTMSLGAENSVAYSNNSIAIPTNFTISVTTEILPVSMTKTSVDCTMYICGDSTECSNLLLQYGSFCTQLNRALTGIAVEQDKNTQEVFAQVKQIYKTPPIKDFGGFNFSQILPDPSKPSKRSFIEDLLFNKVTLADAGFIKQYGDCLGDIAARDLICAQKFNGLTVLPPLLTDEMIAQYTSALLAGTITSGWTFGAGAALQIPFAMQMAYRFNGIGVTQNVLYENQKLIANQFNSAIGKIQDSLFSTASALGKLQDVVNQNAQALNTLVKQLSSNCGAISSVLNDILSRLDKVEAEVQIDRLITCRLQSLQTYVTQQLIRAAEIRASANLAATKMSECVLGQSKRVDFCGKGYHLMSFPQSAPHGVVFLHVTYVPAQEKNFTTAPAICHDGKAHFPREGVFVSNGTHWFVTQRNFYEPQIITTDNTFVSGNCDVVIGIVNNTVYDPLQPELDSGGGGSDIDPYKEFGSSYQLLNFLPLDFFPDLNALVDTATALYEEELTGREHCSPHHTAIRQALVCWDELTKLIAWMSSNITSEQVRTIIVNHVNDTWGLKVRQSLWFHLSCLTFGQHTVQEFLVSFGVWIRTPAPYRPPNAPILSTLPEHTVIC

SEQ ID NO: 11428 - protein, 1301 aa, Artificial Sequence
  SARS-CoV-2/Finland/FIN-313/2020__EPI_ISL_414641 spike protein (1-1147)(F970C_G999C) WhcAg construct
MFVFLVLLPLVSSQCVNLTTRTQLPPAYTNSFTRGVYYPDKVFRSSVLHSTQDLFLPFFSNVTWFHAIHVSGTNGTKRFDNPVLPFNDGVYFASTEKSNIIRGWIFGTTLDSKTQSLLIVNNATNVVIKVCEFQFCNDPFLGVYYHKNNKSWMESEFRVYSSANNCTFEYVSQPFLMDLEGKQGNFKNLREFVFKNIDGYFKIYSKHTPINLVRDLPQGFSALEPLVDLPIGINITRFKTLLALHRSYLTPGDSSSGWTAGAAAYYVGYLQPRTFLLKYNENGTITDAVDCALDPLSETKCTLKSFTVEKGIYQTSNFRVQPTESIVRFPNITNLCPFGEVFNATRFASVYAWNRKRISNCVADYSVLYNSASFSTFKCYGVSPTKLNDLCFTNVYADSFVIRGDEVRQIAPGQTGKIADYNYKLPDDFTGCVIAWNSNNLDSKVGGNYNYLYRLFRKSNLKPFERDISTEIYQAGSTPCNGVEGFNCYFPLQSYGFQPTNGVGYQPYRVVVLSFELLHAPATVCGPKKSTNLVKNKCVNFNFNGLTGTGVLTESNKKFLPFQQFGRDIADTTDAVRDPQTLEILDITPCSFGGVSVITPGTNTSNQVAVLYQGVNCTEVPVAIHADQLTPTWRVYSTGSNVFQTRAGCLIGAEHVNNSYECDIPIGAGICASYQTQTNSPRRARSVASQSIIAYTMSLGAENSVAYSNNSIAIPTNFTISVTTEILPVSMTKTSVDCTMYICGDSTECSNLLLQYGSFCTQLNRALTGIAVEQDKNTQEVFAQVKQIYKTPPIKDFGGFNFSQILPDPSKPSKRSFIEDLLFNKVTLADAGFIKQYGDCLGDIAARDLICAQKFNGLTVLPPLLTDEMIAQYTSALLAGTITSGWTFGAGAALQIPFAMQMAYRFNGIGVTQNVLYENQKLIANQFNSAIGKIQDSLSSTASALGKLQDVVNQNAQALNTLVKQLSSNCGAISSVLNDILSRLDKVEAEVQIDRLITCRLQSLQTYVTQQLIRAAEIRASANLAATKMSECVLGQSKRVDFCGKGYHLMSFPQSAPHGVVFLHVTYVPAQEKNFTTAPAICHDGKAHFPREGVFVSNGTHWFVTQRNFYEPQIITTDNTFVSGNCDVVIGIVNNTVYDPLQPELDSGGGGSDIDPYKEFGSSYQLLNFLPLDFFPDLNALVDTATALYEEELTGREHCSPHHTAIRQALVCWDELTKLIAWMSSNITSEQVRTIIVNHVNDTWGLKVRQSLWFHLSCLTFGQHTVQEFLVSFGVWIRTPAPYRPPNAPILSTLPEHTVIC

SEQ ID NO: 11429 - protein, 1301 aa, Artificial Sequence
  SARS-CoV-2/Netherlands/ZuidHolland_2/2020__EPI_ISL_414556 spike protein (1-1147)(F970C_G999C) WhcAg construct
MFVFLVLLPLVSSQCVNLTTRTQLPPAYTNSFTRGVYYPDKVFRSSVLHSTQDLFLPFFSNVTWFHAIHVSGTNGTKRFDNPVLPFNDGVYFASTEKSNIIRGWIFGTTLDSKTQSLLIVNNATNVVIKVCEFQFCNDPFLGVYYHKNNKSWMESEFRVYSSANNCTFEYVSQPFLMDLEGKQGNFKNLREFVFKNIDGYFKIYSKHTPINLVRDLPQGFSALEPLVDLPIGINITRFQTLLALHRSYLTPGDSSSGWTAGAAAYYVGYLQPRTFLLKYNENGTITDAVDCALDPLSETKCTLKSFTVEKGIYQTSNFRVQPTESIVRFPNITNLCPFGEVFNATRFASVYAWNRKRISNCVADYSVLYNSASFSTFKCYGVSPTKLNDLCFTNVYADSFVIRGDEVRQIAPGQTGKIADYNYKLPDDFTGCVIAWNSNNLDSKVGGNYNYLYRLFRKSNLKPFERDISTEIYQAGSTPCNGVEGFNCYFPLQSYGFQPTNGVGYQPYRVVVLSFELLHAPATVCGPKKSTNLVKNKCVNFNFNGLTGTGVLTESNKKFLPFQQFGRDIADTTDAVRDPQTLEILDITPCSFGGVSVITPGTNTSNQVAVLYQGVNCTEVPVAIHADQLTPTWRVYSTGSNVFQTRAGCLIGAEHVNNSYECDIPIGAGICASYQTQTNSPRRARSVASQSIIAYTMSLGAENSVAYSNNSIAIPTNFTISVTTEILPVSMTKTSVDCTMYICGDSTECSNLLLQYGSFCTQLNRALTGIALEQDKNTQEVFAQVKQIYKTPPIKDFGGFNFSQILPDPSKPSKRSFIEDLLFNKVTLADAGFIKQYGDCLGDIAARDLICAQKFNGLTVLPPLLTDEMIAQYTSALLAGTITSGWTFGAGAALQIPFAMQMAYRFNGIGVTQNVLYENQKLIANQFNSAIGKIQDSLSSTASALGKLQDVVNQNAQALNTLVKQLSSNCGAISSVLNDILSRLDKVEAEVQIDRLITCRLQSLQTYVTQQLIRAAEIRASANLAATKMSECVLGQSKRVDFCGKGYHLMSFPQSAPHGVVFLHVTYVPAQEKNFTTAPAICHDGKAHFPREGVFVSNGTHWFVTQRNFYEPQIITTDNTFVSGNCDVVIGIVNNTVYDPLQPELDSGGGGSDIDPYKEFGSSYQLLNFLPLDFFPDLNALVDTATALYEEELTGREHCSPHHTAIRQALVCWDELTKLIAWMSSNITSEQVRTIIVNHVNDTWGLKVRQSLWFHLSCLTFGQHTVQEFLVSFGVWIRTPAPYRPPNAPILSTLPEHTVIC

SEQ ID NO: 11430 - protein, 1301 aa, Artificial Sequence
  SARS-CoV-2/USA/WA-UW31/2020__EPI_ISL_414618 spike protein (1-1147)(F970C_G999C) WhcAg construct
MFVFLVLLPLVSSQCVNLTTRTQLPPAYTNSFTRGVYYPDKVFRSSVLHSTQDLFLPFFSNVTWFHAIHVSGTNGTKRFDNPVLPFNDGVYFASTEKSNIIRGWIFGTTLDSKTQSLLIVNNATNVVIKVCEFQFCNDPFLGVYYHKNNKSWMESEFRVYSSANNCTFEYVSQPFLMDLEGKQGNFKNLREFVFKNIDGYFKIYSKHTPINLVRDLPQGFSALEPLVDLPIGINITRFQTLLALHRSYLTPGDSSSGWTAGAAAYYVGYLQPRTFLLKYNENGTITDAVDCALDPLSETKCTLKSFTVEKGIYQTSNFRVQPTESIVRFPNITNLCPFGEVFNATRFASVYAWNRKRISNCVADYSVLYNSASFSTFKCYGVSPTKLNDLCFTNVYADSFVIRGDEVRQIAPGQTGKIADYNYKLPDDFTGCVIAWNSNNLDSKVGGNYNYLYRLFRKSNLKPFERDISTEIYQAGSTPCNGAEGFNCYFPLQSYGFQPTNGVGYQPYRVVVLSFELLHAPATVCGPKKSTNLVKNKCVNFNFNGLTGTGVLTESNKKFLPFQQFGRDIADTTDAVRDPQTLEILDITPCSFGGVSVITPGTNTSNQVAVLYQDVNCTEVPVAIHADQLTPTWRVYSTGSNVFQTRAGCLIGAEHVNNSYECDIPIGAGICASYQTQTNSPRRARSVASQSIIAYTMSLGAENSVAYSNNSIAIPTNFTISVTTEILPVSMTKTSVDCTMYICGDSTECSNLLLQYGSFCTQLNRALTGIAVEQDKNTQEVFAQVKQIYKTPPIKDFGGFNFSQILPDPSKPSKRSFIEDLLFNKVTLADAGFIKQYGDCLGDIAARDLICAQKFNGLTVLPPLLTDEMIAQYTSALLAGTITSGWTFGAGAALQIPFAMQMAYRFNGIGVTQNVLYENQKLIANQFNSAIGKIQDSLSSTASALGKLQDVVNQNAQALNTLVKQLSSNCGAISSVLNDILSRLDKVEAEVQIDRLITCRLQSLQTYVTQQLIRAAEIRASANLAATKMSECVLGQSKRVDFCGKGYHLMSFPQSAPHGVVFLHVTYVPAQEKNFTTAPAICHDGKAHFPREGVFVSNGTHWFVTQRNFYEPQIITTDNTFVSGNCDVVIGIVNNTVYDPLQPELDSGGGGSDIDPYKEFGSSYQLLNFLPLDFFPDLNALVDTATALYEEELTGREHCSPHHTAIRQALVCWDELTKLIAWMSSNITSEQVRTIIVNHVNDTWGLKVRQSLWFHLSCLTFGQHTVQEFLVSFGVWIRTPAPYRPPNAPILSTLPEHTVIC

SEQ ID NO: 11431 - protein, 1301 aa, Artificial Sequence
  SARS-CoV-2/South Korea/SNU01/2020__EPI_ISL_411929 spike protein (1-1147)(F970C_G999C) WhcAg construct
MFVFLVLLPLVSSQCVNLTTRTQLPPAYTNSFTRGVYYPDKVFRSSVLHSTQDLFLPFFSNVTWFHAIHVSGTNGTKRFDNPVLPFNDGVYFASTEKSNIIRGWIFGTTLDSKTQSLLIVNNATNVVIKVCEFQFCNDPFLGVYYHKNNKSWMESEFRVYSSANNCTFEYVSQPFLMDLEGKQGNFKNLREFVFKNIDGYFKIYSKHTPINLVRDLPQGFWALEPLVDLPIGINITRFQTLLALHRSYLTPGDSSSGWTAGAAAYYVGYLQPRTFLLKYNENGTITDAVDCALDPLSETKCTLKSFTVEKGIYQTSNFRVQPTESIVRFPNITNLCPFGEVFNATRFASVYAWNRKRISNCVADYSVLYNSASFSTFKCYGVSPTKLNDLCFTNVYADSFVIRGDEVRQIAPGQTGKIADYNYKLPDDFTGCVIAWNSNNLDSKVGGNYNYLYRLFRKSNLKPFERDISTEIYQAGSTPCNGVEGFNCYFPLQSYGFQPTNGVGYQPYRVVVLSFELLHAPATVCGPKKSTNLVKNKCVNFNFNGLTGTGVLTESNKKFLPFQQFGRDIADTTDAVRDPQTLEILDITPCSFGGVSVITPGTNTSNQVAVLYQDVNCTEVPVAIHADQLTPTWRVYSTGSNVFQTRAGCLIGAEHVNNSYECDIPIGAGICASYQTQTNSPRRARSVASQSIIAYTMSLGAENSVAYSNNSIAIPTNFTISVTTEILPVSMTKTSVDCTMYICGDSTECSNLLLQYGSFCTQLNRALTGIAVEQDKNTQEVFAQVKQIYKTPPIKDFGGFNFSQILPDPSKPSKRSFIEDLLFNKVTLADAGFIKQYGDCLGDIAARDLICAQKFNGLTVLPPLLTDEMIAQYTSALLAGTITSGWTFGAGAALQIPFAMQMAYRFNGIGVTQNVLYENQKLIANQFNSAIGKIQDSLSSTASALGKLQDVVNQNAQALNTLVKQLSSNCGAISSVLNDILSRLDKVEAEVQIDRLITCRLQSLQTYVTQQLIRAAEIRASANLAATKMSECVLGQSKRVDFCGKGYHLMSFPQSAPHGVVFLHVTYVPAQEKNFTTAPAICHDGKAHFPREGVFVSNGTHWFVTQRNFYEPQIITTDNTFVSGNCDVVIGIVNNTVYDPLQPELDSGGGGSDIDPYKEFGSSYQLLNFLPLDFFPDLNALVDTATALYEEELTGREHCSPHHTAIRQALVCWDELTKLIAWMSSNITSEQVRTIIVNHVNDTWGLKVRQSLWFHLSCLTFGQHTVQEFLVSFGVWIRTPAPYRPPNAPILSTLPEHTVIC

SEQ ID NO: 11432 - protein, 1301 aa, Artificial Sequence
  SARS-CoV-2/China/WF0004/2020__EPI_ISL_413694 spike protein (1-1147)(F970C_G999C) WhcAg construct
MFVFLVLLPLVSSQCVNLTTRTQLPPAYTNSFTRGVYYPDKVFRSSVLHSTQDLFLPFFSNVTWFHAIHVSGTNGTKRFDNPVLPFNDGVYFASTEKSNIIRGWIFGTTLDSKTQSLLIVNNATNVVIKVCEFQFCNDPFLGVYYHKNNKSWTESEFRVYSSANNCTFEYVSQPFLMDLEGKQGNFKNLREFVFKNIDGYFKIYSKHTPINLVRDLPQGFSALEPLVDLPIGINITRFQTLLALHRSYLTPGDSSSGWTAGAAAYYVGYLQPRTFLLKYNENGTITDAVDCALDPLSETKCTLKSFTVEKGIYQTSNFRVQPTESIVRFPNITNLCPFGEVFNATRFASVYAWNRKRISNCVADYSVLYNSASFSTFKCYGVSPTKLNDLCFTNVYADSFVIRGDEVRQIAPGQTGKIADYNYKLPDDFTGCVIAWNSNNLDSKVGGNYNYLYRLFRKSNLKPFERDISTEIYQAGSTPCNGVEGFNCYFPLQSYGFQPTNGVGYQPYRVVVLSFELLHAPATVCGPKKSTNLVKNKCVNFNFNGLTGTGVLTESNKKFLPFQQFGRDIADTTDAVRDPQTLEILDITPCSFGGVSVITPGTNTSNQVAVLYQDVNCTEVPVAIHADQLTPTWRVYSTGSNVFQTRAGCLIGAEHVNNSYECDIPIGAGICASYQTQTNSPRRARSVASQSIIAYTMSLGAENSVAYSNNSIAIPTNFTISVTTEILPVSMTKTSVDCTMYICGDSTECSNLLLQYGSFCTQLNRALTGIAVEQDKNTQEVFAQVKQIYKTPPIKDFGGFNFSQILPDPSKPSKRSFIEDLLFNKVTLADAGFIKQYGDCLGDIAARDLICAQKFNGLTVLPPLLTDEMIAQYTSALLAGTITSGWTFGAGAALQIPFAMQMAYRFNGIGVTQNVLYENQKLIANQFNSAIGKIQDSLSSTASALGKLQDVVNQNAQALNTLVKQLSSNCGAISSVLNDILSRLDKVEAEVQIDRLITCRLQSLQTYVTQQLIRAAEIRASANLAATKMSECVLGQSKRFDFCGKGYHLMSFPQSAPHGVVFLHVTYVPAQEKNFTTAPAICHDGKAHFPREGVFVSNGTHWFVTQRNFYEPQIITTDNTFVSGNCDVVIGIVNNTVYDPLQPELDSGGGGSDIDPYKEFGSSYQLLNFLPLDFFPDLNALVDTATALYEEELTGREHCSPHHTAIRQALVCWDELTKLIAWMSSNITSEQVRTIIVNHVNDTWGLKVRQSLWFHLSCLTFGQHTVQEFLVSFGVWIRTPAPYRPPNAPILSTLPEHTVIC

SEQ ID NO: 11433 - protein, 1301 aa, Artificial Sequence
  SARS-CoV-2/China/WF0028/2020__EPI_ISL_413791 spike protein (1-1147)(F970C_G999C) WhcAg construct
MFVFLVLLPLVSSQCVNLTTRTQLPPAYTNSFTRGVYYPDKVFRSSVLHSTQDLFLPFFSNVTWFHAIHVSGTNGTKRFDNPVLPFNDGVYFASTEKSNIIRGWIFGTTLDSKTQSLLIVNNATNVVIKVCEFQFCNDPFLGVYYHKNNKSWMESEFRVYSSANNCTFEYVSQPFLMDLEGKQGNFKNLREFVFKNIDGYFKIYSKHTPINLVRDLPQGFSALEPLVDLPIGINITRFQTLLALHRSYLTPGDSSSGWTAGAAAYYVGYLQPRTFLLKYNENGTITDAVDCALDPLSETKCTLKSFTVEKGIYQTSNFRVQPTESIVRFPNITNLCPFGEVFNATRFASVYAWNRKRISNCVADYSVLYNSASFSTFKCYGVSPTKLNDLCFTNVYADSFVIRGDEVRQIAPGQTGKIADYNYKLPDDFTGCVIAWNSNNLDSKVGGNYNYLYRLFRKSNLKPFERDISTEIYQAGSTPCNGVEGFNCYFPLQSYGFQPTNGVGYQPYRVVVLSFELLHAPATVCGPKKSTNLVKNKCVNFNFNGLTGTGVLTESNKKFLPFQQFGRDIADTTDAVRDPQTLEILDITPCSFGGVSVITPGTNTSNQVAVLYQDVNCTEVPVAIHADQLTPTWRVYSTGSNVFQTRAGCLIGAEHVNNSYECDIPIGAGICASYQTQTNSPRRARSVASQSIIAYTMSLGAENSVAYSNNSIAIPTNFTISVTTEILPVSMTKTSVDCTMYICGDSTECSNLLLQYGSFCTQLNRALTGIAVEQDKNTQEVFAQVKQIYKTPPIKDFGGFNFSQILPDPSKPSKRSFIEDLLFNKVTLADAGFIKQYGDCLGDIAARDLICAQKFNGLTVLPPLLTDEMIAQYTSALLAGTITSGWTFGAGAALQIPFAMQMAYRFNGIGVTQNVLYENQKLIANQFNSAIGKIQDSLSSTASALGKLQDVVNQNAQALNTLVKQLSSNCGAISSVLNDILSRLDKVEAEVQIDRLITCRLQSLQTYVTQQLIRAAEIRASANLAATKMSECVLGQSKRVDFCGKGYHLMSFPQSAPHGVVFLHVTYVPAQEKNFTTAPAICHDGKAHFPREGVFVSNGTHWFVTQRNFYEPQIITTDNTFVSGNCDVVIGIVNNTVYDPLQPELESGGGGSDIDPYKEFGSSYQLLNFLPLDFFPDLNALVDTATALYEEELTGREHCSPHHTAIRQALVCWDELTKLIAWMSSNITSEQVRTIIVNHVNDTWGLKVRQSLWFHLSCLTFGQHTVQEFLVSFGVWIRTPAPYRPPNAPILSTLPEHTVIC

SEQ ID NO: 11434 - protein, 1301 aa, Artificial Sequence
  SARS-CoV-2/2019-nCoV/USA-CruiseA-18/2020__MT159716.1 spike protein (1-1147)(F970C_G999C) WhcAg construct
MFVFLVLLPLVSSQCVNLTTRTQLPPAYTNSFTRGVYYPDKVFRSSVLHSTQDLFLPFFSNVTWFHAIHVSGTNGTKRFDNPVLPFNDGVYFASTEKSNIIRGWIFGTTLDSKTQSLLIVNNATNVVIKVCEFQFCNDPFLGVYYHKNNKSWMESELRVYSSANNCTFEYVSQPFLMDLEGKQGNFKNLREFVFKNIDGYFKIYSKHTPINLVRDLPQGFSALEPLVDLPIGINITRFQTLLALHRSYLTPGDSSSGWTAGAAAYYVGYLQPRTFLLKYNENGTITDAVDCALDPLSETKCTLKSFTVEKGIYQTSNFRVQPTESIVRFPNITNLCPFGEVFNATRFASVYAWNRKRISNCVADYSVLYNSASFSTFKCYGVSPTKLNDLCFTNVYADSFVIRGDEVRQIAPGQTGKIADYNYKLPDDFTGCVIAWNSNNLDSKVGGNYNYLYRLFRKSNLKPFERDISTEIYQAGSTPCNGVEGFNCYFPLQSYGFQPTNGVGYQPYRVVVLSFELLHAPATVCGPKKSTNLVKNKCVNFNFNGLTGTGVLTESNKKFLPFQQFGRDIADTTDAVRDPQTLEILDITPCSFGGVSVITPGTNTSNQVAVLYQDVNCTEVPVAIHADQLTPTWRVYSTGSNVFQTRAGCLIGAEHVNNSYECDIPIGAGICASYQTQTNSPRRARSVASQSIIAYTMSLGAENSVAYSNNSIAIPTNFTISVTTEILPVSMTKTSVDCTMYICGDSTECSNLLLQYGSFCTQLNRALTGIAVEQDKNTQEVFAQVKQIYKTPPIKDFGGFNFSQILPDPSKPSKRSFIEDLLFNKVTLADAGFIKQYGDCLGDIAARDLICAQKFNGLTVLPPLLTDEMIAQYTSALLAGTITSGWTFGAGAALQIPFAMQMAYRFNGIGVTQNVLYENQKLIANQFNSAIGKIQDSLSSTASALGKLQDVVNQNAQALNTLVKQLSSNCGAISSVLNDILSRLDKVEAEVQIDRLITCRLQSLQTYVTQQLIRAAEIRASANLAATKMSECVLGQSKRVDFCGKGYHLMSFPQSAPHGVVFLHVTYVPAQEKNFTTAPAICHDGKAHFPREGVFVSNGTHWFVTQRNFYEPQIITTDNTFVSGNCDVVIGIVNNTVYDPLQPELDSGGGGSDIDPYKEFGSSYQLLNFLPLDFFPDLNALVDTATALYEEELTGREHCSPHHTAIRQALVCWDELTKLIAWMSSNITSEQVRTIIVNHVNDTWGLKVRQSLWFHLSCLTFGQHTVQEFLVSFGVWIRTPAPYRPPNAPILSTLPEHTVIC

SEQ ID NO: 11435 - protein, 1301 aa, Artificial Sequence
  SARS-CoV-2/SARS-CoV-2/Yunnan-01/human/2020/CHN__MT049951.1 spike protein (1-1147)(F970C_G999C) WhcAg construct
MFVFLVLLPLVSSQCVNLTTRTQLPPANTNSFTRGVYYPDKVFRSSVLHSTQDLFLPFFSNVTWFHAIHVSGTNGTKRFDNPVLPFNDGVYFASTEKSNIIRGWIFGTTLDSKTQSLLIVNNATNVVIKVCEFQFCNDPFLGVYYHKNNKSWMESEFRVYSSANNCTFEYVSQPFLMDLEGKQGNFKNLREFVFKNIDGYFKIYSKHTPINLVRDLPQGFSALEPLVDLPIGINITRFQTLLALHRSYLTPGDSSSGWTAGAAAYYVGYLQPRTFLLKYNENGTITDAVDCALDPLSETKCTLKSFTVEKGIYQTSNFRVQPTESIVRFPNITNLCPFGEVFNATRFASVYAWNRKRISNCVADYSVLYNSASFSTFKCYGVSPTKLNDLCFTNVYADSFVIRGDEVRQIAPGQTGKIADYNYKLPDDFTGCVIAWNSNNLDSKVGGNYNYLYRLFRKSNLKPFERDISTEIYQAGSTPCNGVEGFNCYFPLQSYGFQPTNGVGYQPYRVVVLSFELLHAPATVCGPKKSTNLVKNKCVNFNFNGLTGTGVLTESNKKFLPFQQFGRDIADTTDAVRDPQTLEILDITPCSFGGVSVITPGTNTSNQVAVLYQDVNCTEVPVAIHADQLTPTWRVYSTGSNVFQTRAGCLIGAEHVNNSYECDIPIGAGICASYQTQTNSPRRARSVASQSIIAYTMSLGAENSVAYSNNSIAIPTNFTISVTTEILPVSMTKTSVDCTMYICGDSTECSNLLLQYGSFCTQLNRALTGIAVEQDKNTQEVFAQVKQIYKTPPIKDFGGFNFSQILPDPSKPSKRSFIEDLLFNKVTLADAGFIKQYGDCLGDIAARDLICAQKFNGLTVLPPLLTDEMIAQYTSALLAGTITSGWTFGAGAALQIPFAMQMAYRFNGIGVTQNVLYENQKLIANQFNSAIGKIQDSLSSTASALGKLQDVVNQNAQALNTLVKQLSSNCGAISSVLNDILSRLDKVEAEVQIDRLITCRLQSLQTYVTQQLIRAAEIRASANLAATKMSECVLGQSKRVDFCGKGYHLMSFPQSAPHGVVFLHVTYVPAQEKNFTTAPAICHDGKAHFPREGVFVSNGTHWFVTQRNFYEPQIITTDNTFVSGNCDVVIGIVNNTVYDPLQPELDSGGGGSDIDPYKEFGSSYQLLNFLPLDFFPDLNALVDTATALYEEELTGREHCSPHHTAIRQALVCWDELTKLIAWMSSNITSEQVRTIIVNHVNDTWGLKVRQSLWFHLSCLTFGQHTVQEFLVSFGVWIRTPAPYRPPNAPILSTLPEHTVIC

SEQ ID NO: 11436 - protein, 1301 aa, Artificial Sequence
  SARS-CoV-2/USA/WA-UW292/2020__EPI_ISL_418077 spike protein (1-1147)(F970C_G999C) WhcAg construct
MFVFLVLLPLVSSQCVNLTTRTQLPPAYTNSFTRGVYYPDKVFRSSVLHSTQDLFLPFFSNVTWFHAIHVSGTNGTKRFDNPVLPFNDGVYFASTEKSNIIRGWIFGTTLDSKTQSLLIVNNATNVVIKVCEFQFCNDPFLGVYYHKNNKSWMESEFRVYSSANNCTFEYVSQPFLMDLEGKQGNFKNLREFVFKNIDGYFKIYSKHTPINLVRDLPQGFSALEPLVDLPIGINITRFQTLLALHRSYLTPGDSSSGWTAGAAAYYVGYLQPRTFLLKYNENGTITDAVDCALDPLSETKCTLKSFTVEKGIYQTSNFRVQPTESIVRFPNITNLCPFGEVFNATRFASVYAWNRKRISNCVADYSVLYNSASFSTFKCYGVSPTKLNDLCFTNVYADSFVIRGDEVRQIAPGQTGKIADYNYKLPDDFTGCVIAWNSNNLDSKVGGNYNYLYRLFRKSNLKPFERDISTEIYQASSTPCNGVEGFNCYFPLQSYGFQPTNGVGYQPYRVVVLSFELLHAPATVCGPKKSTNLVKNKCVNFNFNGLTGTGVLTESNKKFLPFQQFGRDIADTTDAVRDPQTLEILDITPCSFGGVSVITPGTNTSNQVAVLYQDVNCTEVPVAIHADQLTPTWRVYSTGSNVFQTRAGCLIGAEHVNNSYECDIPIGAGICASYQTQTNSPRRARSVASQSIIAYTMSLGAENSVAYSNNSIAIPTNFTISVTTEILPVSMTKTSVDCTMYICGDSTECSNLLLQYGSFCTQLNRALTGIAVEQDKNTQEVFAQVKQIYKTPPIKDFGGFNFSQILPDPSKPSKRSFIEDLLFNKVTLADAGFIKQYGDCLGDIAARDLICAQKFNGLTVLPPLLTDEMIAQYTSALLAGTITSGWTFGAGAALQIPFAMQMAYRFNGIGVTQNVLYENQKLIANQFNSAIGKIQDSLSSTASALGKLQDVVNQNAQALNTLVKQLSSNCGAISSVLNDILSRLDKVEAEVQIDRLITCRLQSLQTYVTQQLIRAAEIRASANLAATKMSECVLGQSKRVDFCGKGYHLMSFPQSAPHGVVFLHVTYVPAQEKNFTTAPAICHDGKAHFPREGVFVSNGTHWFVTQRNFYEPQIITTDNTFVSGNCDVVIGIVNNTVYDPLQPELDSGGGGSDIDPYKEFGSSYQLLNFLPLDFFPDLNALVDTATALYEEELTGREHCSPHHTAIRQALVCWDELTKLIAWMSSNITSEQVRTIIVNHVNDTWGLKVRQSLWFHLSCLTFGQHTVQEFLVSFGVWIRTPAPYRPPNAPILSTLPEHTVIC

SEQ ID NO: 11437 - protein, 1301 aa, Artificial Sequence
  SARS-CoV-2/Iceland/192/2020__EPI_ISL_417819 spike protein (1-1147)(F970C_G999C) WhcAg construct
MFVFFVLLPLVSSQCVNLTTRTQLPPAYTNSFTRGVYYPDKVFRSSVLHSTQDLFLPFFSNVTWFHAIHVSGTNGTKRFDNPVLPFNDGVYFASTEKSNIIRGWIFGTTLDSKTQSLLIVNNATNVVIKVCEFQFCNDPFLGVYYHKNNKSWMESEFRVYSSANNCTFEYVSQPFLMDLEGKQGNFKNLREFVFKNIDGYFKIYSKHTPINLVRDLPQGFSALEPLVDLPIGINITRFQTLLALHRSYLTPGDSSSGWTAGAAAYYVGYLQPRTFLLKYNENGTITDAVDCALDPLSETKCTLKSFTVEKGIYQTSNFRVQPTESIVRFPNITNLCPFGEVFNATRFASVYAWNRKRISNCVADYSVLYNSASFSTFKCYGVSPTKLNDLCFTNVYADSFVIRGDEVRQIAPGQTGKIADYNYKLPDDFTGCVIAWNSNNLDSKVGGNYNYLYRLFRKSNLKPFERDISTEIYQAGSTPCNGVEGFNCYFPLQSYGFQPTNGVGYQPYRVVVLSFELLHAPATVCGPKKSTNLVKNKCVNFNFNGLTGTGVLTESNKKFLPFQQFGRDIADTTDAVRDPQTLEILDITPCSFGGVSVITPGTNTSNQVAVLYQGVNCTEVPVAIHADQLTPTWRVYSTGSNVFQTRAGCLIGAEHVNNSYECDIPIGAGICASYQTQTNSPRRARSVASQSIIAYTMSLGAENSVAYSNNSIAIPTNFTISVTTEILPVSMTKTSVDCTMYICGDSTECSNLLLQYGSFCTQLNRALTGIAVEQDKNTQEVFAQVKQIYKTPPIKDFGGFNFSQILPDPSKPSKRSFIEDLLFNKVTLADAGFIKQYGDCLGDIAARDLICAQKFNGLTVLPPLLTDEMIAQYTSALLAGTITSGWTFGAGAALQIPFAMQMAYRFNGIGVTQNVLYENQKLIANQFNSAIGKIQDSLSSTASALGKLQDVVNQNAQALNTLVKQLSSNCGAISSVLNDILSRLDKVEAEVQIDRLITCRLQSLQTYVTQQLIRAAEIRASANLAATKMSECVLGQSKRVDFCGKGYHLMSFPQSAPHGVVFLHVTYVPAQEKNFTTAPAICHDGKAHFPREGVFVSNGTHWFVTQRNFYEPQIITTDNTFVSGNCDVVIGIVNNTVYDPLQPELDSGGGGSDIDPYKEFGSSYQLLNFLPLDFFPDLNALVDTATALYEEELTGREHCSPHHTAIRQALVCWDELTKLIAWMSSNITSEQVRTIIVNHVNDTWGLKVRQSLWFHLSCLTFGQHTVQEFLVSFGVWIRTPAPYRPPNAPILSTLPEHTVIC

SEQ ID NO: 11438 - protein, 1301 aa, Artificial Sequence
  SARS-CoV-2/Belgium/ULG-6939/2020__EPI_ISL_417020 spike protein (1-1147)(F970C_G999C) WhcAg construct
MFVFLVLLPLVSSQCVNLTTRTQLPPAYTNSFTRGVYYPDKVFRSSVLHSTQDLFLPFFSNVTWFHAIHVSGTNGTKRFDNPVLPFNDGVYFASTEKSNIIRGWIFGTTLDSKTQSLLIVNNATNVVIKVCEFQFCNDPFLGVYYHKNNKSWMESEFRVYSSANNCTFEYVSQPFLMDLEGKQGNFKNLREFVFKNIDGYFKIYSKHTPINLVRDLPQGFSALEPLVDLPIGINITRFQTLLALHRSYLTPGDSSSGWTAGAAAYYVGYLQPRTFLLKYNENGTITDAVDCALDPLSETKCTLKSFTVEKGIYQTSNFRVQPTESIVRFPNITNLCPFGEVFNATRFASVYAWNRKRISNCVADYSVLYNSASFSTFKCYGVSPTKLNDLCFTNVYADSFVIRGDEVRQIAPGQTGKIADYNYKLPDDFTGCVIAWNSNNLDSKVGGNYNYLYRLFRKSNLKPFERDISTEIYQAGSTPCNGVEGFNCYFPLQSYGFQPTNGVGYQPYRVVVLSFELLHAPATVCGPKKSTNLVKNKCVNFNFNGLTGTGVLTESNKKFLPFQQFGRDIADTTDAVRDPQTLEILDITPCSFGGVSVITPGTNTSNQVAVLYQGVNCTEVPVAIHADQLTPTWRVYSTGSNVFQTRAGCLIGAEHVNNSYECDIPIGAGICASYQTQTNSPRRARSVASQSIIAYTMSLGAENSVVYSNNSIAIPTNFTISVTTEILPVSMTKTSVDCTMYICGDSTECSNLLLQYGSFCTQLNRALTGIAVEQDKNTQEVFAQVKQIYKTPPIKDFGGFNFSQILPDPSKPSKRSFIEDLLFNKVTLADAGFIKQYGDCLGDIAARDLICAQKFNGLTVLPPLLTDEMIAQYTSALLAGTITSGWTFGAGAALQIPFAMQMAYRFNGIGVTQNVLYENQKLIANQFNSAIGKIQDSLSSTASALGKLQDVVNQNAQALNTLVKQLSSNCGAISSVLNDILSRLDKVEAEVQIDRLITCRLQSLQTYVTQQLIRAAEIRASANLAATKMSECVLGQSKRVDFCGKGYHLMSFPQSAPHGVVFLHVTYVPAQEKNFTTAPAICHDGKAHFPREGVFVSNGTHWFVTQRNFYEPQIITTDNTFVSGNCDVVIGIVNNTVYDPLQPELDSGGGGSDIDPYKEFGSSYQLLNFLPLDFFPDLNALVDTATALYEEELTGREHCSPHHTAIRQALVCWDELTKLIAWMSSNITSEQVRTIIVNHVNDTWGLKVRQSLWFHLSCLTFGQHTVQEFLVSFGVWIRTPAPYRPPNAPILSTLPEHTVIC

SEQ ID NO: 11439 - protein, 1301 aa, Artificial Sequence
  SARS-CoV-2/France/HF2496/2020__EPI_ISL_418231 spike protein (1-1147)(F970C_G999C) WhcAg construct
MFVFLVLLPLVSSQCVNLTTRTQLPPAYTNSFTRGVYYPDKVFRSSVLHSTQDLFLPFFSNVTWFHAIHVSGTNGTKRFDNPVLPFNDGVYFASTEKSNIIRGWIFGTTLDSKTQSLLIVNNATNVVIKVCEFQFCNDPFLGVYYHKNNKSWMESEFRVYSSANNCTFEYVSQPFLMDLEGKQGNFKNLREFVFKNIDGYFKIYSKHTPINLVRDLPQGFSALEPLVDLPIGINITRFQTLLALHRSYLTPGDSSSGWTAGAAAYYVGYLQPRTFLLKYNENGTITDAVDCALDPLSETKCTLKSFTVEKGIYQTSNFRVQPTESIVRFPNITNLCPFGEVFNATRFASVYAWNRKRISNCVADYSVLYNSASFSTFKCYGVSPTKLNDLCFTNVYADSFVIRGDEVRQIAPGQTGKIADYNYKLPDDFTGCVIAWNSNNLDSKVGGNYNYLYRLFRKSNLKPFERDISTEIYQAGSTPCNGVEGFNCYFPLQSYGFQPTNGVGYQPYRVVVLSFELLHAPATVCGPKKSTNLVKNKCVNFNFNGLTGTGVLTESNKKFLPFQQFGRDIADTTDAVRDPQTLEILDITPCSFGGVSVITPGTNTSNQVAVLYQGVNCTEVPVAIHADQLTPTWRVYSTGSNVFQTRAGCLIGAEHVNNSYECDIPIGAGICASYQTQTNSPRRARSVASQSIIAYTMSLGAENSVAYSNNSIAIPTNFTISVTTEILPVSMTKTSVDCTMYICGDSTECSNLLLQYGSFCTQLNRALTGIAVEQDKNTQEVFAQVKQIYKTPPIKDFGGFNFSQILPDPSKPSKRSFIEDLLFNKVTLADAGFIKQYGDCLGDIVARDLICAQKFNGLTVLPPLLTDEMIAQYTSALLAGTITSGWTFGAGAALQIPFAMQMAYRFNGIGVTQNVLYENQKLIANQFNSAIGKIQDSLSSTASALGKLQDVVNQNAQALNTLVKQLSSNCGAISSVLNDILSRLDKVEAEVQIDRLITCRLQSLQTYVTQQLIRAAEIRASANLAATKMSECVLGQSKRVDFCGKGYHLMSFPQSAPHGVVFLHVTYVPAQEKNFTTAPAICHDGKAHFPREGVFVSNGTHWFVTQRNFYEPQIITTDNTFVSGNCDVVIGIVNNTVYDPLQPELDSGGGGSDIDPYKEFGSSYQLLNFLPLDFFPDLNALVDTATALYEEELTGREHCSPHHTAIRQALVCWDELTKLIAWMSSNITSEQVRTIIVNHVNDTWGLKVRQSLWFHLSCLTFGQHTVQEFLVSFGVWIRTPAPYRPPNAPILSTLPEHTVIC

SEQ ID NO: 11440 - protein, 1301 aa, Artificial Sequence
  SARS-CoV-2/USA/WA-UW291/2020__EPI_ISL_418076 spike protein (1-1147)(F970C_G999C) WhcAg construct
MFVFLVLLPLVSSQCVNLTTRTQLPPAYTNSFTRGVYYPDKVFRSSVLHSTQDLFLPFFSNVTWFHAIHVSGTNGTKRFDNPVLPFNDGVYFASTEKSNIIRGWIFGTTLDSKTQSLLIVNNATNVVIKVCEFQFCNDPFLGVYYHKNNKSWMESEFRVYSSANNCTFEYVSQPFLMDLEGKQGNFKNLREFVFKNIDGYFKIYSKHTPINLVRDLPQGFSALEPLVDLPIGINITRFQTLLALHRSYLTPGDSSSGWTAGAAAYYVGYLQPRTFLLKYNENGTITDAVDCALDPLSETKCTLKSFTVEKGIYQTSNFRVQPTESIVRFPNITNLCPFGEVFNATRFASVYAWNRKRISNCVADYSVLYNSASFSTFKCYGVSPTKLNDLCFTNVYADSFVIRGDEVRQIAPGQTGKIADYNYKLPDDFTGCVIAWNSNNLDSKVGGNYNYLYRLFRKSNLKPFERDISTEIYQAGSTPCNGVEGFNCYFPLQSYGFQPTNGVGYQPYRVVVLSFELLHAPATVCGPKKSTNLVKNKCVNFNFNGLTGTGVLTESNKKFLPFQQFGRDIADTTDAVRDPQTLEILDITPCSFGGVSVITPGTNTSNQVAVLYQGVNCTEVPVAIHADQLTPTWRVYSTGSNVFQTRAGCLIGAEHVNNSYECDIPIGAGICASYQTQTNSPRRARSVASQSIIAYTMSLGAENSVAYSNNSIAIPTNFTISVTTEILPVSMTKTSVDCTMYICGDSTECSNLLLQYGSFCTQLNRALTGIAVEQDKNTQEVFAQVKQIYKTPPIKDFGGFNFSQILPDPSKPSKRSFIEDLLFNKVTLADAGFIKQYGDCLGDIAARDLICAQKFNGLTVLPPLLTDEMIAQYTSALLAGTITSGWTFGAGAALQIPFAMQMAYRFNGIGVTQNVLYENQKLIANQFNSAIGKIQYSLSSTASALGKLQDVVNQNAQALNTLVKQLSSNCGAISSVLNDILSRLDKVEAEVQIDRLITCRLQSLQTYVTQQLIRAAEIRASANLAATKMSECVLGQSKRVDFCGKGYHLMSFPQSAPHGVVFLHVTYVPAQEKNFTTAPAICHDGKAHFPREGVFVSNGTHWFVTQRNFYEPQIITTDNTFVSGNCDVVIGIVNNTVYDPLQPELDSGGGGSDIDPYKEFGSSYQLLNFLPLDFFPDLNALVDTATALYEEELTGREHCSPHHTAIRQALVCWDELTKLIAWMSSNITSEQVRTIIVNHVNDTWGLKVRQSLWFHLSCLTFGQHTVQEFLVSFGVWIRTPAPYRPPNAPILSTLPEHTVIC

SEQ ID NO: 11441 - protein, 1301 aa, Artificial Sequence; identical to SEQ ID NO: 11404
  SARS-CoV-2/Portugal/PT0034/2020__EPI_ISL_418019 spike protein (1-1147)(F970C_G999C) WhcAg construct

SEQ ID NO: 11442 - protein, 1301 aa, Artificial Sequence; identical to SEQ ID NO: 11396
  SARS-CoV-2/Iceland/202/2020__EPI_ISL_417750 spike protein (1-1147)(F970C_G999C) WhcAg construct

SEQ ID NO: 11443 - protein, 1301 aa, Artificial Sequence
  SARS-CoV-2/USA/WA-UW261/2020__EPI_ISL_418046 spike protein (1-1147)(F970C_G999C) WhcAg construct
MFVFLVLLPLVSSQCVNLTTRTQLPPAYTNSFTRGVYYPDKVFRSSVLHSTQDLFLPFFSNVTWFHAIHVSGTNGTKRFDNPVLPFNDGVYFASTEKSNIIRGWIFGTTLDSKTQSLLIVNNATNVVIKVCEFQFCNDPFLGVYYHKNNKSWMESEFRVYSSANNCTFEYVSQPFLMDLEGKQGNFKNLREFVFKNIDGYFKIYSKHTPINLVRDLPQGFSALEPLVDLPIGINITRFQTLLALHRSYLTPGDSSSGWTAGAAAYYVGYLQPRTFLLKYNENGTITDAVDCALDPLSETKCTLKSFTVEKGIYQTSNFRVQPTESIVRFPNITNLCPFGEVFNATRFTSVYAWNRKRISNCVADYSVLYNSASFSTFKCYGVSPTKLNDLCFTNVYADSFVIRGDEVRQIAPGQTGKIADYNYKLPDDFTGCVIAWNSNNLDSKVGGNYNYLYRLFRKSNLKPFERDISTEIYQAGSTPCNGVEGFNCYFPLQSYGFQPTNGVGYQPYRVVVLSFELLHAPATVCGPKKSTNLVKNKCVNFNFNGLTGTGVLTESNKKFLPFQQFGRDIADTTDAVRDPQTLEILDITPCSFGGVSVITPGTNTSNQVAVLYQDVNCTEVPVAIHADQLTPTWRVYSTGSNVFQTRAGCLIGAEHVNNSYECDIPIGAGICASYQTQTNSPRRARSVASQSIIAYTMSLGAENSVAYSNNSIAIPTNFTISVTTEILPVSMTKTSVDCTMYICGDSTECSNLLLQYGSFCTQLNRALTGIAVEQDKNTQEVFAQVKQIYKTPPIKDFGGFNFSQILPDPSKPSKRSFIEDLLFNKVTLADAGFIKQYGDCLGDIAARDLICAQKFNGLTVLPPLLTDEMIAQYTSALLAGTITSGWTFGAGAALQIPFAMQMAYRFNGIGVTQNVLYENQKLIANQFNSAIGKIQDSLSSTASALGKLQDVVNQNAQALNTLVKQLSSNCGAISSVLNDILSRLDKVEAEVQIDRLITCRLQSLQTYVTQQLIRAAEIRASANLAATKMSECVLGQSKRVDFCGKGYHLMSFPQSAPHGVVFLHVTYVPAQEKNFTTAPAICHDGKAHFPREGVFVSNGTHWFVTQRNFYEPQIITTDNTFVSGNCDVVIGIVNNTVYDPLQPELDSGGGGSDIDPYKEFGSSYQLLNFLPLDFFPDLNALVDTATALYEEELTGREHCSPHHTAIRQALVCWDELTKLIAWMSSNITSEQVRTIIVNHVNDTWGLKVRQSLWFHLSCLTFGQHTVQEFLVSFGVWIRTPAPYRPPNAPILSTLPEHTVIC

SEQ ID NO: 11444 - protein, 1301 aa, Artificial Sequence
  SARS-CoV-2/Portugal/PT0035/2020__EPI_ISL_418020 spike protein (1-1147)(F970C_G999C) WhcAg construct
MFVFLVLLPLVSSQCVNLTTRTQLPPAYTNSFTRGVYYPDKVFRSSVLHSTQDLFLPFFSNVTWFHAIHVSGTNGTKRFDNPVLPFNDGVYFASTEKSNIIRGWIFGTTLDSKTQSLLIVNNATNVVIKVCEFQFCNDPFLGVYYHKNNKSWMESEFRVYSSANNCTFEYVSQPFLMDLEGKQGNFKNLREFVFKNIDGYFKIYSKHTPINLVRDLPQGFSALEPLVDLPIGINITRFQTLLALHRSYLTPGDSSSGWTAGAAAYYVGYLQPRTFLLKYNENGTITDAVDCALDPLSETKCTLKSFTVEKGIYQTSNFRVQPTESIVRFPNITNLCPFGEVFNATRFASVYAWNRKRISNCVADYSVLYNSASFSTFKCYGVSPTKLNDLCFTNVYADSFVIRGDEVRQIAPGQTGKIADYNYKLPDDFTGCVIAWNSNNLDSKVGGNYNYLYRLFRKSNLKPFERDISTEIYQAGSTPCNGVEGFNCYFPLQSYGFQPTNGVGYQPYRVVVLSFELLHAPATVCGPKKSTNLVKNKCVNFNFNGLTGTGVLTESNKKFLPFQQFGRDIADTTDAVRDPQTLEILDITPCSFGGVSVITPGTNTSNQVAVLYQDVNCTEVPVAIHADQLTPTWRVYSTGSNVFQTRAGCLIGAEHVNNSYECDIPIGAGICASYQTQTNSPRRARSVASQSIIAYTMSLGAENSVAYSNNSIAIPTNFTISVTTEILPVSMTKTSVDCTMYICGDSTECSNLLLQYGSFCTQLNRALTGIAVEQDKNTQEVFAQVKQIYKTPPIKDFGGFNFSQILPDPSKPSKRSFIEDLLFNKVTLADAGFIKQYGDCLGDISARDLICAQKFNGLTVLPPLLTDEMIAQYTSALLAGTITSGWTFGAGAALQIPFAMQMAYRFNGIGVTQNVLYENQKLIANQFNSAIGKIQDSLSSTASALGKLQDVVNQNAQALNTLVKQLSSNCGAISSVLNDILSRLDKVEAEVQIDRLITCRLQSLQTYVTQQLIRAAEIRASANLAATKMSECVLGQSKRVDFCGKGYHLMSFPQSAPHGVVFLHVTYVPAQEKNFTTAPAICHDGKAHFPREGVFVSNGTHWFVTQRNFYEPQIITTDNTFVSGNCDVVIGIVNNTVYDPLQPELDSGGGGSDIDPYKEFGSSYQLLNFLPLDFFPDLNALVDTATALYEEELTGREHCSPHHTAIRQALVCWDELTKLIAWMSSNITSEQVRTIIVNHVNDTWGLKVRQSLWFHLSCLTFGQHTVQEFLVSFGVWIRTPAPYRPPNAPILSTLPEHTVIC

SEQ ID NO: 11445 - protein, 1301 aa, Artificial Sequence
  SARS-CoV-2/USA/NY-NYUMC7/2020__EPI_ISL_418192 spike protein (1-1147)(F970C_G999C) WhcAg construct
MFVFLVLLPLVSSQCVNLTTRTQLPPAYTNSFTRGVYYPDKVFRSSVLHSTQDLFLPFFSNVTWFHAIHVSGTNGTKRFDNPVLPFNDGVYFASTEKSNIIRGWIFGTTLDSKTQSLLIVNNATNVVIKVCEFQFCNDPFLGVYHHKNNKSWMESEFRVYSSANNCTFEYVSQPFLMDLEGKQGNFKNLREFVFKNIDGYFKIYSKHTPINLVRDLPQGFSALEPLVDLPIGINITRFQTLLALHRSYLTPGDSSSGWTAGAAAYYVGYLQPRTFLLKYNENGTITDAVDCALDPLSETKCTLKSFTVEKGIYQTSNFRVQPTESIVRFPNITNLCPFGEVFNATRFASVYAWNRKRISNCVADYSVLYNSASFSTFKCYGVSPTKLNDLCFTNVYADSFVIRGDEVRQIAPGQTGKIADYNYKLPDDFTGCVIAWNSNNLDSKVGGNYNYLYRLFRKSNLKPFERDISTEIYQAGSTPCNGVEGFNCYFPLQSYGFQPTNGVGYQPYRVVVLSFELLHAPATVCGPKKSTNLVKNKCVNFNFNGLTGTGVLTESNKKFLPFQQFGRDIADTTDAVRDPQTLEILDITPCSFGGVSVITPGTNTSNQVAVLYQGVNCTEVPVAIHADQLTPTWRVYSTGSNVFQTRAGCLIGAEHVNNSYECDIPIGAGICASYQTQTNSPRRARSVASQSIIAYTMSLGAENSVAYSNNSIAIPTNFTISVTTEILPVSMTKTSVDCTMYICGDSTECSNLLLQYGSFCTQLNRALTGIAVEQDKNTQEVFAQVKQIYKTPPIKDFGGFNFSQILPDPSKPSKRSFIEDLLFNKVTLADAGFIKQYGDCLGDIAARDLICAQKFNGLTVLPPLLTDEMIAQYTSALLAGTITSGWTFGAGAALQIPFAMQMAYRFNGIGVTQNVLYENQKLIANQFNSAIGKIQDSLSSTASALGKLQDVVNQNAQALNTLVKQLSSNCGAISSVLNDILSRLDKVEAEVQIDRLITCRLQSLQTYVTQQLIRAAEIRASANLAATKMSECVLGQSKRVDFCGKGYHLMSFPQSAPHGVVFLHVTYVPAQEKNFTTAPAICHDGKAHFPREGVFVSNGTHWFVTQRNFYEPQIITTDNTFVSGNCDVVIGIVNNTVYDPLQPELDSGGGGSDIDPYKEFGSSYQLLNFLPLDFFPDLNALVDTATALYEEELTGREHCSPHHTAIRQALVCWDELTKLIAWMSSNITSEQVRTIIVNHVNDTWGLKVRQSLWFHLSCLTFGQHTVQEFLVSFGVWIRTPAPYRPPNAPILSTLPEHTVIC

SEQ ID NO: 11446 - protein, 1301 aa, Artificial Sequence
  SARS-CoV-2/Iceland/189/2020__EPI_ISL_417709 spike protein (1-1147)(F970C_G999C) WhcAg construct
MFVFLVLLPLVSSQCVNLTTRTQLPPAYTNSFTRGVYYPDKVFRSSVLHSTQDLFLPFFSNVTWFHAIHVSGTNGTKRFDNPVLPFNDGVYFASTEKSNIIRGWIFGTTLDSKTQSLLIVNNATNVVIKVCEFQFCNDPFLGVYYHKNNKSWMESEFRVYSSANNCTFEYVSQPFLMDLEGKQGNFKNLREFVFKNIDGYFKIYSKHTPINLVRDLPQGFSALEPLVDLPIGINITRFQTLLALHRSYLTPGDSSSGWTAGAAAYYVGYLQPRTFLLKYNENGTITDAVDCALDPLSETKCTLKSFTVEKGIYQTSNFRVQPTESIVRFPNITNLCPFGEVFNATRFASVYAWNRKRISNCVADYSVLYNSASFSTFKCYGVSPTKLNDLCFTNVYADSFVIRGDEVRQIAPGQTGKIADYNYKLPDDFTGCVIAWNSNNLDSKVGGNYNYLYRLFRKSNLKPFERDISTEIYQAGSTPCNGVEGFNCYFPLQSYGFQPTNGVGYQPYRVVVLSFELLHAPATVCGPKKSTNLVKNKCVNFNFNGLTGTGVLTESNKKFLPFQQFGRDIADTTDAVRDPQTLEILDITPCSFGGVSVITPGTNTSNQVAVLYQGVNCTEVPVAIHADQLTPTWRVYSTGSNVFQTRAGCLIGAEHVNNSYECDIPIGAGICASYQTQTNSPRRARSVASQSIIAYTMSLGAENSVAYSNNSIAIPTNFTISVTTEILPVSMTKTSVDCTMYICGDSTECSNLLLQYGSFCTQLNRALTGIAVEQDKNTQEVFAQVKQIYKTPPIKDFGGFNFSQILPDPSKPSKRSFIEDLLFNKVTLADAGFTKQYGDCLGDIAARDLICAQKFNGLTVLPPLLTDEMIAQYTSALLAGTITSGWTFGAGAALQIPFAMQMAYRFNGIGVTQNVLYENQKLIANQFNSAIGKIQDSLSSTASALGKLQDVVNQNAQALNTLVKQLSSNCGAISSVLNDILSRLDKVEAEVQIDRLITCRLQSLQTYVTQQLIRAAEIRASANLAATKMSECVLGQSKRVDFCGKGYHLMSFPQSAPHGVVFLHVTYVPAQEKNFTTAPAICHDGKAHFPREGVFVSNGTHWFVTQRNFYEPQIITTDNTFVSGNCDVVIGIVNNTVYDPLQPELDSGGGGSDIDPYKEFGSSYQLLNFLPLDFFPDLNALVDTATALYEEELTGREHCSPHHTAIRQALVCWDELTKLIAWMSSNITSEQVRTIIVNHVNDTWGLKVRQSLWFHLSCLTFGQHTVQEFLVSFGVWIRTPAPYRPPNAPILSTLPEHTVIC

SEQ ID NO: 11447 - protein, 1301 aa, Artificial Sequence
  SARS-CoV-2/Australia/NSW56/2020__EPI_ISL_417408 spike protein (1-1147)(F970C_G999C) WhcAg construct
MFVFLVLLPLVSSQCVNLTTRTQLPPAYTNSFTRGVYYPDKVFRSSVLHSTQDLFLPFFSNVTWFHAIHVSGTNGTKRFDNPVLPFNDGVYFASTEKSNIIRGWIFGTTLDSKTQSLLIVNNATNVVIKVCEFQFCNDPFLGVYYHKNNKSWMESEFRVYSSANNCTFEYVSQPFLMDLEGKQGNFKNLREFVFKNIDGYFKIYSKHTPINLVRDLPQGFSALEPLVDLPIGINITRFQTLLALHRSYLTPGDSSSGWTAGAAAYYVGYLQPRTFLLKYNENGTITDAVDCALDPLSETKCTLKSFTVEKGIYQTSNFRVQPTESIVRFPNITNLCPFGEVFNATRFASVYAWNRKRISNCVADYSVLYNSASFSTFKCYGVSPTKLNDLCFTNVYADSFVIRGDEVRQIAPGQTGKIADYNYKLPDDFTGCVIAWNSNNLDSKVGGNYNYLYRLFRKSNLKPFERDISTEIYQAGSTPCNGVEGFNCYFPLQSYGFQPTNGVGYQPYRVVVLSFELLHAPATVCGPKKSTNLVKNKCVNFNFNGLTGTGVLTESNKKFLPFQQFGRDIADTTDAVRDPQTLEILDITPCSFGGVSVITPGTNTSNQVAVLYQDVNCTEVPVAIHADQLTPTWRVYSTGSNVFQTRAGCLIGAEHVNNSYECDIPIGAGICASYQTQTNSPRRARSVASQSIIAYTMSLGAENSVAYSNNSIAIPTNFTISVTTEILPVSMTKTSVDCTMYICGDSTECSNLLLQYGSFCTQLNRALTGIAVEQDKNTQEVFAQVKQIYKTPPIKDFGGFNFSQILPDSSKPSKRSFIEDLLFNKVTLADAGFIKQYGDCLGDIAARDLICAQKFNGLTVLPPLLTDEMIAQYTSALLAGTITSGWTFGAGAALQIPFAMQMAYRFNGIGVTQNVLYENQKLIANQFNSAIGKIQDSLSSTASALGKLQDVVNQNAQALNTLVKQLSSNCGAISSVLNDILSRLDKVEAEVQIDRLITCRLQSLQTYVTQQLIRAAEIRASANLAATKMSECVLGQSKRVDFCGKGYHLMSFPQSAPHGVVFLHVTYVPAQEKNFTTAPAICHDGKAHFPREGVFVSNGTHWFVTQRNFYEPQIITTDNTFVSGNCDVVIGIVNNTVYDPLQPELDSGGGGSDIDPYKEFGSSYQLLNFLPLDFFPDLNALVDTATALYEEELTGREHCSPHHTAIRQALVCWDELTKLIAWMSSNITSEQVRTIIVNHVNDTWGLKVRQSLWFHLSCLTFGQHTVQEFLVSFGVWIRTPAPYRPPNAPILSTLPEHTVIC

SEQ ID NO: 11448 - protein, 1301 aa, Artificial Sequence
  SARS-CoV-2/Iceland/280/2020__EPI_ISL_417608 spike protein (1-1147)(F970C_G999C) WhcAg construct
MFVFLVLLPLVSSQCVNLTTRTQLPPAYTNSFTRGVYYPDKVFRSSVLHSTQDLFLPFFSNVTWFHAIHVSGTNGTKRFDNPVLPFNDGVYFASTEKSNIIRGWIFGTTLDSKTQSLLIVNNATNVVIKVCEFQFCNDPFLGVYYHKNNKSWMESEFRVYSSANNCTFEYVSQPFLMDLEGKQGNFKNLREFVFKNIDGYFKIYSKHTPINLVRDLPQGFSALEPLVDLPIGINITRFQTLLALHRSYLTPGDSSSGWTAGAAAYYVGYLQPRTFLLKYNENGTITDAVDCALDPLSETKCTLKSFTVEKGIYQTSNFRVQPTESIVRFPNITNLCPFGEVFNATRFASVYAWNRKRISNCVADYSVLYNSASFSTFKCYGVSPTKLNDLCFTNVYADSFVIRGDEVRQIAPGQTGKIADYNYKLPDDFTGCVIAWNSNNLDSKVGGNYNYLYRLFRKSNLKPFERDISTEIYQAGSTPCNGVEGFNCYFPLQSYGFQPTNGVGYQPYRVVVLSFELLHAPATVCGPKKSTNLVKNKCVNFNFNGLTGTGVLTESNKKFLPFQQFGRDIADTTDAVRDPQTLEILDITPCSFGGVSVITPGTNTSNQVAVLYQGVNCTEVPVAIHADQLTPTWRVYSTGSNVFQTRAGCLIGAEHVNNSYECDIPIGAGICASYHTQTNSPRRARSVASQSIIAYTMSLGAENSVAYSNNSIAIPTNFTISVTTEILPVSMTKTSVDCTMYICGDSTECSNLLLQYGSFCTQLNRALTGIAVEQDKNTQEVFAQVKQIYKTPPIKDFGGFNFSQILPDPSKPSKRSFIEDLLFNKVTLADAGFIKQYGDCLGDIAARDLICAQKFNGLTVLPPLLTDEMIAQYTSALLAGTITSGWTFGAGAALQIPFAMQMAYRFNGIGVTQNVLYENQKLIANQFNSAIGKIQDSLSSTASALGKLQDVVNQNAQALNTLVKQLSSNCGAISSVLNDILSRLDKVEAEVQIDRLITCRLQSLQTYVTQQLIRAAEIRASANLAATKMSECVLGQSKRVDFCGKGYHLMSFPQSAPHGVVFLHVTYVPAQEKNFTTAPAICHDGKAHFPREGVFVSNGTHWFVTQRNFYEPQIITTDNTFVSGNCDVVIGIVNNTVYDPLQPELDSGGGGSDIDPYKEFGSSYQLLNFLPLDFFPDLNALVDTATALYEEELTGREHCSPHHTAIRQALVCWDELTKLIAWMSSNITSEQVRTIIVNHVNDTWGLKVRQSLWFHLSCLTFGQHTVQEFLVSFGVWIRTPAPYRPPNAPILSTLPEHTVIC

SEQ ID NO: 11449 - protein, 1301 aa, Artificial Sequence; identical to SEQ ID NO: 11404
  SARS-CoV-2/Iceland/247/2020__EPI_ISL_417575 spike protein (1-1147)(F970C_G999C) WhcAg construct

SEQ ID NO: 11450 - protein, 1301 aa, Artificial Sequence
  SARS-CoV-2/Iceland/238/2020__EPI_ISL_417566 spike protein (1-1147)(F970C_G999C) WhcAg construct
MFVFLVLLPLVSSQCVNLTTRTQLPPAYTNSFTRGVYYPDKVFRSSVLHSTQDLFLPFFSNVTWFHAIHVSGTNGTKRFDNPVLPFNDGVYFASTEKSNIIRGWIFGTTLDSKTQSLLIVNNATNVVIKVCEFQFCNDPFLGVYYHKNNKSWMESEFRVYSSANNCTFEYVSQPFLMDLEGKQGNFKNLREFVFKNIDGYFKIYSKHTPINLVRDLPQGFSALEPLVDLPIGINITRFQTLLALHRSYLTPGDSSSGWTAGAAAYYVGYLQPRTFLLKYNENGTITDAVDCALDPLSETKCTLKSFTVEKGIYQTSNFRVQPTESIVRFPNITNLCPFGEVFNATRFASVYAWNRKRISNCVADYSVLYNSASFSTFKCYGVSPTKLNDLCFTNVYADSFVIRGDEVRQIAPGQTGKIADYNYKLPDDFTGCVIAWNSNNLDSKVGGNYNYLYRLFRKSNLKPFERDISTEIYQAGSTPCNGVEGFNCYFPLQSYGFQPTNGVGYQPYRVVVLSFELLHAPATVCGPKKSTNLVKNKCVNFNFNGLTGTGVLTESNKKFLPFQQFGRDIADTTDAVRDPQTLEILDITPCSFGGVSVITPGTNTSNQVAVLYQGVNCTEVPVAIHADQLTPTWRVYSTGSNVFQTRAGCLIGAEHVNNSYECDIPIGAGICASYQTQTNSPRRARSVASQSIIAYTMSLGAENSVAYSNNSIAIPTNFTISVTTEILPVSMTKTSVDCTMYICGDSTECSNLLLQYGSFCTQLNRALTGIAVEQDKNTQEVFAQVKQIYKTPPIKDFGGFNFSQILPDPSKPSKRSFIEDLLFNKVTLADVGFIKQYGDCLGDIAARDLICAQKFNGLTVLPPLLTDEMIAQYTSALLAGTITSGWTFGAGAALQIPFAMQMAYRFNGIGVTQNVLYENQKLIANQFNSAIGKIQDSLSSTASALGKLQDVVNQNAQALNTLVKQLSSNCGAISSVLNDILSRLDKVEAEVQIDRLITCRLQSLQTYVTQQLIRAAEIRASANLAATKMSECVLGQSKRVDFCGKGYHLMSFPQSAPHGVVFLHVTYVPAQEKNFTTAPAICHDGKAHFPREGVFVSNGTHWFVTQRNFYEPQIITTDNTFVSGNCDVVIGIVNNTVYDPLQPELDSGGGGSDIDPYKEFGSSYQLLNFLPLDFFPDLNALVDTATALYEEELTGREHCSPHHTAIRQALVCWDELTKLIAWMSSNITSEQVRTIIVNHVNDTWGLKVRQSLWFHLSCLTFGQHTVQEFLVSFGVWIRTPAPYRPPNAPILSTLPEHTVIC

SEQ ID NO: 11451 - protein, 1301 aa, Artificial Sequence
  SARS-CoV-2/Greece/16/2020__EPI_ISL_418265 spike protein (1-1147)(F970C_G999C) WhcAg construct
MFVFLVLLPLVSSQCVNLTTRTQLPPAYTNSFTRGVYYPDKVFRSSVLHSTQDLFLPFFSNVTWFHAIHVSGTNGTKRFDNPVLPFNDGVYFASTEKSNIIRGWIFGTTLDSKTQSLLIVNNATNVVIKVCEFQFCNDPFLGVYYHKNNKSWMESEFRVYSSANNCTFEYVSQPFLMDLEGKQGNFKNLREFVFKNVDGYFKIYSKHTPINLVRDLPQGFSALEPLVDLPIGINITRFQTLLALHRSYLTPGDSSSGWTAGAAAYYVGYLQPRTFLLKYNENGTITDAVDCALDPLSETKCTLKSFTVEKGIYQTSNFRVQPTESIVRFPNITNLCPFGEVFNATRFASVYAWNRKRISNCVADYSVLYNSASFSTFKCYGVSPTKLNDLCFTNVYADSFVIRGDEVRQIAPGQTGKIADYNYKLPDDFTGCVIAWNSNNLDSKVGGNYNYLYRLFRKSNLKPFERDISTEIYQAGSTPCNGVEGFNCYFPLQSYGFQPTNGVGYQPYRVVVLSFELLHAPATVCGPKKSTNLVKNKCVNFNFNGLTGTGVLTESNKKFLPFQQFGRDIADTTDAVRDPQTLEILDITPCSFGGVSVITPGTNTSNQVAVLYQDVNCTEVPVAIHADQLTPTWRVYSTGSNVFQTRAGCLIGAEHVNNSYECDIPIGAGICASYQTQTNSPRRARSVASQSIIAYTMSLGAENSVAYSNNSIAIPTNFTISVTTEILPVSMTKTSVDCTMYICGDSTECSNLLLQYGSFCTQLNRALTGIAVEQDKNTQEVFAQVKQIYKTPPIKDFGGFNFSQILPDPSKPSKRSFIEDLLFNKVTLADAGFIKQYGDCLGDIAARDLICAQKFNGLTVLPPLLTDEMIAQYTSALLAGTITSGWTFGAGAALQIPFAMQMAYRFNGIGVTQNVLYENQKLIANQFNSAIGKIQDSLSSTASALGKLQDVVNQNAQALNTLVKQLSSNCGAISSVLNDILSRLDKVEAEVQIDRLITCRLQSLQTYVTQQLIRAAEIRASANLAATKMSECVLGQSKRVDFCGKGYHLMSFPQSAPHGVVFLHVTYVPAQEKNFTTAPAICHDGKAHFPREGVFVSNGTHWFVTQRNFYEPQIITTDNTFVSGNCDVVIGIVNNTVYDPLQPELDSGGGGSDIDPYKEFGSSYQLLNFLPLDFFPDLNALVDTATALYEEELTGREHCSPHHTAIRQALVCWDELTKLIAWMSSNITSEQVRTIIVNHVNDTWGLKVRQSLWFHLSCLTFGQHTVQEFLVSFGVWIRTPAPYRPPNAPILSTLPEHTVIC

SEQ ID NO: 11452 - protein, 1301 aa, Artificial Sequence
  SARS-CoV-2/Iceland/319/2020__EPI_ISL_417648 spike protein (1-1147)(F970C_G999C) WhcAg construct
MFVFLVLLPLVSSQCVNLTTRTQLPPAYTNSFTRGVYYPDKVFRSSVLHSTQDLFLPFFSNVTWFHAIHVSGTNGTKRFDNPVLPFNDGVYFASTEKSNIIRGWIFGTTLDSKTQSLLIVNNATNVVIKVCEFQFCNDPFLGVYYHKNNKSWMESEFRVYSSANNCTFEYVSQPFLIDLEGKQGNFKNLREFVFKNIDGYFKIYSKHTPINLVRDLPQGFSALEPLVDLPIGINITRFQTLLALHRSYLTPGDSSSGWTAGAAAYYVGYLQPRTFLLKYNENGTITDAVDCALDPLSETKCTLKSFTVEKGIYQTSNFRVQPTESIVRFPNITNLCPFGEVFNATRFASVYAWNRKRISNCVADYSVLYNSASFSTFKCYGVSPTKLNDLCFTNVYADSFVIRGDEVRQIAPGQTGKIADYNYKLPDDFTGCVIAWNSNNLDSKVGGNYNYLYRLFRKSNLKPFERDISTEIYQAGSTPCNGVEGFNCYFPLQSYGFQPTNGVGYQPYRVVVLSFELLHAPATVCGPKKSTNLVKNKCVNFNFNGLTGTGVLTESNKKFLPFQQFGRDIADTTDAVRDPQTLEILDITPCSFGGVSVITPGTNTSNQVAVLYQGVNCTEVPVAIHADQLTPTWRVYSTGSNVFQTRAGCLIGAEHVNNSYECDIPIGAGICASYQTQTNSPRRARSVASQSIIAYTMSLGAENSVAYSNNSIAIPTNFTISVTTEILPVSMTKTSVDCTMYICGDSTECSNLLLQYGSFCTQLNRALTGIAVEQDKNTQEVFAQVKQIYKTPPIKDFGGFNFSQILPDPSKPSKRSFIEDLLFNKVTLADAGFIKQYGDCLGDIAARDLICAQKFNGLTVLPPLLTDEMIAQYTSALLAGTITSGWTFGAGAALQIPFAMQMAYRFNGIGVTQNVLYENQKLIANQFNSAIGKIQDSLSSTASALGKLQDVVNQNAQALNTLVKQLSSNCGAISSVLNDILSRLDKVEAEVQIDRLITCRLQSLQTYVTQQLIRAAEIRASANLAATKMSECVLGQSKRVDFCGKGYHLMSFPQSAPHGVVFLHVTYVPAQEKNFTTAPAICHDGKAHFPREGVFVSNGTHWFVTQRNFYEPQIITTDNTFVSGNCDVVIGIVNNTVYDPLQPELDSGGGGSDIDPYKEFGSSYQLLNFLPLDFFPDLNALVDTATALYEEELTGREHCSPHHTAIRQALVCWDELTKLIAWMSSNITSEQVRTIIVNHVNDTWGLKVRQSLWFHLSCLTFGQHTVQEFLVSFGVWIRTPAPYRPPNAPILSTLPEHTVIC

SEQ ID NO: 11453 - protein, 1301 aa, Artificial Sequence
  SARS-CoV-2/Congo/94/2020__EPI_ISL_417947 spike protein (1-1147)(F970C_G999C) WhcAg construct
MFVFLVLLPLVSSQCVNLTTRTQLPPAYTNSFTRGVYYPDKVFRSSVLHSTQDLFLPFFSNVTWFHAIHVSGTNGTKRFDNPVLPFNDGVYFASTEKSNIIRGWIFGTTLDSKTQSLLIVNNATNVVIKVCEFQFCNDPFLGVYYHKNNKSWMESEFRVYSSANNCTFEYVSQPFLMDLEGKQGNFKNLREFVFKNIDGYFKIYSKHTPINLVRDLPQGFSALEPLVDLPIGINITRFQTLLALHRSYLTPGDSSSGWTAGAAAYYVGYLQPRTFLLKYNENGTITDAVDCALDPLSETKCTLKSFTVEKGIYQTSNFRVQPTESIVRFPNITNLCPFGEVFNATRFASVYAWNRKRISNCVADYSVLYNSASFSTFKCYGVSPTKLNDLCFTNVYADSFVIRGDEVRQIAPGQTGKIADYNYKLPDDFTGCVIAWNSNNLDSKVGGNYNYLYRLFRKSNLKPFERDISTEIYQAGSTPCNGVEGFNCYFPLQSYGFQPTNGVGYQPYRVVVLSFELLHAPATVCGPKKSTNLVKNKCVNFNFNGLTGTGVLTESNKKFLPFQQFGRDIADTTDAVRDPQTLEILDITPCSFGGVSVITPGTNTSNQVAVLYQGVNCTEVPVAIHADQLTPTWRVYSTGSNVFQTRAGCLIGAEHVNNSYECDIPIGAGICASYQTQTNSPRRARSVASQSIIAYTMSLGAENSVAYSNNSIAIPTNFTISVTTEILPVSMTKTSVDCTMYICGDSTECSNLLLQYGSFCTQLNRALTGIAVEQDKNTQEVFAQVKQIYKTPPIKDFGGFNFSQILPDPSKPSKRSFIEDILFNKVTLADAGFIKQYGDCLGDIAARDLICAQKFNGLTVLPPLLTDEMIAQYTSALLAGTITSGWTFGAGAALQIPFAMQMAYRFNGIGVTQNVLYENQKLIANQFNSAIGKIQDSLSSTASALGKLQDVVNQNAQALNTLVKQLSSNCGAISSVLNDILSRLDKVEAEVQIDRLITCRLQSLQTYVTQQLIRAAEIRASANLAATKMSECVLGQSKRVDFCGKGYHLMSFPQSAPHGVVFLHVTYVPAQEKNFTTAPAICHDGKAHFPREGVFVSNGTHWFVTQRNFYEPQIITTDNTFVSGNCDVVIGIVNNTVYDPLQPELDSGGGGSDIDPYKEFGSSYQLLNFLPLDFFPDLNALVDTATALYEEELTGREHCSPHHTAIRQALVCWDELTKLIAWMSSNITSEQVRTIIVNHVNDTWGLKVRQSLWFHLSCLTFGQHTVQEFLVSFGVWIRTPAPYRPPNAPILSTLPEHTVIC

SEQ ID NO: 11454 - protein, 1301 aa, Artificial Sequence
  SARS-CoV-2/Congo/158/2020__EPI_ISL_417950 spike protein (1-1147)(F970C_G999C) WhcAg construct
MFVFLVLLPLVSSQCVNLTTRTQLPPAYTNSFTRGVYYPDKVFRSSVLHSTQDLFLPFFSNVTWFHAIHVSGTNGTKRFDNPVLPFNDGVYFASTEKSNIIRGWIFGTTLDSKTQSLLIVNNATNVVIKVCEFQFCNDPFLGVYYHKNNKSWMESEFRVYSSANNCTFEYVSQPFLMDLEGKQGNFKNLREFVFKNIDGYFKIYSKHTPINLVRDLPQGFSALEPLVDLPIGINITRFQTLLALHRSYLTPGDSSSGWTAGAAAYYVGYLQPRTFLLKYNENGTITDAVDCALDPLSETKCTLKSFTVEKGIYQTSNFRVQPTESIVRFPNITNLCPFGEVFNATRFASVYAWNRKRISNCVADYSVLYNSASFSTFKCYGVSPTKLNDLCFTNVYADSFVIRGDEVRQIAPGQTGKIADYNYKLPDDFTGCVIAWNSNNLDSKVGGNYNYLYRLFRKSNLKPFERDISTEIYQAGSTPCNGVEGFNCYFPLQSYGFQPTNGVGYQPYRVVVLSFELLHAPATVCGPKKSTNLVKNKCVNFNFNGLTGTGVLTESNKKFLPFQQFGRDIADTTDAVRDPQTLEILDITPCSFGGVSVITPGTNTSNQVAVLYQDVNCTEVPVAIHADQLTPTWRVYSTGSNVFQTRAGCLIGAEHVNNSYECDIPIGAGICASYQTQTNSPRRARSVASQSIIAYTMSLGAENSVAYSNNSIAIPTNFTISVTTEILPVSMTKTSVDCTMYICGDSTECSNLLLQYGSFCTQLNRALTGIAVEQDKNTQEVFAQVKQIYKTPPIKDFGGFNFSQILPDPSKPSKRSFIEDLLFNKVTLADAGFIKQYGDCLGDIAARDLICAQKFNGLTVLPPLLTDEMIAQYTSALLAGTITSGWTFGAGAALQIPFAMQMAYRFNGIGVTQNVLYENQKLIANQFNSAIGKIQDSLSSTASALGKLQDVVNQNAQALNTLVKQLSSNCGAISSVLNDILSRLDKVEAEVQIDRLITCRLQSLQTYVTQQLIRAAEIRASANLAATKMSECVLGQSKRVDFCGKGYHLMSFPQSAPHGVVFLHVTYVPAQEKNFTTAPAICHDGKAHFPREGVFVSNGTHWFVTQRNFYEPQIITTDNTFLSGNCDVVIGIVNNTVYDPLQPELDSGGGGSDIDPYKEFGSSYQLLNFLPLDFFPDLNALVDTATALYEEELTGREHCSPHHTAIRQALVCWDELTKLIAWMSSNITSEQVRTIIVNHVNDTWGLKVRQSLWFHLSCLTFGQHTVQEFLVSFGVWIRTPAPYRPPNAPILSTLPEHTVIC

SEQ ID NO: 11455 - protein, 1301 aa, Artificial Sequence
  SARS-CoV-2/USA/UT-00034/2020__EPI_ISL_417977 spike protein (1-1147)(F970C_G999C) WhcAg construct
MFVFLVLLPLVSSQCVNLTTRTQLPPAYTNSFTRGVYYPDKVFRSSVLHSTQDLFLPFFSNVTWFHAIHVSGTNGTKRFDNPVLPFNDGVYFASTEKSNIIRGWIFGTTLDSKTQSLLIVNNATNVVIKVCEFQFCNDPFLGVYYYKNNKSWMESEFRVYSSANNCTFEYVSQPFLMDLEGKQGNFKNLREFVFKNIDGYFKIYSKHTPINLVRDLPQGFSALEPLVDLPIGINITRFQTLLALHRSYLTPGDSSSGWTAGAAAYYVGYLQPRTFLLKYNENGTITDAVDCALDPLSETKCTLKSFTVEKGIYQTSNFRVQPTESIVRFPNITNLCPFGEVFNATRFASVYAWNRKRISNCVADYSVLYNSASFSTFKCYGVSPTKLNDLCFTNVYADSFVIRGDEVRQIAPGQTGKIADYNYKLPDDFTGCVIAWNSNNLDSKVGGNYNYLYRLFRKSNLKPFERDISTEIYQAGSTPCNGVEGFNCYFPLQSYGFQPTNGVGYQPYRVVVLSFELLHAPATVCGPKKSTNLVKNKCVNFNFNGLTGTGVLTESNKKFLPFQQFGRDIADTTDAVRDPQTLEILDITPCSFGGVSVITPGTNTSNQVAVLYQGVNCTEVPVAIHADQLTPTWRVYSTGSNVFQTRAGCLIGAEHVNNSYECDIPIGAGICASYQTQTNSPRRARSVASQSIIAYTMSLGAENSVAYSNNSIAIPTNFTISVTTEILPVSMTKTSVDCTMYICGDSTECSNLLLQYGSFCTQLNRALTGIAVEQDKNTQEVFAQVKQIYKTPPIKDFGGFNFSQILPDPSKPSKRSFIEDLLFNKVTLADAGFIKQYGDCLGDIAARDLICAQKFNGLTVLPPLLTDEMIAQYTSALLAGTITSGWTFGAGAALQIPFAMQMAYRFNGIGVTQNVLYENQKLIANQFNSAIGKIQDSLSSTASALGKLQDVVNQNAQALNTLVKQLSSNCGAISSVLNDILSRLDKVEAEVQIDRLITCRLQSLQTYVTQQLIRAAEIRASANLAATKMSECVLGQSKRVDFCGKGYHLMSFPQSAPHGVVFLHVTYVPAQEKNFTTAPAICHDGKAHFPREGVFVSNGTHWFVTQRNFYEPQIITTDNTFVSGNCDVVIGIVNNTVYDPLQPELDSGGGGSDIDPYKEFGSSYQLLNFLPLDFFPDLNALVDTATALYEEELTGREHCSPHHTAIRQALVCWDELTKLIAWMSSNITSEQVRTIIVNHVNDTWGLKVRQSLWFHLSCLTFGQHTVQEFLVSFGVWIRTPAPYRPPNAPILSTLPEHTVIC

SEQ ID NO: 11456 - protein, 1301 aa, Artificial Sequence
  SARS-CoV-2/USA/UT-00033/2020__EPI_ISL_417976 spike protein (1-1147)(F970C_G999C) WhcAg construct
MFVFLVLLPLVSSQCVNLTTRTQLPPAYTNSFTRGVYYPDKVFRSSVLHSTQDLFLPFFSNVTWFHAIHVSGTNGTKRFDNPVLPFNDGVYFASTEKSNIIRGWIFGTTLDSKTQSLLIVNNATNVVIKVCEFQFCNDPFLGVYYHKNNKSWMESEFRVYSSANNCTFEYVSQPFLMDLEGKQGNFKNLREFVFKNIDGYFKIYSKHTPINLVRDLPQGFSALEPLVDLPIGINITRFQTLLALHRSYLTPGDSSSGLTAGAAAYYVGYLQPRTFLLKYNENGTITDAVDCALDPLSETKCTLKSFTVEKGIYQTSNFRVQPTESIVRFPNITNLCPFGEVFNATRFASVYAWNRKRISNCVADYSVLYNSASFSTFKCYGVSPTKLNDLCFTNVYADSFVIRGDEVRQIAPGQTGKIADYNYKLPDDFTGCVIAWNSNNLDSKVGGNYNYLYRLFRKSNLKPFERDISTEIYQAGSTPCNGVEGFNCYFPLQSYGFQPTNGVGYQPYRVVVLSFELLHAPATVCGPKKSTNLVKNKCVNFNFNGLTGTGVLTESNKKFLPFQQFGRDIADTTDAVRDPQTLEILDITPCSFGGVSVITPGTNTSNQVAVLYQGVNCTEVPVAIHADQLTPTWRVYSTGSNVFQTRAGCLIGAEHVNNSYECDIPIGAGICASYQTQTNSPRRARSVASQSIIAYTMSLGAENSVAYSNNSIAIPTNFTISVTTEILPVSMTKTSVDCTMYICGDSTECSNLLLQYGSFCTQLNRALTGIAVEQDKNTQEVFAQVKQIYKTPPIKDFGGFNFSQILPDPSKPSKRSFIEDLLFNKVTLADAGFIKQYGDCLGDIAARDLICAQKFNGLTVLPPLLTDEMIAQYTSALLAGTITSGWTFGAGAALQIPFAMQMAYRFNGIGVTQNVLYENQKLIANQFNSAIGKIQDSLSSTASALGKLQDVVNQNAQALNTLVKQLSSNCGAISSVLNDILSRLDKVEAEVQIDRLITCRLQSLQTYVTQQLIRAAEIRASANLAATKMSECVLGQSKRVDFCGKGYHLMSFPQSAPHGVVFLHVTYVPAQEKNFTTAPAICHDGKAHFPREGVFVSNGTHWFVTQRNFYEPQIITTDNTFVSGNCDVVIGIVNNTVYDPLQPELDSGGGGSDIDPYKEFGSSYQLLNFLPLDFFPDLNALVDTATALYEEELTGREHCSPHHTAIRQALVCWDELTKLIAWMSSNITSEQVRTIIVNHVNDTWGLKVRQSLWFHLSCLTFGQHTVQEFLVSFGVWIRTPAPYRPPNAPILSTLPEHTVIC

SEQ ID NO: 11457 - protein, 1301 aa, Artificial Sequence
  SARS-CoV-2/USA/WI-13/2020__EPI_ISL_417516 spike protein (1-1147)(F970C_G999C) WhcAg construct
MFVFLVLLPLVSSQCVNLTTRTQLPPAYTNSFTRGVYYPDKVFRSSVLHSTQDLFLPFFSNVTWFHAIHVSGTNGTKRFDNPVLPFNDGVYFASTEKSNIIRGWIFGTTLDSKTQSLLIVNNATNVVIKVCEFQFCNDPFLGVYYHKNNKSWMESEFRVYSSANNCTFEYVSQPFLMDLEGKQGNFKNLREFVFKNIDGYFKIYSKHTPINLVRDLPQGFSALEPLVDLPIGINITRFQTLLALHRSYLTPGDSSSGWTAGAAAYYVGYLQPRTFLLKYNENGTITDAVDCALDPLSETKCTLKSFTVEKGIYQTSNFRVLPTESIVRFPNITNLCPFGEVFNATRFASVYAWNRKRISNCVADYSVLYNSASFSTFKCYGVSPTKLNDLCFTNVYADSFVIRGDEVRQIAPGQTGKIADYNYKLPDDFTGCVIAWNSNNLDSKVGGNYNYLYRLFRKSNLKPFERDISTEIYQAGSTPCNGVEGFNCYFPLQSYGFQPTNGVGYQPYRVVVLSFELLHAPATVCGPKKSTNLVKNKCVNFNFNGLTGTGVLTESNKKFLPFQQFGRDIADTTDAVRDPQTLEILDITPCSFGGVSVITPGTNTSNQVAVLYQGVNCTEVPVAIHADQLTPTWRVYSTGSNVFQTRAGCLIGAEHVNNSYECDIPIGAGICASYQTQTNSPRRARSVASQSIIAYTMSLGAENSVAYSNNSIAIPTNFTISVTTEILPVSMTKTSVDCTMYICGDSTECSNLLLQYGSFCTQLNRALTGIAVEQDKNTQEVFAQVKQIYKTPPIKDFGGFNFSQILPDPSKPSKRSFIEDLLFNKVTLADAGFIKQYGDCLGDIAARDLICAQKFNGLTVLPPLLTDEMIAQYTSALLAGTITSGWTFGAGAALQIPFAMQMAYRFNGIGVTQNVLYENQKLIANQFNSAIGKIQDSLSSTASALGKLQDVVNQNAQALNTLVKQLSSNCGAISSVLNDILSRLDKVEAEVQIDRLITCRLQSLQTYVTQQLIRAAEIRASANLAATKMSECVLGQSKRVDFCGKGYHLMSFPQSAPHGVVFLHVTYVPAQEKNFTTAPAICHDGKAHFPREGVFVSNGTHWFVTQRNFYEPQIITTDNTFVSGNCDVVIGIVNNTVYDPLQPELDSGGGGSDIDPYKEFGSSYQLLNFLPLDFFPDLNALVDTATALYEEELTGREHCSPHHTAIRQALVCWDELTKLIAWMSSNITSEQVRTIIVNHVNDTWGLKVRQSLWFHLSCLTFGQHTVQEFLVSFGVWIRTPAPYRPPNAPILSTLPEHTVIC

SEQ ID NO: 11458 - protein, 1300 aa, Artificial Sequence
  SARS-CoV-2/India/1-27/2020__EPI_ISL_413522 spike protein (1-1146)(F969C_G998C) WhcAg construct
MFVFLVLLPLVSSQCVNLTTRTQLPPAYTNSFTRGVYYPDKVFRSSVLHSTQDLFLPFFSNVTWFHAIHVSGTNGTKRFDNPVLPFNDGVYFASTEKSNIIRGWIFGTTLDSKTQSLLIVNNATNVVIKVCEFQFCNDPFLGVYHKNNKSWMESEFRVYSSANNCTFEYVSQPFLMDLEGKQGNFKNLREFVFKNIDGYFKIYSKHTPINLVRDLPQGFSALEPLVDLPIGINITRFQTLLALHRSYLTPGDSSSGWTAGAAAYYVGYLQPRTFLLKYNENGTITDAVDCALDPLSETKCTLKSFTVEKGIYQTSNFRVQPTESIVRFPNITNLCPFGEVFNATRFASVYAWNRKRISNCVADYSVLYNSASFSTFKCYGVSPTKLNDLCFTNVYADSFVIRGDEVIQIAPGQTGKIADYNYKLPDDFTGCVIAWNSNNLDSKVGGNYNYLYRLFRKSNLKPFERDISTEIYQAGSTPCNGVEGFNCYFPLQSYGFQPTNGVGYQPYRVVVLSFELLHAPATVCGPKKSTNLVKNKCVNFNFNGLTGTGVLTESNKKFLPFQQFGRDIADTTDAVRDPQTLEILDITPCSFGGVSVITPGTNTSNQVAVLYQDVNCTEVPVAIHADQLTPTWRVYSTGSNVFQTRAGCLIGAEHVNNSYECDIPIGAGICASYQTQTNSPRRARSVASQSIIAYTMSLGAENSVAYSNNSIAIPTNFTISVTTEILPVSMTKTSVDCTMYICGDSTECSNLLLQYGSFCTQLNRALTGIAVEQDKNTQEVFAQVKQIYKTPPIKDFGGFNFSQILPDPSKPSKRSFIEDLLFNKVTLADAGFIKQYGDCLGDIAARDLICAQKFNGLTVLPPLLTDEMIAQYTSALLAGTITSGWTFGAGAALQIPFAMQMAYRFNGIGVTQNVLYENQKLIANQFNSAIGKIQDSLSSTASALGKLQDVVNQNAQALNTLVKQLSSNCGAISSVLNDILSRLDKVEAEVQIDRLITCRLQSLQTYVTQQLIRAAEIRASANLAATKMSECVLGQSKRVDFCGKGYHLMSFPQSAPHGVVFLHVTYVPAQEKNFTTAPAICHDGKAHFPREGVFVSNGTHWFVTQRNFYEPQIITTDNTFVSGNCDVVIGIVNNTVYDPLQPELDSGGGGSDIDPYKEFGSSYQLLNFLPLDFFPDLNALVDTATALYEEELTGREHCSPHHTAIRQALVCWDELTKLIAWMSSNITSEQVRTIIVNHVNDTWGLKVRQSLWFHLSCLTFGQHTVQEFLVSFGVWIRTPAPYRPPNAPILSTLPEHTVIC

SEQ ID NO: 11459 - protein, 1295 aa, Artificial Sequence
  SARS-CoV-2/pangolin/Guangxi/P4L/2017__EPI_ISL_410538 spike protein (1-1141)(F964C_G993C) WhcAg construct
MFVFLFVLPLVSSQCVNLTTRTGIPPGYTNSSTRGVYYPDKVFRSSILHLTQDLFLPFFSNVTWFNTINYQGGFKKFDNPVLPFNDGVYFASTEKSNIIRGWIFGTTLDARTQSLLIVNNATNVVIKVCEFQFCTDPFLGVYYHNNNKTWVENEFRVYSSANNCTFEYISQPFLMDLEGKQGNFKNLREFVFKNVDGYFKIYSKHTPIDLVRDLPRGFAALEPLVDLPIGINITRFQTLLALHRSYLTPGNLESGWTTGAAAYYVGYLQQRTFLLSYNQNGTITDAVDCSLDPLSETKCTLKSLTVEKGIYQTSNFRVQPTISIVRFPNITNLCPFGEVFNASKFASVYAWNRKRISNCVADYSVLYNSTSFSTFKCYGVSPTKLNDLCFTNVYADSFVVKGDEVRQIAPGQTGVIADYNYKLPDDFTGCVIAWNSVKQDALTGGNYGYLYRLFRKSKLKPFERDISTEIYQAGSTPCNGQVGLNCYYPLERYGFHPTTGVNYQPFRVVVLSFELLNGPATVCGPKLSTTLVKDKCVNFNFNGLTGTGVLTTSKKQFLPFQQFGRDISDTTDAVRDPQTLEILDITPCSFGGVSVITPGTNTSNQVAVLYQDVNCTEVPMAIHAEQLTPAWRVYSAGANVFQTRAGCLVGAEHVNNSYECDIPVGAGICASYHSMSSLRSVNQRSIIAYTMSLGAENSVAYSNNSIAIPTNFTISVTTEILPVSMTKTSVDCTMYICGDSIECSNLLLQYGSFCTQLNRALTGIAVEQDKNTQEVFAQVKQIYKTPPIKDFGGFNFSQILPDPSKPSKRSFIEDLLFNKVTLADAGFIKQYGDCLGDIAARDLICAQKFNGLTVLPPLLTDEMIAQYTSALLAGTITSGWTFGAGAALQIPFAMQMAYRFNGIGVTQNVLYENQKLIANQFNSAIGKIQDSLSSTASALGKLQDVVNQNAQALNTLVKQLSSNCGAISSVLNDILSRLDKVEAEVQIDRLITCRLQSLQTYVTQQLIRAAEIRASANLAATKMSECVLGQSKRVDFCGKGYHLMSFPQSAPHGVVFLHVTYVPAQEKNFTTAPAICHEGKAHFPREGVFVSNGTHWFITQRNFYEPQIITTDNTFVSGSCDVVIGIVNNTVYDPLQPELDSGGGGSDIDPYKEFGSSYQLLNFLPLDFFPDLNALVDTATALYEEELTGREHCSPHHTAIRQALVCWDELTKLIAWMSSNITSEQVRTIIVNHVNDTWGLKVRQSLWFHLSCLTFGQHTVQEFLVSFGVWIRTPAPYRPPNAPILSTLPEHTVIC

SEQ ID NO: 11460 - protein, 1295 aa, Artificial Sequence
  SARS-CoV-2/pangolin/Guangxi/P5L/2017__EPI_ISL_410540 spike protein (1-1141)(F964C_G993C) WhcAg construct
MFVFLFVLPLVSSQCVNLTTRTGIPPGYTNSSTRGVYYPDKVFRSSILHLTQDLFLPFFSNVTWFNTINYQGGFKKFDNPVLPFNDGVYFASTEKSNIIRGWIFGTTLDARTQSLLIVNNATNVVIKVCEFQFCTDPFLGVYYHNNNKTWVENEFRVYSSANNCTFEYISQPFLMDLEGKQGNFKNLREFVFKNVDGYFKIYSKHTPIDLVRDLPRGFAALEPLVDLPIGINITRFQTLLALHRSYLTPGKLESGWTTGAAAYYVGYLQQRTFLLSYNQNGTITDAVDCSLDPLSETKCTLKSLTVEKGIYQTSNFRVQPTISIVRFPNITNLCPFGEVFNASKFASVYAWNRKRISNCVADYSVLYNSTSFSTFKCYGVSPTKLNDLCFTNVYADSFVVKGDEVRQIAPGQTGVIADYNYKLPDDFTGCVIAWNSVKQDALTGGNYGYLYRLFRKSKLKPFERDISTEIYQAGSTPCNGQVGLNCYYPLERYGFHPTTGVNYQPFRVVVLSFELLNGPATVCGPKLSTTLVKDKCVNFNFNGLTGTGVLTTSKKQFLPFQQFGRDISDTTDAVRDPQTLEILDITPCSFGGVSVITPGTNTSNQVAVLYQDVNCTEVPMAIHAEQLTPAWRVYSAGANVFQTRAGCLVGAEHVNNSYECDIPVGAGICASYHSMSSFRSVNQRSIIAYTMSLGAENSVAYSNNSIAIPTNFTISVTTEILPVSMTKTSVDCTMYICGDSIECSNLLLQYGSFCTQLNRALTGIAVEQDKNTQEVFAQVKQIYKTPPIKDFGGFNFSQILPDPSKPSKRSFIEDLLFNKVTLADAGFIKQYGDCLGDIAARDLICAQKFNGLTVLPPLLTDEMIAQYTSALLAGTITSGWTFGAGAALQIPFAMQMAYRFNGIGVTQNVLYENQKLIANQFNSAIGKIQDSLSSTASALGKLQDVVNQNAQALNTLVKQLSSNCGAISSVLNDILSRLDKVEAEVQIDRLITCRLQSLQTYVTQQLIRAAEIRASANLAATKMSECVLGQSKRVDFCGKGYHLMSFPQSAPHGVVFLHVTYVPAQEKNFTTAPAICHEGKAHFPREGVFVSNGTHWFITQRNFYEPQIITTDNTFVSGSCDVVIGIVNNTVYDPLQPELDSGGGGSDIDPYKEFGSSYQLLNFLPLDFFPDLNALVDTATALYEEELTGREHCSPHHTAIRQALVCWDELTKLIAWMSSNITSEQVRTIIVNHVNDTWGLKVRQSLWFHLSCLTFGQHTVQEFLVSFGVWIRTPAPYRPPNAPILSTLPEHTVIC

SEQ ID NO: 11461 - protein, 1295 aa, Artificial Sequence
  SARS-CoV-2/pangolin/Guangxi/P5E/2017__EPI_ISL_410541 spike protein (1-1141)(F964C_G993C) WhcAg construct
MFVFLFVLPLVSSQCVNLTTRTGIPPGYTNSSTRGVYYPDKVFRSSILHLTQDLFLPFFSNVTWFNTITYQGGSKKFDNPVLPFNDGVYFASTEKSNIIRGWIFGTTLDARTQSLLIVNNATNVVIKVCEFQFCTDPFLGVYYHNNNKTWVENEFRVYSSANNCTFEYISQPFLMDLEGKQGNFKNLREFVFKNVDGYFKIYSKHTPIDLVRDLPRGFAALEPLVDLPIGINITRFQTLLALHRSYLTPGKLESGWTTGAAAYYVGYLQQRTFLLSYNQNGTITDAVDCSLDPLSETKCTLKSLTVEKGIYQTSNFRVQPTISIVRFPNITNLCPFGEVFNASKFASVYAWNRKRISNCVADYSVLYNSTSFSTFKCYGVSPTKLNDLCFTNVYADSFVVKGDEVRQIAPGQTGVIADYNYKLPDDFTGCVIAWNSVKQDALTGDNYGYLYRLFRKSKLKPFERDISTEIYQAGSTPCNGQVGLNCYYPLERYGFHPTTGVNYQPFRVVVLSFELLNGPATVCGPKLSTTLVKDKCVNFNFNGLTGTGVLTTSKKQFLPFQQFGRDISDTTDAVRDPQTLEILDITPCSFGGVSVITPGTNTSNQVAVLYQDVNCTEVPMAIHAEQLTPAWRVYSAGANVFQTRAGCLVGAEHVNNSYECDIPVGAGICASYHSMSSFRSVNQRSIIAYTMSLGAENSVAYSNNSIAIPTNFTISVTTEILPVSMTKTSVDCTMYICGDSIECSNLLLQYGSFCTQLNRALTGIAVEQDKNTQEVFAQVKQIYKTPPIKDFGGFNFSQILPDPSKPSKRSFIEDLLFNKVTLADAGFIKQYGDCLGDIAARDLICAQKFNGLTVLPPLLTDEMIAQYTSALLAGTITSGWTFGAGAALQIPFAMQMAYRFNGIGVTQNVLYENQKLIANQFNSAIGKIQDSLSSTASALGKLQDVVNQNAQALNTLVKQLSSNCGAISSVLNDILSRLDKVEAEVQIDRLITCRLQSLQTYVTQQLIRAAEIRASANLAATKMSECVLGQSKRVDFCGKGYHLMSFPQSAPHGVVFLHVTYVPAQEKNFTTAPAICHEGKAHFPREGVFVSNGTHWFITQRNFYEPQIITTDNTFVSGSCDVVIGIVNNTVYDPLQPELDSGGGGSDIDPYKEFGSSYQLLNFLPLDFFPDLNALVDTATALYEEELTGREHCSPHHTAIRQALVCWDELTKLIAWMSSNITSEQVRTIIVNHVNDTWGLKVRQSLWFHLSCLTFGQHTVQEFLVSFGVWIRTPAPYRPPNAPILSTLPEHTVIC

SEQ ID NO: 11462 - protein, 1293 aa, Artificial Sequence
  SARS-CoV-2/pangolin/Guangxi/P1E/2017__EPI_ISL_410539 spike protein (1-1139)(F962C_G991C) WhcAg construct
MFVFLFVLPLVSSQCVNLTTRTGIQPGYTNSSTRGVYYPDKVFRSSILHLTQDLFLPFFSNVTWFNTINYQGGFKKFDNPVLPFNDGVYFASTEKSNIIRGWIFGTTLDARTQSLLIVNNATNVVIKVCEFQFCTDPFLGVYYHNNNKTWVENEFRVYSSANNCTFEYISQPFLMDLEGKQGNFKNLREFVFKNVDGYFKIYSKHTPIDLVRDLPRGFAALEPLVDLPIGINITRFQTLLALHRSYLTPGKLESGWTTGAAAYYVGYLQQRTFLLSYNQNGTITDAVDCSLDPLSETKCTLKSLTVEKGIYQTSNFRVQPTISIVRFPNITNLCPFGEVFNASKFASVYAWNRKRISNCVADYSVLYNSTSFSTFKCYGVSPTKLNDLCFTNVYADSFVVKGDEVRQIAPGQTGVIADYNYKLPDDFTGCVIAWNSVKQDALTGGNYLYRLFRKSKLKPFERDISTEIYQAGSTPCNGQVGLNCYYPLERYGFHPTTGVNYQPFRVVVLSFELLNGPATVCGPKLSTTLVKDKCVNFNFNGLTGTGVLTTSKKQFLPFQQFGRDISDTTDAVRDPQTLEILDITPCSFGGVSVITPGTNTSNQVAVLYQDVNCTEVPMAIHAEQLTPAWRVYSAGANVFQTRAGCLVGAEHVNNSYECDIPVGAGICASYHSMSSLRSVNQRSIIAYTMSLGAENSVAYSNNSIAIPTNFTISVTTEILPVSMTKTSVDCTMYICGDSIECSNLLLQYGSFCTQLNRALTGIAVEQDKNTQEVFAQVKQIYKTPPIKDFGGFNFSQILPDPSKPSKRSFIEDLLFNKVTLADAGFIKQYGDCLGDIAARDLICAQKFNGLTVLPPLLTDEMIAQYTSALLAGTITSGWTFGAGAALQIPFAMQMAYRFNGIGVTQNVLYENQKLIANQFNSAIGKIQDSLSSTASALGKLQDVVNQNAQALNTLVKQLSSNCGAISSVLNDILSRLDKVEAEVQIDRLITCRLQSLQTYVTQQLIRAAEIRASANLAATKMSECVLGQSKRVDFCGKGYHLMSFPQSAPHGVVFLHVTYVPAQEKNFTTAPAICHEGKAHFPREGVFVSNGTHWFITQRNFYEPQIITTDNTFVSGSCDVVIGIVNNTVYDPLQPELDSGGGGSDIDPYKEFGSSYQLLNFLPLDFFPDLNALVDTATALYEEELTGREHCSPHHTAIRQALVCWDELTKLIAWMSSNITSEQVRTIIVNHVNDTWGLKVRQSLWFHLSCLTFGQHTVQEFLVSFGVWIRTPAPYRPPNAPILSTLPEHTVIC

SEQ ID NO: 11463 - protein, 1301 aa, Artificial Sequence
  SARS-CoV-2/Wuhan/WIV05/2019__EPI_ISL_402128 spike protein (1-1147)(A972C_R995C) WhcAg construct
MFVFLVLLPLVSSQCVNLTTRTQLPPAYTNSFTRGVYYPDKVFRSSVLHSTQDLFLPFFSNVTWFHAIHVSGTNGTKRFDNPVLPFNDGVYFASTEKSNIIRGWIFGTTLDSKTQSLLIVNNATNVVIKVCEFQFCNDPFLGVYYHKNNKSWMESEFRVYSSANNCTFEYVSQPFLMDLEGKQGNFKNLREFVFKNIDGYFKIYSKHTPINLVRDLPQGFSALEPLVDLPIGINITRFQTLLALHRSYLTPGDSSSGWTAGAAAYYVGYLQPRTFLLKYNENGTITDAVDCALDPLSETKCTLKSFTVEKGIYQTSNFRVQPTESIVRFPNITNLCPFGEVFNATRFASVYAWNRKRISNCVADYSVLYNSASFSTFKCYGVSPTKLNDLCFTNVYADSFVIRGDEVRQIAPGQTGKIADYNYKLPDDFTGCVIAWNSNNLDSKVGGNYNYLYRLFRKSNLKPFERDISTEIYQAGSTPCNGVEGFNCYFPLQSYGFQPTNGVGYQPYRVVVLSFELLHAPATVCGPKKSTNLVKNKCVNFNFNGLTGTGVLTESNKKFLPFQQFGRDIADTTDAVRDPQTLEILDITPCSFGGVSVITPGTNTSNQVAVLYQDVNCTEVPVAIHADQLTPTWRVYSTGSNVFQTRAGCLIGAEHVNNSYECDIPIGAGICASYQTQTNSPRRARSVASQSIIAYTMSLGAENSVAYSNNSIAIPTNFTISVTTEILPVSMTKTSVDCTMYICGDSTECSNLLLQYGSFCTQLNRALTGIAVEQDKNTQEVFAQVKQIYKTPPIKDFGGFNFSQILPDPSKPSKRSFIEDLLFNKVTLADAGFIKQYGDCLGDIAARDLICAQKFNGLTVLPPLLTDEMIAQYTSALLAGTITSGWTFGAGAALQIPFAMQMAYRFNGIGVTQNVLYENQKLIANQFNSAIGKIQDSLSSTASALGKLQDVVNQNAQALNTLVKQLSSNFGCISSVLNDILSRLDKVEAEVQIDCLITGRLQSLQTYVTQQLIRAAEIRASANLAATKMSECVLGQSKRVDFCGKGYHLMSFPQSAPHGVVFLHVTYVPAQEKNFTTAPAICHDGKAHFPREGVFVSNGTHWFVTQRNFYEPQIITTDNTFVSGNCDVVIGIVNNTVYDPLQPELDSGGGGSDIDPYKEFGSSYQLLNFLPLDFFPDLNALVDTATALYEEELTGREHCSPHHTAIRQALVCWDELTKLIAWMSSNITSEQVRTIIVNHVNDTWGLKVRQSLWFHLSCLTFGQHTVQEFLVSFGVWIRTPAPYRPPNAPILSTLPEHTVIC

SEQ ID NO: 11464 - protein, 1297 aa, Artificial Sequence
  SARS-CoV-2/bat/Yunnan/RaTG13/2013__EPI_ISL_402131 spike protein (1-1143)(A968C_R991C) WhcAg construct
MFVFLVLLPLVSSQCVNLTTRTQLPPAYTNSSTRGVYYPDKVFRSSVLHLTQDLFLPFFSNVTWFHAIHVSGTNGIKRFDNPVLPFNDGVYFASTEKSNIIRGWIFGTTLDSKTQSLLIVNNATNVVIKVCEFQFCNDPFLGVYYHKNNKSWMESEFRVYSSANNCTFEYVSQPFLMDLEGKQGNFKNLREFVFKNIDGYFKIYSKHTPINLVRDLPPGFSALEPLVDLPIGINITRFQTLLALHRSYLTPGDSSSGWTAGAAAYYVGYLQPRTFLLKYNENGTITDAVDCALDPLSETKCTLKSFTVEKGIYQTSNFRVQPTDSIVRFPNITNLCPFGEVFNATTFASVYAWNRKRISNCVADYSVLYNSTSFSTFKCYGVSPTKLNDLCFTNVYADSFVITGDEVRQIAPGQTGKIADYNYKLPDDFTGCVIAWNSKHIDAKEGGNFNYLYRLFRKANLKPFERDISTEIYQAGSKPCNGQTGLNCYYPLYRYGFYPTDGVGHQPYRVVVLSFELLNAPATVCGPKKSTNLVKNKCVNFNFNGLTGTGVLTESNKKFLPFQQFGRDIADTTDAVRDPQTLEILDITPCSFGGVSVITPGTNASNQVAVLYQDVNCTEVPVAIHADQLTPTWRVYSTGSNVFQTRAGCLIGAEHVNNSYECDIPIGAGICASYQTQTNSRSVASQSIIAYTMSLGAENSVAYSNNSIAIPTNFTISVTTEILPVSMTKTSVDCTMYICGDSTECSNLLLQYGSFCTQLNRALTGIAVEQDKNTQEVFAQVKQIYKTPPIKDFGGFNFSQILPDPSKPSKRSFIEDLLFNKVTLADAGFIKQYGDCLGDIAARDLICAQKFNGLTVLPPLLTDEMIAQYTSALLAGTITSGWTFGAGAALQIPFAMQMAYRFNGIGVTQNVLYENQKLIANQFNSAIGKIQDSLSSTASALGKLQDVVNQNAQALNTLVKQLSSNFGCISSVLNDILSRLDKVEAEVQIDCLITGRLQSLQTYVTQQLIRAAEIRASANLAATKMSECVLGQSKRVDFCGKGYHLMSFPQSAPHGVVFLHVTYVPAQEKNFTTAPAICHDGKAHFPREGVFVSNGTHWFVTQRNFYEPQIITTDNTFVSGSCDVVIGIVNNTVYDPLQPELDSGGGGSDIDPYKEFGSSYQLLNFLPLDFFPDLNALVDTATALYEEELTGREHCSPHHTAIRQALVCWDELTKLIAWMSSNITSEQVRTIIVNHVNDTWGLKVRQSLWFHLSCLTFGQHTVQEFLVSFGVWIRTPAPYRPPNAPILSTLPEHTVIC

SEQ ID NO: 11465 - protein, 1301 aa, Artificial Sequence
  SARS-CoV-2/Wuhan/HBCDC-HB-01/2019__EPI_ISL_402132 spike protein (1-1147)(A972C_R995C) WhcAg construct
MFVFLVLLPLVSSQCVNLTTRTQLPPAYTNSITRGVYYPDKVFRSSVLHSTQDLFLPFFSNVTWFHAIHVSGTNGTKRFDNPVLPFNDGVYFASTEKSNIIRGWIFGTTLDSKTQSLLIVNNATNVVIKVCEFQFCNDPFLGVYYHKNNKSWMESEFRVYSSANNCTFEYVSQPFLMDLEGKQGNFKNLREFVFKNIDGYFKIYSKHTPINLVRDLPQGFSALEPLVDLPIGINITRFQTLLALHRSYLTPGDSSSGWTAGAAAYYVGYLQPRTFLLKYNENGTITDAVDCALDPLSETKCTLKSFTVEKGIYQTSNFRVQPTESIVRFPNITNLCPFGEVFNATRFASVYAWNRKRISNCVADYSVLYNSASFSTFKCYGVSPTKLNDLCFTNVYADSFVIRGDEVRQIAPGQTGKIADYNYKLPDDFTGCVIAWNSNNLDSKVGGNYNYLYRLFRKSNLKPFERDISTEIYQAGSTPCNGVEGFNCYFPLQSYGFQPTNGVGYQPYRVVVLSFELLHAPATVCGPKKSTNLVKNKCVNFNFNGLTGTGVLTESNKKFLPFQQFGRDIADTTDAVRDPQTLEILDITPCSFGGVSVITPGTNTSNQVAVLYQDVNCTEVPVAIHADQLTPTWRVYSTGSNVFQTRAGCLIGAEHVNNSYECDIPIGAGICASYQTQTNSPRRARSVASQSIIAYTMSLGAENSVAYSNNSIAIPTNFTISVTTEILPVSMTKTSVDCTMYICGDSTECSNLLLQYGSFCTQLNRALTGIAVEQDKNTQEVFAQVKQIYKTPPIKDFGGFNFSQILPDPSKPSKRSFIEDLLFNKVTLADAGFIKQYGDCLGDIAARDLICAQKFNGLTVLPPLLTDEMIAQYTSALLAGTITSGWTFGAGAALQIPFAMQMAYRFNGIGVTQNVLYENQKLIANQFNSAIGKIQDSLSSTASALGKLQDVVNQNAQALNTLVKQLSSNFGCISSVLNDILSRLDKVEAEVQIDCLITGRLQSLQTYVTQQLIRAAEIRASANLAATKMSECVLGQSKRVDFCGKGYHLMSFPQSAPHGVVFLHVTYVPAQEKNFTTAPAICHDGKAHFPREGVFVSNGTHWFVTQRNFYEPQIITTDNTFVSGNCDVVIGIVNNTVYDPLQPELDSGGGGSDIDPYKEFGSSYQLLNFLPLDFFPDLNALVDTATALYEEELTGREHCSPHHTAIRQALVCWDELTKLIAWMSSNITSEQVRTIIVNHVNDTWGLKVRQSLWFHLSCLTFGQHTVQEFLVSFGVWIRTPAPYRPPNAPILSTLPEHTVIC

SEQ ID NO: 11466 - protein, 1301 aa, Artificial Sequence
  SARS-CoV-2/Guangdong/20SF028/2020__EPI_ISL_403936 spike protein (1-1147)(A972C_R995C) WhcAg construct
MFVFLVLLPLVSSQCVNLTTRTQLPPAYTNSFTRGVYYPDKVFRSSVLYSTQDLFLPFFSNVTWFHAIHVSGTNGTKRFDNPVLPFNDGVYFASTEKSNIIRGWIFGTTLDSKTQSLLIVNNATNVVIKVCEFQFCNDPFLGVYYHKNNKSWMESEFRVYSSANNCTFEYVSQPFLMDLEGKQGNFKNLREFVFKNIDGYFKIYSKHTPINLVRDLPQGFSALEPLVDLPIGINITRFQTLLALHRSYLTPGDSSSGWTAGAAAYYVGYLQPRTFLLKYNENGTITDAVDCALDPLSETKCTLKSFTVEKGIYQTSNFRVQPTESIVRFPNITNLCPFGEVFNATRFASVYAWNRKRISNCVADYSVLYNSASFSTFKCYGVSPTKLNDLCFTNVYADSFVIRGDEVRQIAPGQTGKIADYNYKLPDDFTGCVIAWNSNNLDSKVGGNYNYLYRLFRKSNLKPFERDISTEIYQAGSTPCNGVEGFNCYFPLQSYGFQPTNGVGYQPYRVVVLSFELLHAPATVCGPKKSTNLVKNKCVNFNFNGLTGTGVLTESNKKFLPFQQFGRDIADTTDAVRDPQTLEILDITPCSFGGVSVITPGTNTSNQVAVLYQDVNCTEVPVAIHADQLTPTWRVYSTGSNVFQTRAGCLIGAEHVNNSYECDIPIGAGICASYQTQTNSPRRARSVASQSIIAYTMSLGAENSVAYSNNSIAIPTNFTISVTTEILPVSMTKTSVDCTMYICGDSTECSNLLLQYGSFCTQLNRALTGIAVEQDKNTQEVFAQVKQIYKTPPIKDFGGFNFSQILPDPSKPSKRSFIEDLLFNKVTLADAGFIKQYGDCLGDIAARDLICAQKFNGLTVLPPLLTDEMIAQYTSALLAGTITSGWTFGAGAALQIPFAMQMAYRFNGIGVTQNVLYENQKLIANQFNSAIGKIQDSLSSTASALGKLQDVVNQNAQALNTLVKQLSSNFGCISSVLNDILSRLDKVEAEVQIDCLITGRLQSLQTYVTQQLIRAAEIRASANLAATKMSECVLGQSKRVDFCGKGYHLMSFPQSAPHGVVFLHVTYVPAQEKNFTTAPAICHDGKAHFPREGVFVSNGTHWFVTQRNFYEPQIITTDNTFVSGNCDVVIGIVNNTVYDPLQPELDSGGGGSDIDPYKEFGSSYQLLNFLPLDFFPDLNALVDTATALYEEELTGREHCSPHHTAIRQALVCWDELTKLIAWMSSNITSEQVRTIIVNHVNDTWGLKVRQSLWFHLSCLTFGQHTVQEFLVSFGVWIRTPAPYRPPNAPILSTLPEHTVIC

SEQ ID NO: 11467 - protein, 1301 aa, Artificial Sequence
  SARS-CoV-2/Shenzhen/SZTH-001/2020__EPI_ISL_406592 spike protein (1-1147)(A972C_R995C) WhcAg construct
MFVFLVLLPLVSSQCVNLTTRTQLPPAYTNSFTRGVYYPDKVFRSSVLHSTQDLFLPFFSNVTWFHAIHVSGTNGTKRFDNPVLPFNDGVYFASTEKSNIIRGWIFGTTLDSKTQSLLIVNNATNVVIKVCEFQFCNDPFLGVYYHKNNKSWMESEFRVYSSANNCTFEYVSQPFLMDLEGKQGNFKNLREFVFKNIDGYFKIYSKHTPINLVRDLPQGFSALEPLVDLPIGINITRFQTLLALHRSYLTPGDSSSGWTAGAAAYYVGYLQPRTFLLKYNENGTITDAVDCALDPLSETKCTLKSFTVEKGIYQTSNFRVQPTESIVRFPNITNLCPFGEVFNATRFASVYAWNRKRISNCVADYSVLYNSASFSTFKCYGVSPTKLNDLCFTNVYADSFVIRGDEVRQIAPGQTGKIADYNYKLPDDFTGCVIAWNSNNLDSKVGGNYNYLYRLFRKSNLKPFERDISTEIYQAGSTPCNGVEGFNCYFPLQSYGFQPTNGVGYQPYRVVVLSFELLHAPATVCGPKKSTNLVKNKCVNFNFNGLTGTGVLTESNKKFLPFQQFGRDIADTTDAVRDPQTLEILDITPCSFGGVSVITPGTNTSNQVAVLYQDVNCTEVPVAIHADQLTPTWRVYSTGSNVFQTRAGCLIGAEHVNNSYECDIPIGAGICASYQTQTNSPRRARSVASQSIIAYTMSLGAENSVAYSNNSIAIPTNFTISVTTEILPVSMTKTSVDCTMYICGDSTECSNLLLQYGSFCTQLNRALTGIAVEQDKNTQEVFAQVKQIYKTPPIKDFGGFNFSQILPDPSKPSKRSFIEDLLFNKVTLADAGFIKQYGDCLGDIAARDLICAQKFNGLTVLPPLLTDEMIAQYTSALLAGTITSGWTFGAGAALQIPFAMQMAYRFNGIGVTQNVLYENQKLIANQFNSAIGKIQDSLSSTASALGKLQDVVNQNAQALNTLVKQLSSNFGCISSVLNDILSRLDKVEAEVQIDCLITGRLQSLQTYVTQQLIRAAEIRASANLAATKMSECVLGQSKRVDFCGKGYHLMSFPQSAPHGVVFLHVTYVPAQEKNFTTAPAICHDGKAHFPREGVFVSNGTHWFVTQRNFYEPQIITTDNTFVSGNCDVLIGIVNNTVYDPLQPELDSGGGGSDIDPYKEFGSSYQLLNFLPLDFFPDLNALVDTATALYEEELTGREHCSPHHTAIRQALVCWDELTKLIAWMSSNITSEQVRTIIVNHVNDTWGLKVRQSLWFHLSCLTFGQHTVQEFLVSFGVWIRTPAPYRPPNAPILSTLPEHTVIC

SEQ ID NO: 11468 - protein, 1301 aa, Artificial Sequence
  SARS-CoV-2/Shenzhen/SZTH-004/2020__EPI_ISL_406595 spike protein (1-1147)(A972C_R995C) WhcAg construct
MFVFLVLLPLVSSQCVNLTTRTQLPPAYTNSFTRGVYYPDKVFRSSVLHSTQDLFLPFFSNVTWFHAIHVSGTNGTKRFDNPVLPFNDGVYFASTEKSNIIRGWIFGTTLDSKTQSLLIVNNATNVVIKVCEFQFCNDPFLGVYYHKNNKSWMESEFRVYSSANNCTFEYVSQPFLMDLEGKQGNFKNLREFVFKNIDGYFKIYSKHTPINLVRDLPQGFSALEPLVDLPIGINITRFQTLLALHRSYLTPGDSSSGWTAGAAAYYVGYLQPRTFLLKYNENGTITDAVDCALDPLSETKCTLKSFTVEKGIYQTSNFRVQPTESIVRFPNITNLCPFGEVFNATRFASVYAWDRKRISNCVAYYSVLYNSASFSTFKCYGVSPTKLNDLCFTNVYADSFVIRGDEVRQIAPGQTGKIADYNYKLPDDFTGCVIAWNSNNLDSKVGGNYNYLYRLFRKSNLKPFERDISTEIYQAGSTPCNGVEGFNCYFPLQSYGFQPTNGVGYQPYRVVVLSFELLHAPATVCGPKKSTNLVKNKCVNFNFNGLTGTGVLTESNKKFLPFQQFGRDIADTTDAVRDPQTLEILDITPCSFGGVSVITPGTNTSNQVAVLYQDVNCTEVPVAIHADQLTPTWRVYSTGSNVFQTRAGCLIGAEHVNNSYECDIPIGAGICASYQTQTNSPRRARSVASQSIIAYTMSLGAENSVAYSNNSIAIPTNFTISVTTEILPVSMTKTSVDCTMYICGDSTECSNLLLQYGSFCTQLNRALTGIAVEQDKNTQEVFAQVKQIYKTPPIKDFGGFNFSQILPDPSKPSKRSFIEDLLFNKVTLADAGFIKQYGDCLGDIAARDLICAQKFNGLTVLPPLLTDEMIAQYTSALLAGTITSGWTFGAGAALQIPFAMQMAYRFNGIGVTQNVLYENQKLIANQFNSAIGKIQDSLSSTASALGKLQDVVNQNAQALNTLVKQLSSNFGCISSVLNDILSRLDKVEAEVQIDCLITGRLQSLQTYVTQQLIRAAEIRASANLAATKMSECVLGQSKRVDFCGKGYHLMSFPQSAPHGVVFLHVTYVPAQEKNFTTAPAICHDGKAHFPREGVFVSNGTHWFVTQRNFYEPQIITTDNTFVSGNCDVVIGIVNNTVYDPLQPELDSGGGGSDIDPYKEFGSSYQLLNFLPLDFFPDLNALVDTATALYEEELTGREHCSPHHTAIRQALVCWDELTKLIAWMSSNITSEQVRTIIVNHVNDTWGLKVRQSLWFHLSCLTFGQHTVQEFLVSFGVWIRTPAPYRPPNAPILSTLPEHTVIC

SEQ ID NO: 11469 - protein, 1301 aa, Artificial Sequence
  SARS-CoV-2/France/IDF0372/2020__EPI_ISL_406596 spike protein (1-1147)(A972C_R995C) WhcAg construct
MFVFLVLLPLVSSQCVNLTTRTQLPPAYTNSFTRGVYYPDKVFRSSVLHSTQDLFLPFFSNVTWFHAIHVSGTNGTKRFDNPVLPFNDGVYFASTEKSNIIRGWIFGTTLDSKTQSLLIVNNATNVVIKVCEFQFCNDPFLGVYYHKNNKSWMESEFRVYSSANNCTFEYVSQPFLMDLEGKQGNFKNLREFVFKNIDGYFKIYSKHTPINLVRDLPQGFSALEPLVDLPIGINITRFQTLLALHRSYLTPGDSSSGWTAGAAAYYVGYLQPRTFLLKYNENGTITDAVDCALDPLSETKCTLKSFTVEKGIYQTSNFRVQPTESIVRFPNITNLCPFGEVFNATRFASVYAWNRKRISNCVADYSFLYNSASFSTFKCYGVSPTKLNDLCFTNVYADSFVIRGDEVRQIAPGQTGKIADYNYKLPDDFTGCVIAWNSNNLDSKVGGNYNYLYRLFRKSNLKPFERDISTEIYQAGSTPCNGVEGFNCYFPLQSYGFQPTNGVGYQPYRVVVLSFELLHAPATVCGPKKSTNLVKNKCVNFNFNGLTGTGVLTESNKKFLPFQQFGRDIADTTDAVRDPQTLEILDITPCSFGGVSVITPGTNTSNQVAVLYQDVNCTEVPVAIHADQLTPTWRVYSTGSNVFQTRAGCLIGAEHVNNSYECDIPIGAGICASYQTQTNSPRRARSVASQSIIAYTMSLGAENSVAYSNNSIAIPTNFTISVTTEILPVSMTKTSVDCTMYICGDSTECSNLLLQYGSFCTQLNRALTGIAVEQDKNTQEVFAQVKQIYKTPPIKDFGGFNFSQILPDPSKPSKRSFIEDLLFNKVTLADAGFIKQYGDCLGDIAARDLICAQKFNGLTVLPPLLTDEMIAQYTSALLAGTITSGWTFGAGAALQIPFAMQMAYRFNGIGVTQNVLYENQKLIANQFNSAIGKIQDSLSSTASALGKLQDVVNQNAQALNTLVKQLSSNFGCISSVLNDILSRLDKVEAEVQIDCLITGRLQSLQTYVTQQLIRAAEIRASANLAATKMSECVLGQSKRVDFCGKGYHLMSFPQSAPHGVVFLHVTYVPAQEKNFTTAPAICHDGKAHFPREGVFVSNGTHWFVTQRNFYEPQIITTDNTFVSGNCDVVIGIVNNTVYDPLQPELDSGGGGSDIDPYKEFGSSYQLLNFLPLDFFPDLNALVDTATALYEEELTGREHCSPHHTAIRQALVCWDELTKLIAWMSSNITSEQVRTIIVNHVNDTWGLKVRQSLWFHLSCLTFGQHTVQEFLVSFGVWIRTPAPYRPPNAPILSTLPEHTVIC

SEQ ID NO: 11470 - protein, 1301 aa, Artificial Sequence
  SARS-CoV-2/Australia/VIC01/2020__EPI_ISL_406844 spike protein (1-1147)(A972C_R995C) WhcAg construct
MFVFLVLLPLVSSQCVNLTTRTQLPPAYTNSFTRGVYYPDKVFRSSVLHSTQDLFLPFFSNVTWFHAIHVSGTNGTKRFDNPVLPFNDGVYFASTEKSNIIRGWIFGTTLDSKTQSLLIVNNATNVVIKVCEFQFCNDPFLGVYYHKNNKSWMESEFRVYSSANNCTFEYVSQPFLMDLEGKQGNFKNLREFVFKNIDGYFKIYSKHTPINLVRDLPQGFSALEPLVDLPIGINITRFQTLLALHRRYLTPGDSSSGWTAGAAAYYVGYLQPRTFLLKYNENGTITDAVDCALDPLSETKCTLKSFTVEKGIYQTSNFRVQPTESIVRFPNITNLCPFGEVFNATRFASVYAWNRKRISNCVADYSVLYNSASFSTFKCYGVSPTKLNDLCFTNVYADSFVIRGDEVRQIAPGQTGKIADYNYKLPDDFTGCVIAWNSNNLDSKVGGNYNYLYRLFRKSNLKPFERDISTEIYQAGSTPCNGVEGFNCYFPLQSYGFQPTNGVGYQPYRVVVLSFELLHAPATVCGPKKSTNLVKNKCVNFNFNGLTGTGVLTESNKKFLPFQQFGRDIADTTDAVRDPQTLEILDITPCSFGGVSVITPGTNTSNQVAVLYQDVNCTEVPVAIHADQLTPTWRVYSTGSNVFQTRAGCLIGAEHVNNSYECDIPIGAGICASYQTQTNSPRRARSVASQSIIAYTMSLGAENSVAYSNNSIAIPTNFTISVTTEILPVSMTKTSVDCTMYICGDSTECSNLLLQYGSFCTQLNRALTGIAVEQDKNTQEVFAQVKQIYKTPPIKDFGGFNFSQILPDPSKPSKRSFIEDLLFNKVTLADAGFIKQYGDCLGDIAARDLICAQKFNGLTVLPPLLTDEMIAQYTSALLAGTITSGWTFGAGAALQIPFAMQMAYRFNGIGVTQNVLYENQKLIANQFNSAIGKIQDSLSSTASALGKLQDVVNQNAQALNTLVKQLSSNFGCISSVLNDILSRLDKVEAEVQIDCLITGRLQSLQTYVTQQLIRAAEIRASANLAATKMSECVLGQSKRVDFCGKGYHLMSFPQSAPHGVVFLHVTYVPAQEKNFTTAPAICHDGKAHFPREGVFVSNGTHWFVTQRNFYEPQIITTDNTFVSGNCDVVIGIVNNTVYDPLQPELDSGGGGSDIDPYKEFGSSYQLLNFLPLDFFPDLNALVDTATALYEEELTGREHCSPHHTAIRQALVCWDELTKLIAWMSSNITSEQVRTIIVNHVNDTWGLKVRQSLWFHLSCLTFGQHTVQEFLVSFGVWIRTPAPYRPPNAPILSTLPEHTVIC

SEQ ID NO: 11471 - protein, 1301 aa, Artificial Sequence
  SARS-CoV-2/Germany/BavPat1/2020__EPI_ISL_406862 spike protein (1-1147)(A972C_R995C) WhcAg construct
MFVFLVLLPLVSSQCVNLTTRTQLPPAYTNSFTRGVYYPDKVFRSSVLHSTQDLFLPFFSNVTWFHAIHVSGTNGTKRFDNPVLPFNDGVYFASTEKSNIIRGWIFGTTLDSKTQSLLIVNNATNVVIKVCEFQFCNDPFLGVYYHKNNKSWMESEFRVYSSANNCTFEYVSQPFLMDLEGKQGNFKNLREFVFKNIDGYFKIYSKHTPINLVRDLPQGFSALEPLVDLPIGINITRFQTLLALHRSYLTPGDSSSGWTAGAAAYYVGYLQPRTFLLKYNENGTITDAVDCALDPLSETKCTLKSFTVEKGIYQTSNFRVQPTESIVRFPNITNLCPFGEVFNATRFASVYAWNRKRISNCVADYSVLYNSASFSTFKCYGVSPTKLNDLCFTNVYADSFVIRGDEVRQIAPGQTGKIADYNYKLPDDFTGCVIAWNSNNLDSKVGGNYNYLYRLFRKSNLKPFERDISTEIYQAGSTPCNGVEGFNCYFPLQSYGFQPTNGVGYQPYRVVVLSFELLHAPATVCGPKKSTNLVKNKCVNFNFNGLTGTGVLTESNKKFLPFQQFGRDIADTTDAVRDPQTLEILDITPCSFGGVSVITPGTNTSNQVAVLYQGVNCTEVPVAIHADQLTPTWRVYSTGSNVFQTRAGCLIGAEHVNNSYECDIPIGAGICASYQTQTNSPRRARSVASQSIIAYTMSLGAENSVAYSNNSIAIPTNFTISVTTEILPVSMTKTSVDCTMYICGDSTECSNLLLQYGSFCTQLNRALTGIAVEQDKNTQEVFAQVKQIYKTPPIKDFGGFNFSQILPDPSKPSKRSFIEDLLFNKVTLADAGFIKQYGDCLGDIAARDLICAQKFNGLTVLPPLLTDEMIAQYTSALLAGTITSGWTFGAGAALQIPFAMQMAYRFNGIGVTQNVLYENQKLIANQFNSAIGKIQDSLSSTASALGKLQDVVNQNAQALNTLVKQLSSNFGCISSVLNDILSRLDKVEAEVQIDCLITGRLQSLQTYVTQQLIRAAEIRASANLAATKMSECVLGQSKRVDFCGKGYHLMSFPQSAPHGVVFLHVTYVPAQEKNFTTAPAICHDGKAHFPREGVFVSNGTHWFVTQRNFYEPQIITTDNTFVSGNCDVVIGIVNNTVYDPLQPELDSGGGGSDIDPYKEFGSSYQLLNFLPLDFFPDLNALVDTATALYEEELTGREHCSPHHTAIRQALVCWDELTKLIAWMSSNITSEQVRTIIVNHVNDTWGLKVRQSLWFHLSCLTFGQHTVQEFLVSFGVWIRTPAPYRPPNAPILSTLPEHTVIC

SEQ ID NO: 11472 - protein, 1301 aa, Artificial Sequence
  SARS-CoV-2/Wuhan/HBCDC-HB-02/2020__EPI_ISL_412978 spike protein (1-1147)(A972C_R995C) WhcAg construct
MFVFLVLLPLVSSQCVNLTTRTQLPPAYTNSFTRGVYYPDKVFRSSVLHSTQDLFLPFFSNVTWFHAIHVSGTNGTKRFDNPVLPFNDGVYFASTEKSNIIRGWIFGTTLDSKTQSLLIVNNATNVVIKVCEFQFCNDPFLGVYYHKNNKSWMESEFRVYSSANNCTFEYVSQPFLMDLEGKQGNFKNLREFVFKNIDGYFKIYSKHTPINLVRDLPQGFSALEPLVDLPIGINITRFQTLLALHRSYLTPGDSSSGWTAGAAAYYVGYLQPRTFLLKYNENGTITDAVDCALDPLSETKCTLKSFTVEKGIYQTSNFRVQPTESIVRFPNITNLCPFGEVFNATRFASVYAWNRKRISNCVADYSVLYNSASFSTFKCYGVSPTKLNDLCFTNVYADSFVIRGDEVRQIAPGQTGKIADYNYKLPDDFTGCVIAWNSNNLDSKVGGNYNYLYRLFRKSNLKPFERDISTEIYQAGSTPCNGVEGFNCYFPLQSYGFQPTNGVGYQPYRVVVLSFELLHAPATVCGPKKSTNLVKNKCVNFNFNGLTGTGVLTESNKKFLPFQQFGRDIADTTDAVRDPQTLEILDITPCSFGGVSVITPGTNTSNQVAVLYQDVNCTEVPVAIHADQLTPTWRVYSTGSNVFQTRAGCLIGAEHVNNSYECDIPIGAGICASYQTQTNSPRRARSVASQSIIAYTMSLGAENSVAYSNNSIAIPTNFTISVTTEILPVSMTKTSVDCTMYICGDSTECSNFLLQYGSFCTQLNRALTGIAVEQDKNTQEVFAQVKQIYKTPPIKDFGGFNFSQILPDPSKPSKRSFIEDLLFNKVTLADAGFIKQYGDCLGDIAARDLICAQKFNGLTVLPPLLTDEMIAQYTSALLAGTITSGWTFGAGAALQIPFAMQMAYRFNGIGVTQNVLYENQKLIANQFNSAIGKIQDSLSSTASALGKLQDVVNQNAQALNTLVKQLSSNFGCISSVLNDILSRLDKVEAEVQIDCLITGRLQSLQTYVTQQLIRAAEIRASANLAATKMSECVLGQSKRVDFCGKGYHLMSFPQSAPHGVVFLHVTYVPAQEKNFTTAPAICHDGKAHFPREGVFVSNGTHWFVTQRNFYEPQIITTDNTFVSGNCDVVIGIVNNTVYDPLQPELDSGGGGSDIDPYKEFGSSYQLLNFLPLDFFPDLNALVDTATALYEEELTGREHCSPHHTAIRQALVCWDELTKLIAWMSSNITSEQVRTIIVNHVNDTWGLKVRQSLWFHLSCLTFGQHTVQEFLVSFGVWIRTPAPYRPPNAPILSTLPEHTVIC

SEQ ID NO: 11473 - protein, 1301 aa, Artificial Sequence
  SARS-CoV-2/Australia/QLD02/2020__EPI_ISL_407896 spike protein (1-1147)(A972C_R995C) WhcAg construct
MFVFLVLLPLVSSQCVNLTTRTQLPPAYTNSFTRGVYYPDKVFRSSVLHSTQDLFLPFFSNVTWFHAIHVSGTNGTKRFDNPVLPFNDGVYFASTEKSNIIRGWIFGTTLDSKTQSLLIVNNATNVVIKVCEFQFCNDPFLGVYYHKNNKSWMESEFRVYSSANNCTFEYVSQPFLMDLEGKQGNFKNLREFVFKNIDGYFKIYSKHTPINLVRDLPQGFSALEPLVDLPIGINITRFQTLLALHRSYLTPGDSSSGWTAGAAAYYVGYLQPRTFLLKYNENGTITDAVDCALDPLSETKCTLKSFTVEKGIYQTSNFRVQPTESIVRFPNITNLCPFGEVFNATRFASVYAWNRKRISNCVADYSVLYNSASFSTFKCYGVSPTKLNDLCFTNVYADSFVIRGDEVRQIAPGQTGKIADYNYKLPDDFTGCVIAWNSNNLDSKVGGNYNYLYRLFRKSNLKPFERDISTEIYQAGSTPCNGVEGFNCYFPLQSYGFQPTNGVGYQPYRVVVLSFELLHAPATVCGPKKSTNLVKNKCVNFNFNGLTGTGVLTESNKKFLPFQQFGRDIADTTDAVRDPQTLEILDITPCSFGGVSVITPGTNTSNQVAVLYQDVNCTEVPVAIHADQLTPTWRVYSTGSNVFQTRAGCLIGAEHVNNSYECDIPIGAGICASYQTQTNSPRRARSVASQSIIAYTMSLGAENSVAYSNNSIAIPTNFTISVTTEILPVSMTKTSVDCTMYICGDSTECSNLLLQYGSFCTQLNRALTGIAVEQDKNTQEVFAQVKQIYKTPPIKDFGGFNFSQILPDPSKPSKRSFIEDLLFNKVTLADAGFIKQYGDCLGDIAARDLICAQKFNGLTVLPPLLTDEMIAQYTSALLAGTITSGWTFGAGAALQIPFAMQMAYRFNGIGVTQNVLYENQKLIANQFNSAIGKIQDSLSSTASALGKLQDVVNQNAQALNTLVKQLSSNFGCISSVLNDILSRLDKVEAEVQIDCLITGRLQSLQTYVTQQLIRAAEIRASANLAATKMSECVLGQSKRVDFCGKGYHLMSFPQSAPHGVVFLHVTYVPAQEKNFTTAPAICHDGKAHFPREGVFVSNGTHWFVTQRNFYEPQIITTDNTFVSGNCDVVIGIVNNTVYDPLQLELDSGGGGSDIDPYKEFGSSYQLLNFLPLDFFPDLNALVDTATALYEEELTGREHCSPHHTAIRQALVCWDELTKLIAWMSSNITSEQVRTIIVNHVNDTWGLKVRQSLWFHLSCLTFGQHTVQEFLVSFGVWIRTPAPYRPPNAPILSTLPEHTVIC

SEQ ID NO: 11474 - protein, 1301 aa, Artificial Sequence
  SARS-CoV-2/India/1-31/2020__EPI_ISL_413523 spike protein (1-1147)(A972C_R995C) WhcAg construct
MFVFLVLLPLVSSQCVNLTTRTQLPPAYTNSFTRGVYYPDKVFRSSVLHSTQDLFLPFFSNVTWFHAIHVSGTNGTKRFDNPVLPFNDGVYFASTEKSNIIRGWIFGTTLDSKTQSLLIVNNATNVVIKVCEFQFCNDPFLGVYYHKNNKSWMESEFRVYSSANNCTFEYVSQPFLMDLEGKQGNFKNLREFVFKNIDGYFKIYSKHTPINLVRDLPQGFSALEPLVDLPIGINITRFQTLLALHRSYLTPGDSSSGWTAGAAAYYVGYLQPRTFLLKYNENGTITDAVDCALDPLSETKCTLKSFTVEKGIYQTSNFRVQPTESIVRFPNITNLCPFGEVFNATRFASVYAWNRKRISNCVADYSVLYNSASFSTFKCYGVSPTKLNDLCFTNVYADSFVIRGDEVRQIAPGQTGKIADYNYKLPDDFTGCVIAWNSNNLDSKVGGNYNYLYRLFRKSNLKPFERDISTEIYQAGSTPCNGVEGFNCYFPLQSYGFQPTNGVGYQPYRVVVLSFELLHAPATVCGPKKSTNLVKNKCVNFNFNGLTGTGVLTESNKKFLPFQQFGRDIADTTDAVRDPQTLEILDITPCSFGGVSVITPGTNTSNQVAVLYQDVNCTEVPVAIHADQLTPTWRVYSTGSNVFQTRAGCLIGAEHVNNSYECDIPIGAGICASYQTQTNSPRRARSVASQSIIAYTMSLGAENSVAYSNNSIAIPTNFTISVTTEILPVSMTKTSVDCTMYICGDSTECSNLLLQYGSFCTQLNRALTGIAVEQDKNTQEVFAQVKQIYKTPPIKDFGGFNFSQILPDPSKPSKRSFIEDLLFNKVTLADAGFIKQYGDCLGDIAARDLICAQKFNGLTVLPPLLTDEMIAQYTSALLAGTITSGWTFGAGAALQIPFAMQMAYRFNGIGVTQNVLYENQKLIANQFNSVIGKIQDSLSSTASALGKLQDVVNQNAQALNTLVKQLSSNFGCISSVLNDILSRLDKVEAEVQIDCLITGRLQSLQTYVTQQLIRAAEIRASANLAATKMSECVLGQSKRVDFCGKGYHLMSFPQSAPHGVVFLHVTYVPAQEKNFTTAPAICHDGKAHFPREGVFVSNGTHWFVTQRNFYEPQIITTDNTFVSGNCDVVIGIVNNTVYDPLQPELDSGGGGSDIDPYKEFGSSYQLLNFLPLDFFPDLNALVDTATALYEEELTGREHCSPHHTAIRQALVCWDELTKLIAWMSSNITSEQVRTIIVNHVNDTWGLKVRQSLWFHLSCLTFGQHTVQEFLVSFGVWIRTPAPYRPPNAPILSTLPEHTVIC

SEQ ID NO: 11475 - protein, 1301 aa, Artificial Sequence
  SARS-CoV-2/Hong Kong/case42_VM20002493/2020__EPI_ISL_414527 spike protein (1-1147)(F970C_G999C) WhcAg construct
MFVFLVLLPLVSSQCVNLTTRTQLPPAYTNSFTRGVYYPDKVFRSSVLHSTQDLFLPFFSNVTWFHAIHVSGTNGTKRFDNPVLPFNDGVYFASTEKSNIIRGWIFGTTLDSKTQSLLIVNNATNVVIKVCEFQFCNDPFLGVYYHKNNKSWMESEFRVYSSANNCTFEYVSQPFLMDLEGKQGNFKNLREFVFKNIDGYFKIYSKHTPINLVRDLPQGFSALEPLVDLPIGINITRFQTLLALHRSYLTPGDSSSGWTAGAAAYYVGYLQPRTFLLKYNENGTITDAVDCALDPLSETKCTLKSFTVEKGIYQTSNFRVQPTESIVRFPNITNLCPFGEVFNATRFASVYAWNRKRISNCVADYSVLYNSASFSTFKCYGVSPTKLNDLCFTNVYADSFVIRGDEVREIAPGQTGKIADYNYKLPDDFTGCVIAWNSNNLDSKVGGNYNYLYRLFRKSNLKPFERDISTEIYQAGSTPCNGVEGFNCYFPLQSYGFQPTNGVGYQPYRVVVLSFELLHAPATVCGPKKSTNLVKNKCVNFNFNGLTGTGVLTESNKKFLPFQQFGRDIADTTDAVRDPQTLEILDITPCSFGGVSVITPGTNTSNQVAVLYQDVNCTEVPVAIHADQLTPTWRVYSTGSNVFQTRAGCLIGAEHVNNSYECDIPIGAGICASYQTQTNSPRRARSVASQSIIAYTMSLGAENSVAYSNNSIAIPTNFTISVTTEILPVSMTKTSVDCTMYICGDSTECSNLLLQYGSFCTQLNRALTGIAVEQDKNTQEVFAQVKQIYKTPPIKDFGGFNFSQILPDPSKPSKRSFIEDLLFNKVTLADAGFIKQYGDCLGDIAARDLICAQKFNGLTVLPPLLTDEMIAQYTSALLAGTITSGWTFGAGAALQIPFAMQMAYRFNGIGVTQNVLYENQKLIANQFNSAIGKIQDSLSSTASALGKLQDVVNQNAQALNTLVKQLSSNFGCISSVLNDILSRLDKVEAEVQIDCLITGRLQSLQTYVTQQLIRAAEIRASANLAATKMSECVLGQSKRVDFCGKGYHLMSFPQSAPHGVVFLHVTYVPAQEKNFTTAPAICHDGKAHFPREGVFVSNGTHWFVTQRNFYEPQIITTDNTFVSGNCDVVIGIVNNTVYDPLQPELDSGGGGSDIDPYKEFGSSYQLLNFLPLDFFPDLNALVDTATALYEEELTGREHCSPHHTAIRQALVCWDELTKLIAWMSSNITSEQVRTIIVNHVNDTWGLKVRQSLWFHLSCLTFGQHTVQEFLVSFGVWIRTPAPYRPPNAPILSTLPEHTVIC

SEQ ID NO: 11476 - protein, 1301 aa, Artificial Sequence
  SARS-CoV-2/Sweden/01/2020__EPI_ISL_411951 spike protein (1-1147)(A972C_R995C) WhcAg construct
MFVFLVLLPLVSSQCVNLTTRTQLPPAYTNSFTRGVYYPDKVFRSSVLHSTQDLFLPFFSNVTWFHAIHVSGTNGTKRFDNPVLPFNDGVYFASTEKSNIIRGWIFGTTLDSKTQSLLIVNNATNVVIKVCEFQFCNDPFLGVYYHKNNKSWMESEFRVYSSANNCTFEYVSQPFLMDLEGKQGNFKNLREFVFKNIDGYFKIYSKHTPINLVRDLPQGFSALEPLVDLPIGINITRFQTLLALHRSYLTPGDSSSGWTAGAAAYYVGYLQPRTFLLKYNENGTITDAVDCALDPLSETKCTLKSFTVEKGIYQTSNFRVQPTESIVRFPNITNLCPFGEVFNATRFASVYAWNRKRISNCVADYSVLYNSASFSTFKCYGVSPTKLNDLCFTNVYADSFVIRGDEVRQIAPGQTGKIADYNYKLPDDFTGCVIAWNSNNLDSKVGGNYNYLYRLFRKSNLKPFERDISTEIYQAGSTPCNGVEGFNCYFPLQSYGFQPTNGVGYQPYRVVVLSFELLHAPATVCGPKKSTNLVKNKCVNFNFNGLTGTGVLTESNKKFLPFQQFGRDIADTTDAVRDPQTLEILDITPCSFGGVSVITPGTNTSNQVAVLYQDVNCTEVPVAIHADQLTPTWRVYSTGSNVFQTRAGCLIGAEHVNNSYECDIPIGAGICASYQTQTNSPRRARSVASQSIIAYTMSLGAENSVAYSNNSIAIPTNFTISVTTEILPVSMTKTSVDCTMYICGDSTECSNLLLQYGSFCTQLNRALTGIAVEQDKNTQEVFAQVKQIYKTPPIKDCGGFNFSQILPDPSKPSKRSFIEDLLFNKVTLADAGFIKQYGDCLGDIAARDLICAQKFNGLTVLPPLLTDEMIAQYTSALLAGTITSGWTFGAGAALQIPFAMQMAYRFNGIGVTQNVLYENQKLIANQFNSAIGKIQDSLSSTASALGKLQDVVNQNAQALNTLVKQLSSNFGCISSVLNDILSRLDKVEAEVQIDCLITGRLQSLQTYVTQQLIRAAEIRASANLAATKMSECVLGQSKRVDFCGKGYHLMSFPQSAPHGVVFLHVTYVPAQEKNFTTAPAICHDGKAHFPREGVFVSNGTHWFVTQRNFYEPQIITTDNTFVSGNCDVVIGIVNNTVYDPLQPELDSGGGGSDIDPYKEFGSSYQLLNFLPLDFFPDLNALVDTATALYEEELTGREHCSPHHTAIRQALVCWDELTKLIAWMSSNITSEQVRTIIVNHVNDTWGLKVRQSLWFHLSCLTFGQHTVQEFLVSFGVWIRTPAPYRPPNAPILSTLPEHTVIC

SEQ ID NO: 11477 - protein, 1301 aa, Artificial Sequence
  SARS-CoV-2/Hong Kong/case85_VM20002868/2020__EPI_ISL_414519 spike protein (1-1147)(F970C_G999C) WhcAg construct
MFVFLVLLPLVSSQCVNLTTRTQLPPAYTNSFTRGVYYPDKVFRSSVLHSTQDLFLPFFSNVTWFHAIHVSGTNGTKRFDNPVLPFNDGVYFASTEKSNIIRGWIFGTTLDSKTQSLLIVNNATNVVIKVCEFQFCNDPFLGVYYHKNNKSWMESEFRVYSSANNCTFEYVSQPFLMDLEGKQGNFKNLREFVFKNIDGYFKIYSKHTPINLVRDLPQGFSALEPLVDLPIGINITRFQTLLALHRSYLTPGDSSSGWTAGAAAYYVGYLQPRTFLLKYNENGTITDAVDCALDPLSETKCTLKSFTVEKGIYQTSNFRVQPTESIVRFPNITNLCPFGEVFNATRFASVYAWNRKRISNCVADYSVLYNSASFSTFKCYGVSPTKLNDLCFTNVYADSFVIRGDEVRQIAPGQTGKIADYNYKLPDDFTGCVIAWNSNNLDSKVGGNYNYLYRLFRKSNLKPFERDISTEIYQAGSTPCNGVEGFNCYFPLQSYGFQPTNGVGYQPYRVVVLSFELLHAPATVCGPKKSTNLVKNKCVNFNFNGLTGTGVLTESNKKFLPFQQFGRDIADTTDAVRDPQTLEILDITPCSFGGVSVITPGTNTSNQVAVLYQDLNCTEVPVAIHADQLTPTWRVYSTGSNVFQTRAGCLIGAEHVNNSYECDIPIGAGICASYQTQTNSPRRARSVASQSIIAYTMSLGAENSVAYSNNSIAIPTNFTISVTTEILPVSMTKTSVDCTMYICGDSTECSNLLLQYGSFCTQLNRALTGIAVEQDKNTQEVFAQVKQIYKTPPIKDFGGFNFSQILPDPSKPSKRSFIEDLLFNKVTLADAGFIKQYGDCLGDIAARDLICAQKFNGLTVLPPLLTDEMIAQYTSALLAGTITSGWTFGAGAALQIPFAMQMAYRFNGIGVTQNVLYENQKLIANQFNSAIGKIQDSLSSTASALGKLQDVVNQNAQALNTLVKQLSSNFGCISSVLNDILSRLDKVEAEVQIDCLITGRLQSLQTYVTQQLIRAAEIRASANLAATKMSECVLGQSKRVDFCGKGYHLMSFPQSAPHGVVFLHVTYVPAQEKNFTTAPAICHDGKAHFPREGVFVSNGTHWFVTQRNFYEPQIITTDNTFVSGNCDVVIGIVNNTVYDPLQPELDSGGGGSDIDPYKEFGSSYQLLNFLPLDFFPDLNALVDTATALYEEELTGREHCSPHHTAIRQALVCWDELTKLIAWMSSNITSEQVRTIIVNHVNDTWGLKVRQSLWFHLSCLTFGQHTVQEFLVSFGVWIRTPAPYRPPNAPILSTLPEHTVIC

SEQ ID NO: 11478 - protein, 1301 aa, Artificial Sequence
  SARS-CoV-2/Hong Kong/case42_VM20002493/2020__EPI_ISL_414527 spike protein (1-1147)(A972C_R995C) WhcAg construct
MFVFLVLLPLVSSQCVNLTTRTQLPPAYTNSFTRGVYYPDKVFRSSVLHSTQDLFLPFFSNVTWFHAIHVSGTNGTKRFDNPVLPFNDGVYFASTEKSNIIRGWIFGTTLDSKTQSLLIVNNATNVVIKVCEFQFCNDPFLGVYYHKNNKSWMESEFRVYSSANNCTFEYVSQPFLMDLEGKQGNFKNLREFVFKNIDGYFKIYSKHTPINLVRDLPQGFSALEPLVDLPIGINITRFQTLLALHRSYLTPGDSSSGWTAGAAAYYVGYLQPRTFLLKYNENGTITDAVDCALDPLSETKCTLKSFTVEKGIYQTSNFRVQPTESIVRFPNITNLCPFGEVFNATRFASVYAWNRKRISNCVADYSVLYNSASFSTFKCYGVSPTKLNDLCFTNVYADSFVIRGDEVRQIAPGQTGKIADYNYKLPDDFTGCVIAWNSNNLDSKVGGNYNYLYRLFRKSNLKPFERDISTEIYQAGSTPCNGVEGFNCYFPLQSYGFQPTNGVGYQPYRVVVLSFELLHAPATVCGPKKSTNLVKNKCVNFNFNGLTGTGVLTESNKKFLPFQQFGRDIADTTDAVRDPQTLEILDITPCSFGGVSVITPGTNTSNQVAVLYQDVNCTEVPVAIHADQLTPTWRVYSTGSNVFQTRAGCLIGAEHVNNSYECDIPIGAGICASYQTQTNSPRRARSVASQSIIAYTMSLGAENSVAYSNNSIAIPTNFAISVTTEILPVSMTKTSVDCTMYICGDSTECSNLLLQYGSFCTQLNRALTGIAVEQDKNTQEVFAQVKQIYKTPPIKDFGGFNFSQILPDPSKPSKRSFIEDLLFNKVTLADAGFIKQYGDCLGDIAARDLICAQKFNGLTVLPPLLTDEMIAQYTSALLAGTITSGWTFGAGAALQIPFAMQMAYRFNGIGVTQNVLYENQKLIANQFNSAIGKIQDSLSSTASALGKLQDVVNQNAQALNTLVKQLSSNFGCISSVLNDILSRLDKVEAEVQIDCLITGRLQSLQTYVTQQLIRAAEIRASANLAATKMSECVLGQSKRVDFCGKGYHLMSFPQSAPHGVVFLHVTYVPAQEKNFTTAPAICHDGKAHFPREGVFVSNGTHWFVTQRNFYEPQIITTDNTFVSGNCDVVIGIVNNTVYDPLQPELDSGGGGSDIDPYKEFGSSYQLLNFLPLDFFPDLNALVDTATALYEEELTGREHCSPHHTAIRQALVCWDELTKLIAWMSSNITSEQVRTIIVNHVNDTWGLKVRQSLWFHLSCLTFGQHTVQEFLVSFGVWIRTPAPYRPPNAPILSTLPEHTVIC

SEQ ID NO: 11479 - protein, 1301 aa, Artificial Sequence
  SARS-CoV-2/Australia/NSW09/2020__EPI_ISL_413595 spike protein (1-1147)(F970C_G999C) WhcAg construct
MFVFLVLLPLVSSQCVNLTTRTQLPPAYTNSFTRGVYYPDKVFRSSVLHSTQDLFLPFFSNVTWFHAIHVSGTNGTKRFDNPVLPFNDGVYFASTEKSNIIRGWIFGTTLDSKTQSLLIVNNATNVVIKVCEFQFCNDPFLGVYYHKNNKSWMESEFRVYSSANNCTFEYVSQPFLMDLEVKQGNFKNLREFVFKNIDGYFKIYSKHTPINLVRDLPQGFSALEPLVDLPIGINITRFQTLLALHRSYLTPGDSSSGWTAGAAAYYVGYLQPRTFLLKYNENGTITDAVDCALDPLSETKCTLKSFTVEKGIYQTSNFRVQPTESIVRFPNITNLCPFGEVFNATRFASVYAWNRKRISNCVADYSVLYNSASFSTFKCYGVSPTKLNDLCFTNVYADSFVIRGDEVRQIAPGQTGKIADYNYKLPDDFTGCVIAWNSNNLDSKVGGNYNYLYRLFRKSNLKPFERDISTEIYQAGSTPCNGVEGFNCYFPLQSYGFQPTNGVGYQPYRVVVLSFELLHAPATVCGPKKSTNLVKNKCVNFNFNGLTGTGVLTESNKKFLPFQQFGRDIADTTDAVRDPQTLEILDITPCSFGGVSVITPGTNTSNQVAVLYQDVNCTEVPVAIHADQLTPTWRVYSTGSNVFQTRAGCLIGAEHVNNSYECDIPIGAGICASYQTQTNSPRRARSVASQSIIAYTMSLGAENSVAYSNNSIAIPTNFTISVTTEILPVSMTKTSVDCTMYICGDSTECSNLLLQYGSFCTQLNRALTGIAVEQDKNTQEVFAQVKQIYKTPPIKDFGGFNFSQILPDPSKPSKRSFIEDLLFNKVTLADAGFIKQYGDCLGDIAARDLICAQKFNGLTVLPPLLTDEMIAQYTSALLAGTITSGWTFGAGAALQIPFAMQMAYRFNGIGVTQNVLYENQKLIANQFNSAIGKIQDSLSSTASALGKLQDVVNQNAQALNTLVKQLSSNFGCISSVLNDILSRLDKVEAEVQIDCLITGRLQSLQTYVTQQLIRAAEIRASANLAATKMSECVLGQSKRVDFCGKGYHLMSFPQSAPHGVVFLHVTYVPAQEKNFTTAPAICHDGKAHFPREGVFVSNGTHWFVTQRNFYEPQIITTDNTFVSGNCDVVIGIVNNTVYDPLQPELDSGGGGSDIDPYKEFGSSYQLLNFLPLDFFPDLNALVDTATALYEEELTGREHCSPHHTAIRQALVCWDELTKLIAWMSSNITSEQVRTIIVNHVNDTWGLKVRQSLWFHLSCLTFGQHTVQEFLVSFGVWIRTPAPYRPPNAPILSTLPEHTVIC

SEQ ID NO: 11480 - protein, 1301 aa, Artificial Sequence
  SARS-CoV-2/Hong Kong/case85_VM20002868/2020__EPI_ISL_414519 spike protein (1-1147)(A972C_R995C) WhcAg construct
MFVFLVLVPLVSSQCVNLTTRTQLPPAYTNSFTRGVYYPDKVFRSSVLHSTQDLFLPFFSNVTWFHAIHVSGTNGTKRFDNPVLPFNDGVYFASTEKSNIIRGWIFGTTLDSKTQSLLIVNNATNVVIKVCEFQFCNDPFLGVYYHKNNKSWMESEFRVYSSANNCTFEYVSQPFLMDLEGKQGNFKNLREFVFKNIDGYFKIYSKHTPINLVRDLPQGFSALEPLVDLPIGINITRFQTLLALHRSYLTPGDSSSGWTAGAAAYYVGYLQPRTFLLKYNENGTITDAVDCALDPLSETKCTLKSFTVEKGIYQTSNFRVQPTESIVRFPNITNLCPFGEVFNATRFASVYAWNRKRISNCVADYSVLYNSASFSTFKCYGVSPTKLNDLCFTNVYADSFVIRGDEVRQIAPGQTGKIADYNYKLPDDFTGCVIAWNSNNLDSKVGGNYNYLYRLFRKSNLKPFERDISTEIYQAGSTPCNGVEGFNCYFPLQSYGFQPTNGVGYQPYRVVVLSFELLHAPATVCGPKKSTNLVKNKCVNFNFNGLTGTGVLTESNKKFLPFQQFGRDIADTTDAVRDPQTLEILDITPCSFGGVSVITPGTNTSNQVAVLYQDVNCTEVPVAIHADQLTPTWRVYSTGSNVFQTRAGCLIGAEHVNNSYECDIPIGAGICASYQTQTNSPRRARSVASQSIIAYTMSLGAENSVAYSNNSIAIPTNFTISVTTEILPVSMTKTSVDCTMYICGDSTECSNLLLQYGSFCTQLNRALTGIAVEQDKNTQEVFAQVKQIYKTPPIKDFGGFNFSQILPDPSKPSKRSFIEDLLFNKVTLADAGFIKQYGDCLGDIAARDLICAQKFNGLTVLPPLLTDEMIAQYTSALLAGTITSGWTFGAGAALQIPFAMQMAYRFNGIGVTQNVLYENQKLIANQFNSAIGKIQDSLSSTASALGKLQDVVNQNAQALNTLVKQLSSNFGCISSVLNDILSRLDKVEAEVQIDCLITGRLQSLQTYVTQQLIRAAEIRASANLAATKMSECVLGQSKRVDFCGKGYHLMSFPQSAPHGVVFLHVTYVPAQEKNFTTAPAICHDGKAHFPREGVFVSNGTHWFVTQRNFYEPQIITTDNTFVSGNCDVVIGIVNNTVYDPLQPELDSGGGGSDIDPYKEFGSSYQLLNFLPLDFFPDLNALVDTATALYEEELTGREHCSPHHTAIRQALVCWDELTKLIAWMSSNITSEQVRTIIVNHVNDTWGLKVRQSLWFHLSCLTFGQHTVQEFLVSFGVWIRTPAPYRPPNAPILSTLPEHTVIC

SEQ ID NO: 11481 - protein, 1301 aa, Artificial Sequence; identical to SEQ ID NO: 11471
  SARS-CoV-2/England/200990660/2020__EPI_ISL_414523 spike protein (1-1147)(A972C_R995C) WhcAg construct

SEQ ID NO: 11482 - protein, 1301 aa, Artificial Sequence
  SARS-CoV-2/Belgium/BA-02291/2020__EPI_ISL_415159 spike protein (1-1147)(F970C_G999C) WhcAg construct
MFVFLVLLPLVSSQCVNLTTRTQLPPAYTNSFTRGVYYPDKVFRSSVLHSTQDLFLPFFSNVTWFHAIHVSGTNGTKRFDNPVLPFNDGVYFASTEKSNIIRGWIFGTTLDSKTQSLLIVNNATNVVIKVCEFQFCNDPFLGVYYHKNNKSWMESEFRVYSSANNCTFEYVSQPFLMDLEGKQGNFKNLREFVFKNIDGYFKIYSKHTPINLVRDLPQGFSALEPLVDLPIGINITRFQTLLALHRSYLTPGDSSSGWTAGAAAYYVGYLQPRTFLLKYNENGTITDAVDCALDPLSETKCTLKSFTVEKGIYQTSNFRVQPTESIVRFPNITNLCPFGEVFNATRFASVYAWNRKRISNCVADYSVLYNSASFSTFKCYGVSPTKLNDLCFTNVYADSFVIRGDEVRQIAPGQTGKIADYNYKLPDDFTGCVIAWNSNNLDSKVGGNYNYLYRLFRKSNLKPFERDISTEIYQAGSTPCNGVEGFNCYFPLQSYGFQPTNGVGYQPYRVVVLSFELLHAPATVCGPKKSTNLVKNKCVNFNFNGLTGTGVLTESNKKFLPFQQFGRDIADTTDAVRDPQTLEILDITPCSFGGVSVITPGTNTSNQVAVLYQDVNCTEVPVAIHADQLTPTWRVYSTGSNVFQTRAGCLIGAEHVNNSYECDIPIGAGICASYQTQTNSPRRARSVASQSIIAYTMSLGAENSVAYSNNSIAIPTNFTISVTTEILPVSMTKTSVDCTMYICGDSTECSNLLLQYGSFCTQLNRALTGIAVEQDKNTQEVFAQVKQIYKTPPIKDFGGFNFSQILPDPSKPSKRSFIEDLLFNKVTLADAGFIKQYGDCLGDIAARDLICAQKFNGLTVLPPLLTDEMIAQYTSALLAGTITSGWTFGAGAALQIPFAMQMAYRFNGIGVTQNVLYENQKLIANQFNSAIGKIQDSLSFTASALGKLQDVVNQNAQALNTLVKQLSSNFGCISSVLNDILSRLDKVEAEVQIDCLITGRLQSLQTYVTQQLIRAAEIRASANLAATKMSECVLGQSKRVDFCGKGYHLMSFPQSAPHGVVFLHVTYVPAQEKNFTTAPAICHDGKAHFPREGVFVSNGTHWFVTQRNFYEPQIITTDNTFVSGNCDVVIGIVNNTVYDPLQPELDSGGGGSDIDPYKEFGSSYQLLNFLPLDFFPDLNALVDTATALYEEELTGREHCSPHHTAIRQALVCWDELTKLIAWMSSNITSEQVRTIIVNHVNDTWGLKVRQSLWFHLSCLTFGQHTVQEFLVSFGVWIRTPAPYRPPNAPILSTLPEHTVIC

SEQ ID NO: 11483 - protein, 1301 aa, Artificial Sequence; identical to SEQ ID NO: 11463
  SARS-CoV-2/USA/WA8-UW5/2020__EPI_ISL_413486 spike protein (1-1147)(F970C_G999C) WhcAg construct

SEQ ID NO: 11484 - protein, 1301 aa, Artificial Sequence
  SARS-CoV-2/Switzerland/1000477797/2020__EPI_ISL_413023 spike protein (1-1147)(A972C_R995C) WhcAg construct
MFVFLVLLPLVSSQCVNLTTRTQLPPAYTNSFTRGVYYPDKVFRSSVLHSTQDLFLPFFSNVTWFHAIHVSGTNGTKRFDNPVLPFNDGVYFASTEKSNIIRGWIFGTTLDSKTQSLLIVNNATNVVIKVCEFQFCNDPFLGVYYHKNNKSWMESEFRVYSSANNCTFEYVSQPFLMDLEGKQGNFKNLREFVFKNIDGYFNIYSKHTPINLVRDLPQGFSALEPLVDLPIGINITRFQTLLALHRSYLTPGDSSSGWTAGAAAYYVGYLQPRTFLLKYNENGTITDAVDCALDPLSETKCTLKSFTVEKGIYQTSNFRVQPTESIVRFPNITNLCPFGEVFNATRFASVYAWNRKRISNCVADYSVLYNSASFSTFKCYGVSPTKLNDLCFTNVYADSFVIRGDEVRQIAPGQTGKIADYNYKLPDDFTGCVIAWNSNNLDSKVGGNYNYLYRLFRKSNLKPFERDISTEIYQAGSTPCNGVEGFNCYFPLQSYGFQPTNGVGYQPYRVVVLSFELLHAPATVCGPKKSTNLVKNKCVNFNFNGLTGTGVLTESNKKFLPFQQFGRDIADTTDAVRDPQTLEILDITPCSFGGVSVITPGTNTSNQVAVLYQGVNCTEVPVAIHADQLTPTWRVYSTGSNVFQTRAGCLIGAEHVNNSYECDIPIGAGICASYQTQTNSPRRARSVASQSIIAYTMSLGAENSVAYSNNSIAIPTNFTISVTTEILPVSMTKTSVDCTMYICGDSTECSNLLLQYGSFCTQLNRALTGIAVEQDKNTQEVFAQVKQIYKTPPIKDFGGFNFSQILPDPSKPSKRSFIEDLLFNKVTLADAGFIKQYGDCLGDIAARDLICAQKFNGLTVLPPLLTDEMIAQYTSALLAGTITSGWTFGAGAALQIPFAMQMAYRFNGIGVTQNVLYENQKLIANQFNSAIGKIQDSLSSTASALGKLQDVVNQNAQALNTLVKQLSSNFGCISSVLNDILSRLDKVEAEVQIDCLITGRLQSLQTYVTQQLIRAAEIRASANLAATKMSECVLGQSKRVDFCGKGYHLMSFPQSAPHGVVFLHVTYVPAQEKNFTTAPAICHDGKAHFPREGVFVSNGTHWFVTQRNFYEPQIITTDNTFVSGNCDVVIGIVNNTVYDPLQPELDSGGGGSDIDPYKEFGSSYQLLNFLPLDFFPDLNALVDTATALYEEELTGREHCSPHHTAIRQALVCWDELTKLIAWMSSNITSEQVRTIIVNHVNDTWGLKVRQSLWFHLSCLTFGQHTVQEFLVSFGVWIRTPAPYRPPNAPILSTLPEHTVIC

SEQ ID NO: 11485 - protein, 1301 aa, Artificial Sequence
  SARS-CoV-2/Belgium/BA-02291/2020__EPI_ISL_415159 spike protein (1-1147)(A972C_R995C) WhcAg construct
MFVFLVLLPLVSSQCVNLTTRTQLPPAYTNSFTRGVYYPDKVFRSSVLHSTQDLFLPFFSNVTWFHAIHVSGTNGTKRFDNPVLPFNDGVYFASTEKSNIIRGWIFGTTLDSKTQSLLIVNNATNVVIKVCEFQFCNDPFLGVYYHKNNKSWMESEFRVYSSANNCTFEYVSQPFLMDLEGKQGNFKNLREFVFKNIDGYFKIYSKHTPINLVRDLPQGFSALEPLVDLPIGINITRFQTLLALHRSYLTPGDSSSGWTAGAAAYYVGYLQPRTFLLKYNENGTITDAVDCALDPLSETKCTLKSFTVEKGIYQTSNFRVQPTESIVRFPNITNLCPFGEVFNATRFASVYAWNRKRISNCVADYSVLYNSASFSTFKCYGVSPTKLNDLCFTNVYADSFVIRGDEVRQIAPGQTGKIADYNYKLPDDFTGCVIAWNSNNLDSKVGGNYNYLYRLFRRSNLKPFERDISTEIYQAGSTPCNGVEGFNCYFPLQSYGFQPTNGVGYQPYRVVVLSFELLPAPATVCGPKKSTNLVKNKCVNFNFNGLTGTGVLTESNKKFLPFQQFGRDIADTTDAVRDPQTLEILDITPCSFGGVSVITPGTNTSNQVAVLYQGVNCTEVPVAIHADQLTPTWRVYSTGSNVFQTRAGCLIGAEHVNNSYECDIPIGAGICASYQTQTNSPRRARSVASQSIIAYTMSLGAENSVAYSNNSIAIPTNFTISVTTEILPVSMTKTSVDCTMYICGDSTECSNLLLQYGSFCTQLNRALTGIAVEQDKNTQEVFAQVKQIYKTPPIKDFGGFNFSQILPDPSKPSKRSFIEDLLFNKVTLADAGFIKQYGDCLGDIAARDLICAQKFNGLTVLPPLLTDEMIAQYTSALLAGTITSGWTFGAGAALQIPFAMQMAYRFNGIGVTQNVLYENQKLIANQFNSAIGKIQDSLSSAAPALGKLQDVVNQNAQALNTLVKQLSSNFGCISSVLNDILSRLDKVEAEVQIDCLITGRLQSLQTYVTQQLIRAAEIRASANLAATKMSECVLGQSKRVDFCGKGYHLMSFPQSAPHGVVFLHVTYVPAQEKNFTTAPAICHDGKAHFPREGVFVSNGTHWFVTQRNFYEPQIITTDNTFVSGNCDVVIGIVNNTVYDPLQPELDSGGGGSDIDPYKEFGSSYQLLNFLPLDFFPDLNALVDTATALYEEELTGREHCSPHHTAIRQALVCWDELTKLIAWMSSNITSEQVRTIIVNHVNDTWGLKVRQSLWFHLSCLTFGQHTVQEFLVSFGVWIRTPAPYRPPNAPILSTLPEHTVIC

SEQ ID NO: 11486 - protein, 1301 aa, Artificial Sequence
  SARS-CoV-2/USA/WA8-UW5/2020__EPI_ISL_413486 spike protein (1-1147)(A972C_R995C) WhcAg construct
MFVFLVLLPLVSSQCVNLTTRTQLPPAYTNSFTRGVYYPDKVFRSSVLHSTQDLFLPFFSNVTWFHAIHVSGTNGTKRFDNPVLPFNDGVYFASTEKSNIIRGWIFGTTLDSKTQSLLIVNNATNVVIKVCEFQFCNDPFLGVYYHKNNKSWMESEFRVYSSANNCTFEYVSQPFLMDLEGKQGNFKNLREFVFKNIDGYFKIYSKHTPINLVRDLPQGFSALEPLVDLPIGINITRFQTLLALHRSYLTPGDSSSGWTAGAAAYYVGYLQPRTFLLKYNENGTITDAVDCALDPLSETKCTLKSFTVEKGIYQTSNFRVQPTESIVRFPNITNLCPFGEVFNATRFASVYAWNRKRISNCVADYSVLYNSASFSTFKCYGVSPTKLNDLCFTNVYADSFVIRGDEVRQIAPGQTGKIADYNYKLPDDFTGCVIAWNSNNLDSKVGGNYNYLYRLFRKSNLKPFERDISTEIYQAGSTPCNGVEGFNCYFPLQSYGFQPTNGVGYQPYRVVVLSFELLHAPATVCGPKKSTNLVKNKCVNFNFNGLTGTGVLTESNKKFLPFQQFGRDIADTTDAVRDPQTLEILDITPCSFGGVSVITPGTNTSNQVAVLYQDVNCTEVPVAIHADQLTPTWRVYSTGSNVFQTRAGCLIGAEYVNNSYECDIPIGAGICASYQTQTNSPRRARSVASQSIIAYTMSLGAENSVAYSNNSIAIPTNFTISVTTEILPVSMTKTSVDCTMYICGDSTECSNLLLQYGSFCTQLNRALTGIAVEQDKNTQEVFAQVKQIYKTPPIKDFGGFNFSQILPDPSKPSKRSFIEDLLFNKVTLADAGFIKQYGDCLGDIAARDLICAQKFNGLTVLPPLLTDEMIAQYTSALLAGTITSGWTFGAGAALQIPFAMQMAYRFNGIGVTQNVLYENQKLIANQFNSAIGKIQDSLSSTASALGKLQDVVNQNAQALNTLVKQLSSNFGCISSVLNDILSRLDKVEAEVQIDCLITGRLQSLQTYVTQQLIRAAEIRASANLAATKMSECVLGQSKRVDFCGKGYHLMSFPQSAPHGVVFLHVTYVPAQEKNFTTAPAICHDGKAHFPREGVFVSNGTHWFVTQRNFYEPQIITTDNTFVSGNCDVVIGIVNNTVYDPLQPELDSGGGGSDIDPYKEFGSSYQLLNFLPLDFFPDLNALVDTATALYEEELTGREHCSPHHTAIRQALVCWDELTKLIAWMSSNITSEQVRTIIVNHVNDTWGLKVRQSLWFHLSCLTFGQHTVQEFLVSFGVWIRTPAPYRPPNAPILSTLPEHTVIC

SEQ ID NO: 11487 - protein, 1301 aa, Artificial Sequence
  SARS-CoV-2/England/20102000506/2020__EPI_ISL_415147 spike protein (1-1147)(A972C_R995C) WhcAg construct
MFVFLVLLPLVSSQCVNLTTRTQLPPAYTNSFTRGVYYPDKVFRSSVLHSTQDLFLPFFSNVTWFHAIHVSGTNGTKRFDNPVLPFNDGVYFASTEKSNIIRGWIFGTTLDSKTQSLLIVNNATNVVIKVCEFQFCNDPFLGVYYHKNNKSWMESEFRVYSSANNCTFEYVSQPFLMDLEGKQGNFKNLREFVFKNIDGYFKIYSKHTPINLVRDLPQGFSALEPLVDLPIGINITRFQTLLALHRSYLTPGDSSSGWTAGAAAYYVGYLQPRTFLLKYNENGTITDAVDCALDPLSETKCTLKSFTVEKGIYQTSNFRVQPTESIVRFPNITNLCPFGEVFNATRFASVYAWNRKRISNCVADYSVLYNSASFSTFKCYGVSPTKLNDLCFTNVYADSFVIRGDEVRQIAPGQTGKIADYNYKLPDDFTGCVIAWNSNNLDSKVGGNYNYLYRLFRKSNLKPFERDISTEIYQAGSTPCNGVEGFNCYFPLQSYGFQPTNGVGYQPYRVVVLSFELLHAPATVCGPKKSTNLVKNKCVNFNFNGLTGTGVLTESNKKFLPFQQFGRDIADTTDAVRDPQTLEILDITPCSFGGVSVITPGTNTSNQVAVLYQGVNCTEVPVAIHADQLTPTWRVYSTGSNVFQTRAGCLIGAEHVNNSYECDIPIGAGICASYQTQTNSPRRARSVASQSIIAYTMSLGAENSVAYSNNSIAIPTNFTISVTTEILPVSMTKTSVDCTMYICGDSTECSNLLLQYGSFCTQLNRALTGIAVEQDKNTQEVFAQVKQIYKTPPIKDFGGFNFSQILPDPSKPSKRSFIEDLLFNKVTLADAGFIKQYGYCLGDIAARDLICAQKFNGLTVLPPLLTDEMIAQYTSALLAGTITSGWTFGAGAALQIPFAMQMAYRFNGIGVTQNVLYENQKLIANQFNSAIGKIQDSLSSTASALGKLQDVVNQNAQALNTLVKQLSSNFGCISSVLNDILSRLDKVEAEVQIDCLITGRLQSLQTYVTQQLIRAAEIRASANLAATKMSECVLGQSKRVDFCGKGYHLMSFPQSAPHGVVFLHVTYVPAQEKNFTTAPAICHDGKAHFPREGVFVSNGTHWFVTQRNFYEPQIITTDNTFVSGNCDVVIGIVNNTVYDPLQPELDSGGGGSDIDPYKEFGSSYQLLNFLPLDFFPDLNALVDTATALYEEELTGREHCSPHHTAIRQALVCWDELTKLIAWMSSNITSEQVRTIIVNHVNDTWGLKVRQSLWFHLSCLTFGQHTVQEFLVSFGVWIRTPAPYRPPNAPILSTLPEHTVIC

SEQ ID NO: 11488 - protein, 1301 aa, Artificial Sequence
  SARS-CoV-2/Belgium/VAG-03013/2020__EPI_ISL_415155 spike protein (1-1147)(A972C_R995C) WhcAg construct
MFVFLVLLPLVSSQCVNLTTRTQLPPAYTNSFTRGVYYPDKVFRSSVLHSTQDLFLPFFSNVTWFHAIHVSGTNGTKRFDNPVLPFNDGVYFASTEKSNIIRGWIFGTTLDSKTQSLLIVNNATNVVIKVCEFQFCNDPFLGVYYHKNNKSWMESEFRVYSSANNCTFEYVSQPFLMDLEGKQGNFKNLREFVFKNIDGYFKIYSKHTPINLVRDLPQGFSALEPLVDLPIGINITRFQTLLALHRSYLTPGDSSSGWTAGAAAYYVGYLQPRTFLLKYNENGTITDAVDCALDPLSETKCTLKSFTVEKGIYQTSNFRVQPTESIVRFPNITNLCPFGEVFNATRFASVYAWNRKRISNCVADYSVLYNSASFSTFKCYGVSPTKLNDLCFTNVYADSFVIRGDEVRQIAPGQTGKIADYNYKLPDDFTGCVIAWNSNNLDSKVGGNYNYLYRLFRKSNLKPFERDISTEIYQAGSTPCNGVEGFNCYFPLQSYGFQPTNGVGYQPYRVVVLSFELLHAPATVCGPKKSTNLVKNKCVNFNFNGLTGTGVLTESNKKFLPFQQFGRDIADTTDAVRDPQTLEILDITPCSFGGVSVITPGTNTSNQVAVLYQGVNCTEVPVAIHADQLTPTWRVYSTGSNVFQTRAGCLIGAEHVNNSYECDIPIGAGICASYQTQTNSPRRARSVASQSIIAYTMSLGAENSVAYSNNSIAIPTNFTISVTTEILPVSMTKTSVDCTMYICGDSTECSNLLLQYGSFCTQLNRALTGIAVEQDKNTQEVFAQVKQIYKTPPIKDFGGFNFSQILPDPSKPSKRSFIEDLLFNKVTLADAGFIKQYGDCLGDIAARDLICAQKFNGLTVLPPLLTDEMIAQYTSALLAGTITSGWTFGAGAALQIPFAMQMAYRFNGIGVTQNVLYENQKLIANQFNSAIGKIQDSLSSTATALGKLQDVVNQNAQALNTLVKQLSSNFGCISSVLNDILSRLDKVEAEVQIDCLITGRLQSLQTYVTQQLIRAAEIRASANLAATKMSECVLGQSKRVDFCGKGYHLMSFPQSAPHGVVFLHVTYVPAQEKNFTTAPAICHDGKAHFPREGVFVSNGTHWFVTQRNFYEPQIITTDNTFVSGNCDVVIGIVNNTVYDPLQPELDSGGGGSDIDPYKEFGSSYQLLNFLPLDFFPDLNALVDTATALYEEELTGREHCSPHHTAIRQALVCWDELTKLIAWMSSNITSEQVRTIIVNHVNDTWGLKVRQSLWFHLSCLTFGQHTVQEFLVSFGVWIRTPAPYRPPNAPILSTLPEHTVIC

SEQ ID NO: 11489 - protein, 1301 aa, Artificial Sequence
  SARS-CoV-2/Belgium/BC-03016/2020__EPI_ISL_415157 spike protein (1-1147)(A972C_R995C) WhcAg construct
MFVFLVLLPLVSSQCVNLTTRTQLPPAYTNSFTRGVYYPDKVFRSSVLHSTQDLFLPFFSNVTWFHAIHVSGTNGTKRFDNPVLPFNDGVYFASTEKSNIIRGWIFGTTLDSKTQSLLIVNNATNVVIKVCEFQFCNDPFLGVYYHKNNKSWMESEFRVYSSANNCTFEYVSQPFLMDLEGKQGNFKNLREFVFKNIDGYFKIYSKHTPINLVRDLPQGFSALEPLVDLPIGINITRFQTLLALHRSYLTPGDSSSGWTAGAAAYYVGYLQPRTFLLKYNENGTITDAVDCALDPLSETKCTLKSFTVEKGIYQTSNFRVQPTESIVRFPNITNLCPFGEVFNATRFASVYAWNRKRISNCVADYSVLYNSASFSTFKCYGVSPTKLNDLCFTNVYADSFVIRGDEVRQIAPGQTGKIADYNYKLPDDFTGCVIAWNSNNLDSKVGGNYNYLYRLFRKSNLKPFERDISTEIYQAGSTPCNGVEGFNCYFPLQSYGFQPTNGVGYQPYRVVVLSFELLHAPATVCGPKKSTNLVKNKCVNFNFNGLTGTGVLTESNKKFLPFQQFGRDIADTTDAVRDPQTLEILDITPCSFGGVSVITPGTNTSNQVAVLYQGVNCTEVPVAIHADQLTPTWRVYSTGSNVFQTRAGCLIGAEHVNNSYECDIPIGAGICASYQTQTNSPRRARSVASQSIIAYTMSLGAENSVAYSNNSIAIPTNFTISVTTEILPVSMTKTSVDCTMYICGDSTECSNLLLQYGSFCTQLNRALTGIAVEQDKNTQEVFAQVKQIYKTPPIKDFGGFNFSQILPDPSKPSKRSFIEDLLFNKVTLADAGFIKQYGDCLGDIAARDLICAQKFNGLTVLPPLLTDEMIAQYTSALLAGTITSGWTFGAGAALQIPFAMQMAYRFNGIGVTQNVLYENQKLIANQFNSAIGKIQDSLSSTAPALGKLQDVVNQNAQALNTLVKQLSSNFGCISSVLNDILSRLDKVEAEVQIDCLITGRLQSLQTYVTQQLIRAAEIRASANLAATKMSECVLGQSKRVDFCGKGYHLMSFPQSAPHGVVFLHVTYVPAQEKNFTTAPAICHDGKAHFPREGVFVSNGTHWFVTQRNFYEPQIITTDNTFVSGNCDVVIGIVNNTVYDPLQPELDSGGGGSDIDPYKEFGSSYQLLNFLPLDFFPDLNALVDTATALYEEELTGREHCSPHHTAIRQALVCWDELTKLIAWMSSNITSEQVRTIIVNHVNDTWGLKVRQSLWFHLSCLTFGQHTVQEFLVSFGVWIRTPAPYRPPNAPILSTLPEHTVIC

SEQ ID NO: 11490 - protein, 1301 aa, Artificial Sequence
  SARS-CoV-2/Germany/BavPat3/2020__EPI_ISL_414521 spike protein (1-1147)(A972C_R995C) WhcAg construct
MFVFLVLLPLVSSQCVNLTTRTQLPPAYTNSFTRGVYYPDKVFRSSVLHSTQDLFLPFFSNVTWFHAIHVSGTNGTKRFDNPVLPFNDGVYFASTEKSNIIRGWIFGTTLDSKTQSLLIVNNATNVVIKVCEFQFCNDPFLGVYYHKNNKSWMESEFRVYSSANNCTFEYVSQPFLMDLEGKQGNFKNLREFVFKNIDGYFKIYSKHTPINLVRDLPQGFSALEPLVDLPIGINITRFQTLLALHRSYLTPGDSSSGWTAGAAAYYVGYLQPRTFLLKYNENGTITDAVDCALDPLSETKCTLKSFTVEKGIYQTSNFRVQPTESIVRFPNITNLCPFGEVFNATRFASVYAWNRKRISNCVADYSVLYNSASFSTFKCYGVSPTKLNDLCFTNVYADSFVIRGDEVRQIAPGQTGKIADYNYKLPDDFTGCVIAWNSNNLDSKVGGNYNYLYRLFRKSNLKPFERDISTEIYQAGSTPCNGVEGFNCYFPLQSYGFQPTNGVGYQPYRVVVLSFELLHAPATVCGPKKSTNLVKNKCVNFNFNGLTGTGVLTESNKKFLPFQQFGRDIADTTDAVRDPQTLEILDITPCSFGGVSVITPGTNTSNQVAVLYQDVNCTEVPVAIHADQLTPTWRVYSTGSNVFQTRAGCLIGAEHVNNSYECDIPIGAGICASYQTQTNSPRRARSVASQSIIAYTMSLGAENSVAYSNNSIAIPTNFTISVTTEILPVSMTKTSVDCTMYICGDSTECSNLLLQYGSFCTQLNRALTGIAVEQDKNTQQVFAQVKQIYKTPPIKDFGGFNFSQILPDPSKPSKRSFIEDLLFNKVTLADAGFIKQYGDCLGDIAARDLICAQKFNGLTVLPPLLTDEMIAQYTSALLAGTITSGWTFGAGAALQIPFAMQMAYRFNGIGVTQNVLYENQKLIANQFNSAIGKIQDSLSSTASALGKLQDVVNQNAQALNTLVKQLSSNFGCISSVLNDILSRLDKVEAEVQIDCLITGRLQSLQTYVTQQLIRAAEIRASANLAATKMSECVLGQSKRVDFCGKGYHLMSFPQSAPHGVVFLHVTYVPAQEKNFTTAPAICHDGKAHFPREGVFVSNGTHWFVTQRNFYEPQIITTDNTFVSGNCDVVIGIVNNTVYDPLQPELDSGGGGSDIDPYKEFGSSYQLLNFLPLDFFPDLNALVDTATALYEEELTGREHCSPHHTAIRQALVCWDELTKLIAWMSSNITSEQVRTIIVNHVNDTWGLKVRQSLWFHLSCLTFGQHTVQEFLVSFGVWIRTPAPYRPPNAPILSTLPEHTVIC

SEQ ID NO: 11491 - protein, 1301 aa, Artificial Sequence
  SARS-CoV-2/France/HF1805/2020__EPI_ISL_414628 spike protein (1-1147)(A972C_R995C) WhcAg construct
MFVFLVLLPLVSSQCVNLTTRTQLPPAYTNSFTRGVYYPDKVFRSSVLHSTQDLFLPFFSNVTWFHAIHVSGTNGTKRFDNPVLPFNDGVYFASTEKSNIIRGWIFGTTLDSKTQSLLIVNNATNVVIKVCEFQFCNDPFLGVYYHKNNKSWMESEFRVYSSANNCTFEYVSQPFLMDLEGKQGNFKNLREFVFKNIDGYFKIYSKHTPINLVRDLPQGFSALEPLVDLPIGINITRFQTLLALHRSYLTPGDSSSGWTAGAAAYYVGYLQPRTFLLKYNENGTITDAVDCALDPLSETKCTLKSFTVEKGIYQTSNFRVQPTESIVRFPNITNLCPFGEVFNATRFASVYAWNRKRISNCVADYSVLYNSASFSTFKCYGVSPTKLNDLCFTNVYADSFVIRGDEVRQIAPGQTGKIADYNYKLPDDFTGCVIAWNSNNLDSKVGGNYNYLYRLFRKSNLKPFERDISTEIYQAGSTPCNGVEGFNCYFPLQSYGFQPTNGVGYQPYRVVVLSFELLHAPATVCGPKKSTNLVKNKCVNFNFNGLTGTGVLTESNKKFLPFQQFGRDIADTTDAVRDPQTLEILDITPCSFGGVSVITPGTNTSNQVAVLYQGVNCTEVPVAIHADQLTPTWRVYSTGSNVFQTRAGCLIGAEHVNNSYECDIPIGAGICASYQTQTNSPRRARSVASQSIIAYTMSLGAENSVAYSNNSIAIPTNFTISVTTEILPVSMTKTSVDCTMYICGDSTECSNLLLQYGSFCTQLNRALTGIAVEQDKNTQEVFAQVKQIYKTPPIKDFGGFNFSQILPDPSKPSKRSFIEDLLFNKVTLADAGFIKQYGDCLGDIAARDLICAQKFNGLTVLPPLLTDEMIAQYTSALLAGTITSGWTFGAGAALQIPFAMQMAYRFNGIGVTQNVLYENQKLIANQFNSAIGKIQDSLSSTASALGKLQDVVNQNAQALNTLVKQLSSNFGCISSVLNDILSRLDKVEAEVQIDCLITGRLQSLQTYVTQQLIRAAEIRASANLAATKMSECVLGQSKRVDFCGKGYHLMSFPQSAPHGVVFLHVTYVPAQEKNFTTAPAICHDGKAHFPREGVFVSNGTHWFVTQRNFYEPQIITTDNTFVSGNCDVVIGVVNNTVYDPLQPELDSGGGGSDIDPYKEFGSSYQLLNFLPLDFFPDLNALVDTATALYEEELTGREHCSPHHTAIRQALVCWDELTKLIAWMSSNITSEQVRTIIVNHVNDTWGLKVRQSLWFHLSCLTFGQHTVQEFLVSFGVWIRTPAPYRPPNAPILSTLPEHTVIC

SEQ ID NO: 11492 - protein, 1301 aa, Artificial Sequence
  SARS-CoV-2/Netherlands/ZuidHolland_9/2020__EPI_ISL_414445 spike protein (1-1147)(A972C_R995C) WhcAg construct
MFVFLVLLPLVSSQCVNLTTRTQLPPAYTNSFTRGVYYPDKVFRSSVLHSTQDLFLPFFSNVTWFHAIHVSGTNGTKRFDNPVLPFNDGVYFASTEKSNIIRGWIFGTTLDSKTQSLLIVNNATNVVIKVCEFQFCNDPFLGVYYHKNNKSWMESEFRVYSSANNCTFEYVSQPFLMDLEGKQGNFKNLREFVFKNIDGYFKIYSKHTPINLVRDLPQGFSALEPLVDLPIGINITRFQTLLALHRSYLTPGDSSSGWTAGAAAYYVGYLQPRTFLLKYNENGTITDAVDCALDPLSETKCTLKSFTVEKGIYQTSNFRVQPTESIVRFPNITNLCPFGEVFNATRFASVYAWNRKRISNCVADYSVLYNSASFSTFKCYGVSPTKLNDLCFTNVYADSFVIRGDEVRQIAPGQTGKIADYNYKLPDDFTGCVIAWNSNNLDSKVGGNYNYLYRLFRKSNLKPFERDISTEIYQAGSTPCNGVEGFNCYFPLQSYGFQPTNGVGYQPYRVVVLSFELLHAPATVCGPKKSTNLVKNKCVNFNFNGLTGTGVLTESNKKFLPFQQFGRDIADTTDAVRDPQTLEILDITPCSFGGVSVITPGTNTSNQVAVLYQGVNCTEVPVAIHADQLTPTWRVYSTGSNVFQTRAGCLIGAEHVNNSYECDIPIGAGICASYQTQTNSPRRARSVASQSIIAYTMSLGAENSVAYSNNSIAIPTNFTISVTTEILPVSMTKTSVDCTMYICGDSTECSNLLLQYGSFCTQLNRALTGIAVEQDKNTQEVFAQVKQIYKTPPIKDFGGFNFSQILPDPSKPSKRSFIEDLLFNKVTLADAGFIKQYGDCLGDIAARDLICVQKFNGLTVLPPLLTDEMIAQYTSALLAGTITSGWTFGAGAALQIPFAMQMAYRFNGIGVTQNVLYENQKLIANQFNSAIGKIQDSLSSTASALGKLQDVVNQNAQALNTLVKQLSSNFGCISSVLNDILSRLDKVEAEVQIDCLITGRLQSLQTYVTQQLIRAAEIRASANLAATKMSECVLGQSKRVDFCGKGYHLMSFPQSAPHGVVFLHVTYVPAQEKNFTTAPAICHDGKAHFPREGVFVSNGTHWFVTQRNFYEPQIITTDNTFVSGNCDVVIGIVNNTVYDPLQPELDSGGGGSDIDPYKEFGSSYQLLNFLPLDFFPDLNALVDTATALYEEELTGREHCSPHHTAIRQALVCWDELTKLIAWMSSNITSEQVRTIIVNHVNDTWGLKVRQSLWFHLSCLTFGQHTVQEFLVSFGVWIRTPAPYRPPNAPILSTLPEHTVIC

SEQ ID NO: 11493 - protein, 1301 aa, Artificial Sequence
  SARS-CoV-2/Finland/FIN03032020A/2020__EPI_ISL_413602 spike protein (1-1147)(A972C_R995C) WhcAg construct
MFVFLVLLPLVSSQCVNLTTRTQLPPAYTNSFTRGVYYPDKVFRSSVLHSTQDLFLPFFSNVTWFHAIHVSGTNGTKRFDNPVLPFNDGVYFASTEKSNIIRGWIFGTTLDSKTQSLLIVNNATNVVIKVCEFQFCNDPFLGVYYHKNNKSWMESEFRVYSSANNCTFEYVSQPFLMDLEGKQGNFKNLREFVFKNIDGYFKIYSKHTPINLVRDLPQGFSALEPLVDLPIGINITRFQTLLALHRSYLTPGDSSSGWTAGAAAYYVGYLQPRTFLLKYNENGTITDAVDCALDPLSETKCTLKSFTVEKGIYQTSNFRVQPTESIVRFPNITNLCPFGEVFNATRFASVYAWNRKRISNCVADYSVLYNSASFSTFKCYGVSPTKLNDLCFTNVYADSFVIRGDEVRQIAPGQTGKIADYNYKLPDDFTGCVISWNSNNLDSKVGGNYNYLYRLFRKSNLKPFERDISTEIYQAGSTPCNGVEGFNCYFPLQSYGFQPTNGVGYQPYRVVVLSFELLHAPATVCGPKKSTNLVKNKCVNFNFNGLTGTGVLTESNKKFLPFQQFGRDIADTTDAVRDPQTLEILDITPCSFGGVSVITPGTNTSNQVAVLYQGVNCTEVPVAIHADQLTPTWRVYSTGSNVFQTRAGCLIGAEHVNNSYECDIPIGAGICASYQTQTNSPRRARSVASQSIIAYTMSLGAENSVAYSNNSIAIPTNFTISVTTEILPVSMTKTSVDCTMYICGDSTECSNLLLQYGSFCTQLNRALTGIAVEQDKNTQEVFAQVKQIYKTPPIKDFGGFNFSQILPDPSKPSKRSFIEDLLFNKVTLADAGFIKQYGDCLGDIAARDLICAQKFNGLTVLPPLLTDEMIAQYTSALLAGTITSGWTFGAGAALQIPFAMQMAYRFNGIGVTQNVLYENQKLIANQFNSAIGKIQDSLSSTASALGKLQDVVNQNAQALNTLVKQLSSNFGCISSVLNDILSRLDKVEAEVQIDCLITGRLQSLQTYVTQQLIRAAEIRASANLAATKMSECVLGQSKRVDFCGKGYHLMSFPQSAPHGVVFLHVTYVPAQEKNFTTAPAICHDGKAHFPREGVFVSNGTHWFVTQRNFYEPQIITTDNTFVSGNCDVVIGIVNNTVYDPLQPELDSGGGGSDIDPYKEFGSSYQLLNFLPLDFFPDLNALVDTATALYEEELTGREHCSPHHTAIRQALVCWDELTKLIAWMSSNITSEQVRTIIVNHVNDTWGLKVRQSLWFHLSCLTFGQHTVQEFLVSFGVWIRTPAPYRPPNAPILSTLPEHTVIC

SEQ ID NO: 11494 - protein, 1301 aa, Artificial Sequence
  SARS-CoV-2/France/GE1977/2020__EPI_ISL_414632 spike protein (1-1147)(A972C_R995C) WhcAg construct
MFVFLVLLPLVSSQCVNLTTRTQLPPAYTNSFTRGVYYPDKVFRSSVLHSTQDLFLPFFSNVTWFHAIHVSGTNGTKRFDNPVLPFNDGVYFASTEKSNIIRGWIFGTTLDSKTQSLLIVNNATNVVIKVCEFQFCNDPFLGVYYHKNNKSWMESEFRVYSSANNCTFEYVSQPFLMDLEGKQGNFKNLREFVFKNIDGYFKIYSKHTPINLVRDLPQGFSALEPLVDLPIGINITRFQTLLALHRSYLTPGDSSSGWTAGAAAYYVGYLQPRTFLLKYNENGTITDAVDCALDPLSETKCTLKSFTVEKGIYQTSNFRVQPTESIVRFPNITNLCPFGEVFNATRFASVYAWNRKRISNCVADYSVLYNSASFSTFKCYGVSPTKLNDLCFTNVYADSFVIRGDEVRQIAPGQTGKIADYNYKLPDDFTGCVIAWNSNNLDSKVGGNYNYLYRLFRKSNLKPFERDISTEIYQAGSTPCNGVEGFNCYFPLQSYGFQPTNGVGYQPYRVVVLSFELLHAPATVCGPKKSTNLVKNKCVNFNFNGLTGTGVLTESNKKFLPFQQFGRDIADTTDAVRDPQTLEILDITPCSFGGVSVITPGTNTSNQVAVLYQGVNCTEVPVAIHADQLTPTWRVYSTGSNVFQTRAGCLIGAEHVNNSYECDIPIGAGICASYQTQTNSPRRARSVASQSIIAYTMSLGAENSVAYSNNSIAIPTNFTISVTTEILPVSMTKTSVDCTMYICGDSTECSNLLLQYGSFCTQLNRALTGIAVEQDKNTQEVFAQVKQIYKTPPIKDFGGFNFSQILPDPSKPSKRSFIEDLLFNKVTLADAGFIKQYGDCLGDIAARDLICAQKFNGLTVLPPLLTDEMIAQYTSALLAGTITSGWTFGAGAALQIPFAMQMAYRFNGIGVTQNVLYENQKLIANQFNSAIGKIQDSLFSTASALGKLQDVVNQNAQALNTLVKQLSSNFGCISSVLNDILSRLDKVEAEVQIDCLITGRLQSLQTYVTQQLIRAAEIRASANLAATKMSECVLGQSKRVDFCGKGYHLMSFPQSAPHGVVFLHVTYVPAQEKNFTTAPAICHDGKAHFPREGVFVSNGTHWFVTQRNFYEPQIITTDNTFVSGNCDVVIGIVNNTVYDPLQPELDSGGGGSDIDPYKEFGSSYQLLNFLPLDFFPDLNALVDTATALYEEELTGREHCSPHHTAIRQALVCWDELTKLIAWMSSNITSEQVRTIIVNHVNDTWGLKVRQSLWFHLSCLTFGQHTVQEFLVSFGVWIRTPAPYRPPNAPILSTLPEHTVIC

SEQ ID NO: 11495 - protein, 1301 aa, Artificial Sequence
  SARS-CoV-2/Finland/FIN-313/2020__EPI_ISL_414641 spike protein (1-1147)(A972C_R995C) WhcAg construct
MFVFLVLLPLVSSQCVNLTTRTQLPPAYTNSFTRGVYYPDKVFRSSVLHSTQDLFLPFFSNVTWFHAIHVSGTNGTKRFDNPVLPFNDGVYFASTEKSNIIRGWIFGTTLDSKTQSLLIVNNATNVVIKVCEFQFCNDPFLGVYYHKNNKSWMESEFRVYSSANNCTFEYVSQPFLMDLEGKQGNFKNLREFVFKNIDGYFKIYSKHTPINLVRDLPQGFSALEPLVDLPIGINITRFKTLLALHRSYLTPGDSSSGWTAGAAAYYVGYLQPRTFLLKYNENGTITDAVDCALDPLSETKCTLKSFTVEKGIYQTSNFRVQPTESIVRFPNITNLCPFGEVFNATRFASVYAWNRKRISNCVADYSVLYNSASFSTFKCYGVSPTKLNDLCFTNVYADSFVIRGDEVRQIAPGQTGKIADYNYKLPDDFTGCVIAWNSNNLDSKVGGNYNYLYRLFRKSNLKPFERDISTEIYQAGSTPCNGVEGFNCYFPLQSYGFQPTNGVGYQPYRVVVLSFELLHAPATVCGPKKSTNLVKNKCVNFNFNGLTGTGVLTESNKKFLPFQQFGRDIADTTDAVRDPQTLEILDITPCSFGGVSVITPGTNTSNQVAVLYQGVNCTEVPVAIHADQLTPTWRVYSTGSNVFQTRAGCLIGAEHVNNSYECDIPIGAGICASYQTQTNSPRRARSVASQSIIAYTMSLGAENSVAYSNNSIAIPTNFTISVTTEILPVSMTKTSVDCTMYICGDSTECSNLLLQYGSFCTQLNRALTGIAVEQDKNTQEVFAQVKQIYKTPPIKDFGGFNFSQILPDPSKPSKRSFIEDLLFNKVTLADAGFIKQYGDCLGDIAARDLICAQKFNGLTVLPPLLTDEMIAQYTSALLAGTITSGWTFGAGAALQIPFAMQMAYRFNGIGVTQNVLYENQKLIANQFNSAIGKIQDSLSSTASALGKLQDVVNQNAQALNTLVKQLSSNFGCISSVLNDILSRLDKVEAEVQIDCLITGRLQSLQTYVTQQLIRAAEIRASANLAATKMSECVLGQSKRVDFCGKGYHLMSFPQSAPHGVVFLHVTYVPAQEKNFTTAPAICHDGKAHFPREGVFVSNGTHWFVTQRNFYEPQIITTDNTFVSGNCDVVIGIVNNTVYDPLQPELDSGGGGSDIDPYKEFGSSYQLLNFLPLDFFPDLNALVDTATALYEEELTGREHCSPHHTAIRQALVCWDELTKLIAWMSSNITSEQVRTIIVNHVNDTWGLKVRQSLWFHLSCLTFGQHTVQEFLVSFGVWIRTPAPYRPPNAPILSTLPEHTVIC

SEQ ID NO: 11496 - protein, 1301 aa, Artificial Sequence
  SARS-CoV-2/Netherlands/ZuidHolland_2/2020__EPI_ISL_414556 spike protein (1-1147)(A972C_R995C) WhcAg construct
MFVFLVLLPLVSSQCVNLTTRTQLPPAYTNSFTRGVYYPDKVFRSSVLHSTQDLFLPFFSNVTWFHAIHVSGTNGTKRFDNPVLPFNDGVYFASTEKSNIIRGWIFGTTLDSKTQSLLIVNNATNVVIKVCEFQFCNDPFLGVYYHKNNKSWMESEFRVYSSANNCTFEYVSQPFLMDLEGKQGNFKNLREFVFKNIDGYFKIYSKHTPINLVRDLPQGFSALEPLVDLPIGINITRFQTLLALHRSYLTPGDSSSGWTAGAAAYYVGYLQPRTFLLKYNENGTITDAVDCALDPLSETKCTLKSFTVEKGIYQTSNFRVQPTESIVRFPNITNLCPFGEVFNATRFASVYAWNRKRISNCVADYSVLYNSASFSTFKCYGVSPTKLNDLCFTNVYADSFVIRGDEVRQIAPGQTGKIADYNYKLPDDFTGCVIAWNSNNLDSKVGGNYNYLYRLFRKSNLKPFERDISTEIYQAGSTPCNGVEGFNCYFPLQSYGFQPTNGVGYQPYRVVVLSFELLHAPATVCGPKKSTNLVKNKCVNFNFNGLTGTGVLTESNKKFLPFQQFGRDIADTTDAVRDPQTLEILDITPCSFGGVSVITPGTNTSNQVAVLYQGVNCTEVPVAIHADQLTPTWRVYSTGSNVFQTRAGCLIGAEHVNNSYECDIPIGAGICASYQTQTNSPRRARSVASQSIIAYTMSLGAENSVAYSNNSIAIPTNFTISVTTEILPVSMTKTSVDCTMYICGDSTECSNLLLQYGSFCTQLNRALTGIALEQDKNTQEVFAQVKQIYKTPPIKDFGGFNFSQILPDPSKPSKRSFIEDLLFNKVTLADAGFIKQYGDCLGDIAARDLICAQKFNGLTVLPPLLTDEMIAQYTSALLAGTITSGWTFGAGAALQIPFAMQMAYRFNGIGVTQNVLYENQKLIANQFNSAIGKIQDSLSSTASALGKLQDVVNQNAQALNTLVKQLSSNFGCISSVLNDILSRLDKVEAEVQIDCLITGRLQSLQTYVTQQLIRAAEIRASANLAATKMSECVLGQSKRVDFCGKGYHLMSFPQSAPHGVVFLHVTYVPAQEKNFTTAPAICHDGKAHFPREGVFVSNGTHWFVTQRNFYEPQIITTDNTFVSGNCDVVIGIVNNTVYDPLQPELDSGGGGSDIDPYKEFGSSYQLLNFLPLDFFPDLNALVDTATALYEEELTGREHCSPHHTAIRQALVCWDELTKLIAWMSSNITSEQVRTIIVNHVNDTWGLKVRQSLWFHLSCLTFGQHTVQEFLVSFGVWIRTPAPYRPPNAPILSTLPEHTVIC

SEQ ID NO: 11497 - protein, 1301 aa, Artificial Sequence
  SARS-CoV-2/USA/WA-UW31/2020__EPI_ISL_414618 spike protein (1-1147)(A972C_R995C) WhcAg construct
MFVFLVLLPLVSSQCVNLTTRTQLPPAYTNSFTRGVYYPDKVFRSSVLHSTQDLFLPFFSNVTWFHAIHVSGTNGTKRFDNPVLPFNDGVYFASTEKSNIIRGWIFGTTLDSKTQSLLIVNNATNVVIKVCEFQFCNDPFLGVYYHKNNKSWMESEFRVYSSANNCTFEYVSQPFLMDLEGKQGNFKNLREFVFKNIDGYFKIYSKHTPINLVRDLPQGFSALEPLVDLPIGINITRFQTLLALHRSYLTPGDSSSGWTAGAAAYYVGYLQPRTFLLKYNENGTITDAVDCALDPLSETKCTLKSFTVEKGIYQTSNFRVQPTESIVRFPNITNLCPFGEVFNATRFASVYAWNRKRISNCVADYSVLYNSASFSTFKCYGVSPTKLNDLCFTNVYADSFVIRGDEVRQIAPGQTGKIADYNYKLPDDFTGCVIAWNSNNLDSKVGGNYNYLYRLFRKSNLKPFERDISTEIYQAGSTPCNGAEGFNCYFPLQSYGFQPTNGVGYQPYRVVVLSFELLHAPATVCGPKKSTNLVKNKCVNFNFNGLTGTGVLTESNKKFLPFQQFGRDIADTTDAVRDPQTLEILDITPCSFGGVSVITPGTNTSNQVAVLYQDVNCTEVPVAIHADQLTPTWRVYSTGSNVFQTRAGCLIGAEHVNNSYECDIPIGAGICASYQTQTNSPRRARSVASQSIIAYTMSLGAENSVAYSNNSIAIPTNFTISVTTEILPVSMTKTSVDCTMYICGDSTECSNLLLQYGSFCTQLNRALTGIAVEQDKNTQEVFAQVKQIYKTPPIKDFGGFNFSQILPDPSKPSKRSFIEDLLFNKVTLADAGFIKQYGDCLGDIAARDLICAQKFNGLTVLPPLLTDEMIAQYTSALLAGTITSGWTFGAGAALQIPFAMQMAYRFNGIGVTQNVLYENQKLIANQFNSAIGKIQDSLSSTASALGKLQDVVNQNAQALNTLVKQLSSNFGCISSVLNDILSRLDKVEAEVQIDCLITGRLQSLQTYVTQQLIRAAEIRASANLAATKMSECVLGQSKRVDFCGKGYHLMSFPQSAPHGVVFLHVTYVPAQEKNFTTAPAICHDGKAHFPREGVFVSNGTHWFVTQRNFYEPQIITTDNTFVSGNCDVVIGIVNNTVYDPLQPELDSGGGGSDIDPYKEFGSSYQLLNFLPLDFFPDLNALVDTATALYEEELTGREHCSPHHTAIRQALVCWDELTKLIAWMSSNITSEQVRTIIVNHVNDTWGLKVRQSLWFHLSCLTFGQHTVQEFLVSFGVWIRTPAPYRPPNAPILSTLPEHTVIC

SEQ ID NO: 11498 - protein, 1301 aa, Artificial Sequence
  SARS-CoV-2/South Korea/SNU01/2020__EPI_ISL_411929 spike protein (1-1147)(A972C_R995C) WhcAg construct
MFVFLVLLPLVSSQCVNLTTRTQLPPAYTNSFTRGVYYPDKVFRSSVLHSTQDLFLPFFSNVTWFHAIHVSGTNGTKRFDNPVLPFNDGVYFASTEKSNIIRGWIFGTTLDSKTQSLLIVNNATNVVIKVCEFQFCNDPFLGVYYHKNNKSWMESEFRVYSSANNCTFEYVSQPFLMDLEGKQGNFKNLREFVFKNIDGYFKIYSKHTPINLVRDLPQGFWALEPLVDLPIGINITRFQTLLALHRSYLTPGDSSSGWTAGAAAYYVGYLQPRTFLLKYNENGTITDAVDCALDPLSETKCTLKSFTVEKGIYQTSNFRVQPTESIVRFPNITNLCPFGEVFNATRFASVYAWNRKRISNCVADYSVLYNSASFSTFKCYGVSPTKLNDLCFTNVYADSFVIRGDEVRQIAPGQTGKIADYNYKLPDDFTGCVIAWNSNNLDSKVGGNYNYLYRLFRKSNLKPFERDISTEIYQAGSTPCNGVEGFNCYFPLQSYGFQPTNGVGYQPYRVVVLSFELLHAPATVCGPKKSTNLVKNKCVNFNFNGLTGTGVLTESNKKFLPFQQFGRDIADTTDAVRDPQTLEILDITPCSFGGVSVITPGTNTSNQVAVLYQDVNCTEVPVAIHADQLTPTWRVYSTGSNVFQTRAGCLIGAEHVNNSYECDIPIGAGICASYQTQTNSPRRARSVASQSIIAYTMSLGAENSVAYSNNSIAIPTNFTISVTTEILPVSMTKTSVDCTMYICGDSTECSNLLLQYGSFCTQLNRALTGIAVEQDKNTQEVFAQVKQIYKTPPIKDFGGFNFSQILPDPSKPSKRSFIEDLLFNKVTLADAGFIKQYGDCLGDIAARDLICAQKFNGLTVLPPLLTDEMIAQYTSALLAGTITSGWTFGAGAALQIPFAMQMAYRFNGIGVTQNVLYENQKLIANQFNSAIGKIQDSLSSTASALGKLQDVVNQNAQALNTLVKQLSSNFGCISSVLNDILSRLDKVEAEVQIDCLITGRLQSLQTYVTQQLIRAAEIRASANLAATKMSECVLGQSKRVDFCGKGYHLMSFPQSAPHGVVFLHVTYVPAQEKNFTTAPAICHDGKAHFPREGVFVSNGTHWFVTQRNFYEPQIITTDNTFVSGNCDVVIGIVNNTVYDPLQPELDSGGGGSDIDPYKEFGSSYQLLNFLPLDFFPDLNALVDTATALYEEELTGREHCSPHHTAIRQALVCWDELTKLIAWMSSNITSEQVRTIIVNHVNDTWGLKVRQSLWFHLSCLTFGQHTVQEFLVSFGVWIRTPAPYRPPNAPILSTLPEHTVIC

SEQ ID NO: 11499 - protein, 1301 aa, Artificial Sequence
  SARS-CoV-2/China/WF0004/2020__EPI_ISL_413694 spike protein (1-1147)(A972C_R995C) WhcAg construct
MFVFLVLLPLVSSQCVNLTTRTQLPPAYTNSFTRGVYYPDKVFRSSVLHSTQDLFLPFFSNVTWFHAIHVSGTNGTKRFDNPVLPFNDGVYFASTEKSNIIRGWIFGTTLDSKTQSLLIVNNATNVVIKVCEFQFCNDPFLGVYYHKNNKSWTESEFRVYSSANNCTFEYVSQPFLMDLEGKQGNFKNLREFVFKNIDGYFKIYSKHTPINLVRDLPQGFSALEPLVDLPIGINITRFQTLLALHRSYLTPGDSSSGWTAGAAAYYVGYLQPRTFLLKYNENGTITDAVDCALDPLSETKCTLKSFTVEKGIYQTSNFRVQPTESIVRFPNITNLCPFGEVFNATRFASVYAWNRKRISNCVADYSVLYNSASFSTFKCYGVSPTKLNDLCFTNVYADSFVIRGDEVRQIAPGQTGKIADYNYKLPDDFTGCVIAWNSNNLDSKVGGNYNYLYRLFRKSNLKPFERDISTEIYQAGSTPCNGVEGFNCYFPLQSYGFQPTNGVGYQPYRVVVLSFELLHAPATVCGPKKSTNLVKNKCVNFNFNGLTGTGVLTESNKKFLPFQQFGRDIADTTDAVRDPQTLEILDITPCSFGGVSVITPGTNTSNQVAVLYQDVNCTEVPVAIHADQLTPTWRVYSTGSNVFQTRAGCLIGAEHVNNSYECDIPIGAGICASYQTQTNSPRRARSVASQSIIAYTMSLGAENSVAYSNNSIAIPTNFTISVTTEILPVSMTKTSVDCTMYICGDSTECSNLLLQYGSFCTQLNRALTGIAVEQDKNTQEVFAQVKQIYKTPPIKDFGGFNFSQILPDPSKPSKRSFIEDLLFNKVTLADAGFIKQYGDCLGDIAARDLICAQKFNGLTVLPPLLTDEMIAQYTSALLAGTITSGWTFGAGAALQIPFAMQMAYRFNGIGVTQNVLYENQKLIANQFNSAIGKIQDSLSSTASALGKLQDVVNQNAQALNTLVKQLSSNFGCISSVLNDILSRLDKVEAEVQIDCLITGRLQSLQTYVTQQLIRAAEIRASANLAATKMSECVLGQSKRFDFCGKGYHLMSFPQSAPHGVVFLHVTYVPAQEKNFTTAPAICHDGKAHFPREGVFVSNGTHWFVTQRNFYEPQIITTDNTFVSGNCDVVIGIVNNTVYDPLQPELDSGGGGSDIDPYKEFGSSYQLLNFLPLDFFPDLNALVDTATALYEEELTGREHCSPHHTAIRQALVCWDELTKLIAWMSSNITSEQVRTIIVNHVNDTWGLKVRQSLWFHLSCLTFGQHTVQEFLVSFGVWIRTPAPYRPPNAPILSTLPEHTVIC

SEQ ID NO: 11500 - protein, 1301 aa, Artificial Sequence
  SARS-CoV-2/China/WF0028/2020__EPI_ISL_413791 spike protein (1-1147)(A972C_R995C) WhcAg construct
MFVFLVLLPLVSSQCVNLTTRTQLPPAYTNSFTRGVYYPDKVFRSSVLHSTQDLFLPFFSNVTWFHAIHVSGTNGTKRFDNPVLPFNDGVYFASTEKSNIIRGWIFGTTLDSKTQSLLIVNNATNVVIKVCEFQFCNDPFLGVYYHKNNKSWMESEFRVYSSANNCTFEYVSQPFLMDLEGKQGNFKNLREFVFKNIDGYFKIYSKHTPINLVRDLPQGFSALEPLVDLPIGINITRFQTLLALHRSYLTPGDSSSGWTAGAAAYYVGYLQPRTFLLKYNENGTITDAVDCALDPLSETKCTLKSFTVEKGIYQTSNFRVQPTESIVRFPNITNLCPFGEVFNATRFASVYAWNRKRISNCVADYSVLYNSASFSTFKCYGVSPTKLNDLCFTNVYADSFVIRGDEVRQIAPGQTGKIADYNYKLPDDFTGCVIAWNSNNLDSKVGGNYNYLYRLFRKSNLKPFERDISTEIYQAGSTPCNGVEGFNCYFPLQSYGFQPTNGVGYQPYRVVVLSFELLHAPATVCGPKKSTNLVKNKCVNFNFNGLTGTGVLTESNKKFLPFQQFGRDIADTTDAVRDPQTLEILDITPCSFGGVSVITPGTNTSNQVAVLYQDVNCTEVPVAIHADQLTPTWRVYSTGSNVFQTRAGCLIGAEHVNNSYECDIPIGAGICASYQTQTNSPRRARSVASQSIIAYTMSLGAENSVAYSNNSIAIPTNFTISVTTEILPVSMTKTSVDCTMYICGDSTECSNLLLQYGSFCTQLNRALTGIAVEQDKNTQEVFAQVKQIYKTPPIKDFGGFNFSQILPDPSKPSKRSFIEDLLFNKVTLADAGFIKQYGDCLGDIAARDLICAQKFNGLTVLPPLLTDEMIAQYTSALLAGTITSGWTFGAGAALQIPFAMQMAYRFNGIGVTQNVLYENQKLIANQFNSAIGKIQDSLSSTASALGKLQDVVNQNAQALNTLVKQLSSNFGCISSVLNDILSRLDKVEAEVQIDCLITGRLQSLQTYVTQQLIRAAEIRASANLAATKMSECVLGQSKRVDFCGKGYHLMSFPQSAPHGVVFLHVTYVPAQEKNFTTAPAICHDGKAHFPREGVFVSNGTHWFVTQRNFYEPQIITTDNTFVSGNCDVVIGIVNNTVYDPLQPELESGGGGSDIDPYKEFGSSYQLLNFLPLDFFPDLNALVDTATALYEEELTGREHCSPHHTAIRQALVCWDELTKLIAWMSSNITSEQVRTIIVNHVNDTWGLKVRQSLWFHLSCLTFGQHTVQEFLVSFGVWIRTPAPYRPPNAPILSTLPEHTVIC

SEQ ID NO: 11501 - protein, 1301 aa, Artificial Sequence
  SARS-CoV-2/2019-nCoV/USA-CruiseA-18/2020__MT159716.1 spike protein (1-1147)(A972C_R995C) WhcAg construct
MFVFLVLLPLVSSQCVNLTTRTQLPPAYTNSFTRGVYYPDKVFRSSVLHSTQDLFLPFFSNVTWFHAIHVSGTNGTKRFDNPVLPFNDGVYFASTEKSNIIRGWIFGTTLDSKTQSLLIVNNATNVVIKVCEFQFCNDPFLGVYYHKNNKSWMESELRVYSSANNCTFEYVSQPFLMDLEGKQGNFKNLREFVFKNIDGYFKIYSKHTPINLVRDLPQGFSALEPLVDLPIGINITRFQTLLALHRSYLTPGDSSSGWTAGAAAYYVGYLQPRTFLLKYNENGTITDAVDCALDPLSETKCTLKSFTVEKGIYQTSNFRVQPTESIVRFPNITNLCPFGEVFNATRFASVYAWNRKRISNCVADYSVLYNSASFSTFKCYGVSPTKLNDLCFTNVYADSFVIRGDEVRQIAPGQTGKIADYNYKLPDDFTGCVIAWNSNNLDSKVGGNYNYLYRLFRKSNLKPFERDISTEIYQAGSTPCNGVEGFNCYFPLQSYGFQPTNGVGYQPYRVVVLSFELLHAPATVCGPKKSTNLVKNKCVNFNFNGLTGTGVLTESNKKFLPFQQFGRDIADTTDAVRDPQTLEILDITPCSFGGVSVITPGTNTSNQVAVLYQDVNCTEVPVAIHADQLTPTWRVYSTGSNVFQTRAGCLIGAEHVNNSYECDIPIGAGICASYQTQTNSPRRARSVASQSIIAYTMSLGAENSVAYSNNSIAIPTNFTISVTTEILPVSMTKTSVDCTMYICGDSTECSNLLLQYGSFCTQLNRALTGIAVEQDKNTQEVFAQVKQIYKTPPIKDFGGFNFSQILPDPSKPSKRSFIEDLLFNKVTLADAGFIKQYGDCLGDIAARDLICAQKFNGLTVLPPLLTDEMIAQYTSALLAGTITSGWTFGAGAALQIPFAMQMAYRFNGIGVTQNVLYENQKLIANQFNSAIGKIQDSLSSTASALGKLQDVVNQNAQALNTLVKQLSSNFGCISSVLNDILSRLDKVEAEVQIDCLITGRLQSLQTYVTQQLIRAAEIRASANLAATKMSECVLGQSKRVDFCGKGYHLMSFPQSAPHGVVFLHVTYVPAQEKNFTTAPAICHDGKAHFPREGVFVSNGTHWFVTQRNFYEPQIITTDNTFVSGNCDVVIGIVNNTVYDPLQPELDSGGGGSDIDPYKEFGSSYQLLNFLPLDFFPDLNALVDTATALYEEELTGREHCSPHHTAIRQALVCWDELTKLIAWMSSNITSEQVRTIIVNHVNDTWGLKVRQSLWFHLSCLTFGQHTVQEFLVSFGVWIRTPAPYRPPNAPILSTLPEHTVIC

SEQ ID NO: 11502 - protein, 1301 aa, Artificial Sequence
  SARS-CoV-2/SARS-CoV-2/Yunnan-01/human/2020/CHN__MT049951.1 spike protein (1-1147)(A972C_R995C) WhcAg construct
MFVFLVLLPLVSSQCVNLTTRTQLPPANTNSFTRGVYYPDKVFRSSVLHSTQDLFLPFFSNVTWFHAIHVSGTNGTKRFDNPVLPFNDGVYFASTEKSNIIRGWIFGTTLDSKTQSLLIVNNATNVVIKVCEFQFCNDPFLGVYYHKNNKSWMESEFRVYSSANNCTFEYVSQPFLMDLEGKQGNFKNLREFVFKNIDGYFKIYSKHTPINLVRDLPQGFSALEPLVDLPIGINITRFQTLLALHRSYLTPGDSSSGWTAGAAAYYVGYLQPRTFLLKYNENGTITDAVDCALDPLSETKCTLKSFTVEKGIYQTSNFRVQPTESIVRFPNITNLCPFGEVFNATRFASVYAWNRKRISNCVADYSVLYNSASFSTFKCYGVSPTKLNDLCFTNVYADSFVIRGDEVRQIAPGQTGKIADYNYKLPDDFTGCVIAWNSNNLDSKVGGNYNYLYRLFRKSNLKPFERDISTEIYQAGSTPCNGVEGFNCYFPLQSYGFQPTNGVGYQPYRVVVLSFELLHAPATVCGPKKSTNLVKNKCVNFNFNGLTGTGVLTESNKKFLPFQQFGRDIADTTDAVRDPQTLEILDITPCSFGGVSVITPGTNTSNQVAVLYQDVNCTEVPVAIHADQLTPTWRVYSTGSNVFQTRAGCLIGAEHVNNSYECDIPIGAGICASYQTQTNSPRRARSVASQSIIAYTMSLGAENSVAYSNNSIAIPTNFTISVTTEILPVSMTKTSVDCTMYICGDSTECSNLLLQYGSFCTQLNRALTGIAVEQDKNTQEVFAQVKQIYKTPPIKDFGGFNFSQILPDPSKPSKRSFIEDLLFNKVTLADAGFIKQYGDCLGDIAARDLICAQKFNGLTVLPPLLTDEMIAQYTSALLAGTITSGWTFGAGAALQIPFAMQMAYRFNGIGVTQNVLYENQKLIANQFNSAIGKIQDSLSSTASALGKLQDVVNQNAQALNTLVKQLSSNFGCISSVLNDILSRLDKVEAEVQIDCLITGRLQSLQTYVTQQLIRAAEIRASANLAATKMSECVLGQSKRVDFCGKGYHLMSFPQSAPHGVVFLHVTYVPAQEKNFTTAPAICHDGKAHFPREGVFVSNGTHWFVTQRNFYEPQIITTDNTFVSGNCDVVIGIVNNTVYDPLQPELDSGGGGSDIDPYKEFGSSYQLLNFLPLDFFPDLNALVDTATALYEEELTGREHCSPHHTAIRQALVCWDELTKLIAWMSSNITSEQVRTIIVNHVNDTWGLKVRQSLWFHLSCLTFGQHTVQEFLVSFGVWIRTPAPYRPPNAPILSTLPEHTVIC

SEQ ID NO: 11503 - protein, 1301 aa, Artificial Sequence
  SARS-CoV-2/USA/WA-UW292/2020__EPI_ISL_418077 spike protein (1-1147)(A972C_R995C) WhcAg construct
MFVFLVLLPLVSSQCVNLTTRTQLPPAYTNSFTRGVYYPDKVFRSSVLHSTQDLFLPFFSNVTWFHAIHVSGTNGTKRFDNPVLPFNDGVYFASTEKSNIIRGWIFGTTLDSKTQSLLIVNNATNVVIKVCEFQFCNDPFLGVYYHKNNKSWMESEFRVYSSANNCTFEYVSQPFLMDLEGKQGNFKNLREFVFKNIDGYFKIYSKHTPINLVRDLPQGFSALEPLVDLPIGINITRFQTLLALHRSYLTPGDSSSGWTAGAAAYYVGYLQPRTFLLKYNENGTITDAVDCALDPLSETKCTLKSFTVEKGIYQTSNFRVQPTESIVRFPNITNLCPFGEVFNATRFASVYAWNRKRISNCVADYSVLYNSASFSTFKCYGVSPTKLNDLCFTNVYADSFVIRGDEVRQIAPGQTGKIADYNYKLPDDFTGCVIAWNSNNLDSKVGGNYNYLYRLFRKSNLKPFERDISTEIYQASSTPCNGVEGFNCYFPLQSYGFQPTNGVGYQPYRVVVLSFELLHAPATVCGPKKSTNLVKNKCVNFNFNGLTGTGVLTESNKKFLPFQQFGRDIADTTDAVRDPQTLEILDITPCSFGGVSVITPGTNTSNQVAVLYQDVNCTEVPVAIHADQLTPTWRVYSTGSNVFQTRAGCLIGAEHVNNSYECDIPIGAGICASYQTQTNSPRRARSVASQSIIAYTMSLGAENSVAYSNNSIAIPTNFTISVTTEILPVSMTKTSVDCTMYICGDSTECSNLLLQYGSFCTQLNRALTGIAVEQDKNTQEVFAQVKQIYKTPPIKDFGGFNFSQILPDPSKPSKRSFIEDLLFNKVTLADAGFIKQYGDCLGDIAARDLICAQKFNGLTVLPPLLTDEMIAQYTSALLAGTITSGWTFGAGAALQIPFAMQMAYRFNGIGVTQNVLYENQKLIANQFNSAIGKIQDSLSSTASALGKLQDVVNQNAQALNTLVKQLSSNFGCISSVLNDILSRLDKVEAEVQIDCLITGRLQSLQTYVTQQLIRAAEIRASANLAATKMSECVLGQSKRVDFCGKGYHLMSFPQSAPHGVVFLHVTYVPAQEKNFTTAPAICHDGKAHFPREGVFVSNGTHWFVTQRNFYEPQIITTDNTFVSGNCDVVIGIVNNTVYDPLQPELDSGGGGSDIDPYKEFGSSYQLLNFLPLDFFPDLNALVDTATALYEEELTGREHCSPHHTAIRQALVCWDELTKLIAWMSSNITSEQVRTIIVNHVNDTWGLKVRQSLWFHLSCLTFGQHTVQEFLVSFGVWIRTPAPYRPPNAPILSTLPEHTVIC

SEQ ID NO: 11504 - protein, 1301 aa, Artificial Sequence
  SARS-CoV-2/Iceland/192/2020__EPI_ISL_417819 spike protein (1-1147)(A972C_R995C) WhcAg construct
MFVFFVLLPLVSSQCVNLTTRTQLPPAYTNSFTRGVYYPDKVFRSSVLHSTQDLFLPFFSNVTWFHAIHVSGTNGTKRFDNPVLPFNDGVYFASTEKSNIIRGWIFGTTLDSKTQSLLIVNNATNVVIKVCEFQFCNDPFLGVYYHKNNKSWMESEFRVYSSANNCTFEYVSQPFLMDLEGKQGNFKNLREFVFKNIDGYFKIYSKHTPINLVRDLPQGFSALEPLVDLPIGINITRFQTLLALHRSYLTPGDSSSGWTAGAAAYYVGYLQPRTFLLKYNENGTITDAVDCALDPLSETKCTLKSFTVEKGIYQTSNFRVQPTESIVRFPNITNLCPFGEVFNATRFASVYAWNRKRISNCVADYSVLYNSASFSTFKCYGVSPTKLNDLCFTNVYADSFVIRGDEVRQIAPGQTGKIADYNYKLPDDFTGCVIAWNSNNLDSKVGGNYNYLYRLFRKSNLKPFERDISTEIYQAGSTPCNGVEGFNCYFPLQSYGFQPTNGVGYQPYRVVVLSFELLHAPATVCGPKKSTNLVKNKCVNFNFNGLTGTGVLTESNKKFLPFQQFGRDIADTTDAVRDPQTLEILDITPCSFGGVSVITPGTNTSNQVAVLYQGVNCTEVPVAIHADQLTPTWRVYSTGSNVFQTRAGCLIGAEHVNNSYECDIPIGAGICASYQTQTNSPRRARSVASQSIIAYTMSLGAENSVAYSNNSIAIPTNFTISVTTEILPVSMTKTSVDCTMYICGDSTECSNLLLQYGSFCTQLNRALTGIAVEQDKNTQEVFAQVKQIYKTPPIKDFGGFNFSQILPDPSKPSKRSFIEDLLFNKVTLADAGFIKQYGDCLGDIAARDLICAQKFNGLTVLPPLLTDEMIAQYTSALLAGTITSGWTFGAGAALQIPFAMQMAYRFNGIGVTQNVLYENQKLIANQFNSAIGKIQDSLSSTASALGKLQDVVNQNAQALNTLVKQLSSNFGCISSVLNDILSRLDKVEAEVQIDCLITGRLQSLQTYVTQQLIRAAEIRASANLAATKMSECVLGQSKRVDFCGKGYHLMSFPQSAPHGVVFLHVTYVPAQEKNFTTAPAICHDGKAHFPREGVFVSNGTHWFVTQRNFYEPQIITTDNTFVSGNCDVVIGIVNNTVYDPLQPELDSGGGGSDIDPYKEFGSSYQLLNFLPLDFFPDLNALVDTATALYEEELTGREHCSPHHTAIRQALVCWDELTKLIAWMSSNITSEQVRTIIVNHVNDTWGLKVRQSLWFHLSCLTFGQHTVQEFLVSFGVWIRTPAPYRPPNAPILSTLPEHTVIC

SEQ ID NO: 11505 - protein, 1301 aa, Artificial Sequence
  SARS-CoV-2/Belgium/ULG-6939/2020__EPI_ISL_417020 spike protein (1-1147)(A972C_R995C) WhcAg construct
MFVFLVLLPLVSSQCVNLTTRTQLPPAYTNSFTRGVYYPDKVFRSSVLHSTQDLFLPFFSNVTWFHAIHVSGTNGTKRFDNPVLPFNDGVYFASTEKSNIIRGWIFGTTLDSKTQSLLIVNNATNVVIKVCEFQFCNDPFLGVYYHKNNKSWMESEFRVYSSANNCTFEYVSQPFLMDLEGKQGNFKNLREFVFKNIDGYFKIYSKHTPINLVRDLPQGFSALEPLVDLPIGINITRFQTLLALHRSYLTPGDSSSGWTAGAAAYYVGYLQPRTFLLKYNENGTITDAVDCALDPLSETKCTLKSFTVEKGIYQTSNFRVQPTESIVRFPNITNLCPFGEVFNATRFASVYAWNRKRISNCVADYSVLYNSASFSTFKCYGVSPTKLNDLCFTNVYADSFVIRGDEVRQIAPGQTGKIADYNYKLPDDFTGCVIAWNSNNLDSKVGGNYNYLYRLFRKSNLKPFERDISTEIYQAGSTPCNGVEGFNCYFPLQSYGFQPTNGVGYQPYRVVVLSFELLHAPATVCGPKKSTNLVKNKCVNFNFNGLTGTGVLTESNKKFLPFQQFGRDIADTTDAVRDPQTLEILDITPCSFGGVSVITPGTNTSNQVAVLYQGVNCTEVPVAIHADQLTPTWRVYSTGSNVFQTRAGCLIGAEHVNNSYECDIPIGAGICASYQTQTNSPRRARSVASQSIIAYTMSLGAENSVVYSNNSIAIPTNFTISVTTEILPVSMTKTSVDCTMYICGDSTECSNLLLQYGSFCTQLNRALTGIAVEQDKNTQEVFAQVKQIYKTPPIKDFGGFNFSQILPDPSKPSKRSFIEDLLFNKVTLADAGFIKQYGDCLGDIAARDLICAQKFNGLTVLPPLLTDEMIAQYTSALLAGTITSGWTFGAGAALQIPFAMQMAYRFNGIGVTQNVLYENQKLIANQFNSAIGKIQDSLSSTASALGKLQDVVNQNAQALNTLVKQLSSNFGCISSVLNDILSRLDKVEAEVQIDCLITGRLQSLQTYVTQQLIRAAEIRASANLAATKMSECVLGQSKRVDFCGKGYHLMSFPQSAPHGVVFLHVTYVPAQEKNFTTAPAICHDGKAHFPREGVFVSNGTHWFVTQRNFYEPQIITTDNTFVSGNCDVVIGIVNNTVYDPLQPELDSGGGGSDIDPYKEFGSSYQLLNFLPLDFFPDLNALVDTATALYEEELTGREHCSPHHTAIRQALVCWDELTKLIAWMSSNITSEQVRTIIVNHVNDTWGLKVRQSLWFHLSCLTFGQHTVQEFLVSFGVWIRTPAPYRPPNAPILSTLPEHTVIC

SEQ ID NO: 11506 - protein, 1301 aa, Artificial Sequence
  SARS-CoV-2/France/HF2496/2020__EPI_ISL_418231 spike protein (1-1147)(A972C_R995C) WhcAg construct
MFVFLVLLPLVSSQCVNLTTRTQLPPAYTNSFTRGVYYPDKVFRSSVLHSTQDLFLPFFSNVTWFHAIHVSGTNGTKRFDNPVLPFNDGVYFASTEKSNIIRGWIFGTTLDSKTQSLLIVNNATNVVIKVCEFQFCNDPFLGVYYHKNNKSWMESEFRVYSSANNCTFEYVSQPFLMDLEGKQGNFKNLREFVFKNIDGYFKIYSKHTPINLVRDLPQGFSALEPLVDLPIGINITRFQTLLALHRSYLTPGDSSSGWTAGAAAYYVGYLQPRTFLLKYNENGTITDAVDCALDPLSETKCTLKSFTVEKGIYQTSNFRVQPTESIVRFPNITNLCPFGEVFNATRFASVYAWNRKRISNCVADYSVLYNSASFSTFKCYGVSPTKLNDLCFTNVYADSFVIRGDEVRQIAPGQTGKIADYNYKLPDDFTGCVIAWNSNNLDSKVGGNYNYLYRLFRKSNLKPFERDISTEIYQAGSTPCNGVEGFNCYFPLQSYGFQPTNGVGYQPYRVVVLSFELLHAPATVCGPKKSTNLVKNKCVNFNFNGLTGTGVLTESNKKFLPFQQFGRDIADTTDAVRDPQTLEILDITPCSFGGVSVITPGTNTSNQVAVLYQGVNCTEVPVAIHADQLTPTWRVYSTGSNVFQTRAGCLIGAEHVNNSYECDIPIGAGICASYQTQTNSPRRARSVASQSIIAYTMSLGAENSVAYSNNSIAIPTNFTISVTTEILPVSMTKTSVDCTMYICGDSTECSNLLLQYGSFCTQLNRALTGIAVEQDKNTQEVFAQVKQIYKTPPIKDFGGFNFSQILPDPSKPSKRSFIEDLLFNKVTLADAGFIKQYGDCLGDIVARDLICAQKFNGLTVLPPLLTDEMIAQYTSALLAGTITSGWTFGAGAALQIPFAMQMAYRFNGIGVTQNVLYENQKLIANQFNSAIGKIQDSLSSTASALGKLQDVVNQNAQALNTLVKQLSSNFGCISSVLNDILSRLDKVEAEVQIDCLITGRLQSLQTYVTQQLIRAAEIRASANLAATKMSECVLGQSKRVDFCGKGYHLMSFPQSAPHGVVFLHVTYVPAQEKNFTTAPAICHDGKAHFPREGVFVSNGTHWFVTQRNFYEPQIITTDNTFVSGNCDVVIGIVNNTVYDPLQPELDSGGGGSDIDPYKEFGSSYQLLNFLPLDFFPDLNALVDTATALYEEELTGREHCSPHHTAIRQALVCWDELTKLIAWMSSNITSEQVRTIIVNHVNDTWGLKVRQSLWFHLSCLTFGQHTVQEFLVSFGVWIRTPAPYRPPNAPILSTLPEHTVIC

SEQ ID NO: 11507 - protein, 1301 aa, Artificial Sequence
  SARS-CoV-2/USA/WA-UW291/2020__EPI_ISL_418076 spike protein (1-1147)(A972C_R995C) WhcAg construct
MFVFLVLLPLVSSQCVNLTTRTQLPPAYTNSFTRGVYYPDKVFRSSVLHSTQDLFLPFFSNVTWFHAIHVSGTNGTKRFDNPVLPFNDGVYFASTEKSNIIRGWIFGTTLDSKTQSLLIVNNATNVVIKVCEFQFCNDPFLGVYYHKNNKSWMESEFRVYSSANNCTFEYVSQPFLMDLEGKQGNFKNLREFVFKNIDGYFKIYSKHTPINLVRDLPQGFSALEPLVDLPIGINITRFQTLLALHRSYLTPGDSSSGWTAGAAAYYVGYLQPRTFLLKYNENGTITDAVDCALDPLSETKCTLKSFTVEKGIYQTSNFRVQPTESIVRFPNITNLCPFGEVFNATRFASVYAWNRKRISNCVADYSVLYNSASFSTFKCYGVSPTKLNDLCFTNVYADSFVIRGDEVRQIAPGQTGKIADYNYKLPDDFTGCVIAWNSNNLDSKVGGNYNYLYRLFRKSNLKPFERDISTEIYQAGSTPCNGVEGFNCYFPLQSYGFQPTNGVGYQPYRVVVLSFELLHAPATVCGPKKSTNLVKNKCVNFNFNGLTGTGVLTESNKKFLPFQQFGRDIADTTDAVRDPQTLEILDITPCSFGGVSVITPGTNTSNQVAVLYQGVNCTEVPVAIHADQLTPTWRVYSTGSNVFQTRAGCLIGAEHVNNSYECDIPIGAGICASYQTQTNSPRRARSVASQSIIAYTMSLGAENSVAYSNNSIAIPTNFTISVTTEILPVSMTKTSVDCTMYICGDSTECSNLLLQYGSFCTQLNRALTGIAVEQDKNTQEVFAQVKQIYKTPPIKDFGGFNFSQILPDPSKPSKRSFIEDLLFNKVTLADAGFIKQYGDCLGDIAARDLICAQKFNGLTVLPPLLTDEMIAQYTSALLAGTITSGWTFGAGAALQIPFAMQMAYRFNGIGVTQNVLYENQKLIANQFNSAIGKIQYSLSSTASALGKLQDVVNQNAQALNTLVKQLSSNFGCISSVLNDILSRLDKVEAEVQIDCLITGRLQSLQTYVTQQLIRAAEIRASANLAATKMSECVLGQSKRVDFCGKGYHLMSFPQSAPHGVVFLHVTYVPAQEKNFTTAPAICHDGKAHFPREGVFVSNGTHWFVTQRNFYEPQIITTDNTFVSGNCDVVIGIVNNTVYDPLQPELDSGGGGSDIDPYKEFGSSYQLLNFLPLDFFPDLNALVDTATALYEEELTGREHCSPHHTAIRQALVCWDELTKLIAWMSSNITSEQVRTIIVNHVNDTWGLKVRQSLWFHLSCLTFGQHTVQEFLVSFGVWIRTPAPYRPPNAPILSTLPEHTVIC

SEQ ID NO: 11508 - protein, 1301 aa, Artificial Sequence; identical to SEQ ID NO: 11471
  SARS-CoV-2/Portugal/PT0034/2020__EPI_ISL_418019 spike protein (1-1147)(A972C_R995C) WhcAg construct

SEQ ID NO: 11509 - protein, 1301 aa, Artificial Sequence; identical to SEQ ID NO: 11463
  SARS-CoV-2/Iceland/202/2020__EPI_ISL_417750 spike protein (1-1147)(A972C_R995C) WhcAg construct

SEQ ID NO: 11510 - protein, 1301 aa, Artificial Sequence
  SARS-CoV-2/USA/WA-UW261/2020__EPI_ISL_418046 spike protein (1-1147)(A972C_R995C) WhcAg construct
MFVFLVLLPLVSSQCVNLTTRTQLPPAYTNSFTRGVYYPDKVFRSSVLHSTQDLFLPFFSNVTWFHAIHVSGTNGTKRFDNPVLPFNDGVYFASTEKSNIIRGWIFGTTLDSKTQSLLIVNNATNVVIKVCEFQFCNDPFLGVYYHKNNKSWMESEFRVYSSANNCTFEYVSQPFLMDLEGKQGNFKNLREFVFKNIDGYFKIYSKHTPINLVRDLPQGFSALEPLVDLPIGINITRFQTLLALHRSYLTPGDSSSGWTAGAAAYYVGYLQPRTFLLKYNENGTITDAVDCALDPLSETKCTLKSFTVEKGIYQTSNFRVQPTESIVRFPNITNLCPFGEVFNATRFTSVYAWNRKRISNCVADYSVLYNSASFSTFKCYGVSPTKLNDLCFTNVYADSFVIRGDEVRQIAPGQTGKIADYNYKLPDDFTGCVIAWNSNNLDSKVGGNYNYLYRLFRKSNLKPFERDISTEIYQAGSTPCNGVEGFNCYFPLQSYGFQPTNGVGYQPYRVVVLSFELLHAPATVCGPKKSTNLVKNKCVNFNFNGLTGTGVLTESNKKFLPFQQFGRDIADTTDAVRDPQTLEILDITPCSFGGVSVITPGTNTSNQVAVLYQDVNCTEVPVAIHADQLTPTWRVYSTGSNVFQTRAGCLIGAEHVNNSYECDIPIGAGICASYQTQTNSPRRARSVASQSIIAYTMSLGAENSVAYSNNSIAIPTNFTISVTTEILPVSMTKTSVDCTMYICGDSTECSNLLLQYGSFCTQLNRALTGIAVEQDKNTQEVFAQVKQIYKTPPIKDFGGFNFSQILPDPSKPSKRSFIEDLLFNKVTLADAGFIKQYGDCLGDIAARDLICAQKFNGLTVLPPLLTDEMIAQYTSALLAGTITSGWTFGAGAALQIPFAMQMAYRFNGIGVTQNVLYENQKLIANQFNSAIGKIQDSLSSTASALGKLQDVVNQNAQALNTLVKQLSSNFGCISSVLNDILSRLDKVEAEVQIDCLITGRLQSLQTYVTQQLIRAAEIRASANLAATKMSECVLGQSKRVDFCGKGYHLMSFPQSAPHGVVFLHVTYVPAQEKNFTTAPAICHDGKAHFPREGVFVSNGTHWFVTQRNFYEPQIITTDNTFVSGNCDVVIGIVNNTVYDPLQPELDSGGGGSDIDPYKEFGSSYQLLNFLPLDFFPDLNALVDTATALYEEELTGREHCSPHHTAIRQALVCWDELTKLIAWMSSNITSEQVRTIIVNHVNDTWGLKVRQSLWFHLSCLTFGQHTVQEFLVSFGVWIRTPAPYRPPNAPILSTLPEHTVIC

SEQ ID NO: 11511 - protein, 1301 aa, Artificial Sequence
  SARS-CoV-2/Portugal/PT0035/2020__EPI_ISL_418020 spike protein (1-1147)(A972C_R995C) WhcAg construct
MFVFLVLLPLVSSQCVNLTTRTQLPPAYTNSFTRGVYYPDKVFRSSVLHSTQDLFLPFFSNVTWFHAIHVSGTNGTKRFDNPVLPFNDGVYFASTEKSNIIRGWIFGTTLDSKTQSLLIVNNATNVVIKVCEFQFCNDPFLGVYYHKNNKSWMESEFRVYSSANNCTFEYVSQPFLMDLEGKQGNFKNLREFVFKNIDGYFKIYSKHTPINLVRDLPQGFSALEPLVDLPIGINITRFQTLLALHRSYLTPGDSSSGWTAGAAAYYVGYLQPRTFLLKYNENGTITDAVDCALDPLSETKCTLKSFTVEKGIYQTSNFRVQPTESIVRFPNITNLCPFGEVFNATRFASVYAWNRKRISNCVADYSVLYNSASFSTFKCYGVSPTKLNDLCFTNVYADSFVIRGDEVRQIAPGQTGKIADYNYKLPDDFTGCVIAWNSNNLDSKVGGNYNYLYRLFRKSNLKPFERDISTEIYQAGSTPCNGVEGFNCYFPLQSYGFQPTNGVGYQPYRVVVLSFELLHAPATVCGPKKSTNLVKNKCVNFNFNGLTGTGVLTESNKKFLPFQQFGRDIADTTDAVRDPQTLEILDITPCSFGGVSVITPGTNTSNQVAVLYQDVNCTEVPVAIHADQLTPTWRVYSTGSNVFQTRAGCLIGAEHVNNSYECDIPIGAGICASYQTQTNSPRRARSVASQSIIAYTMSLGAENSVAYSNNSIAIPTNFTISVTTEILPVSMTKTSVDCTMYICGDSTECSNLLLQYGSFCTQLNRALTGIAVEQDKNTQEVFAQVKQIYKTPPIKDFGGFNFSQILPDPSKPSKRSFIEDLLFNKVTLADAGFIKQYGDCLGDISARDLICAQKFNGLTVLPPLLTDEMIAQYTSALLAGTITSGWTFGAGAALQIPFAMQMAYRFNGIGVTQNVLYENQKLIANQFNSAIGKIQDSLSSTASALGKLQDVVNQNAQALNTLVKQLSSNFGCISSVLNDILSRLDKVEAEVQIDCLITGRLQSLQTYVTQQLIRAAEIRASANLAATKMSECVLGQSKRVDFCGKGYHLMSFPQSAPHGVVFLHVTYVPAQEKNFTTAPAICHDGKAHFPREGVFVSNGTHWFVTQRNFYEPQIITTDNTFVSGNCDVVIGIVNNTVYDPLQPELDSGGGGSDIDPYKEFGSSYQLLNFLPLDFFPDLNALVDTATALYEEELTGREHCSPHHTAIRQALVCWDELTKLIAWMSSNITSEQVRTIIVNHVNDTWGLKVRQSLWFHLSCLTFGQHTVQEFLVSFGVWIRTPAPYRPPNAPILSTLPEHTVIC

SEQ ID NO: 11512 - protein, 1301 aa, Artificial Sequence
  SARS-CoV-2/USA/NY-NYUMC7/2020__EPI_ISL_418192 spike protein (1-1147)(A972C_R995C) WhcAg construct
MFVFLVLLPLVSSQCVNLTTRTQLPPAYTNSFTRGVYYPDKVFRSSVLHSTQDLFLPFFSNVTWFHAIHVSGTNGTKRFDNPVLPFNDGVYFASTEKSNIIRGWIFGTTLDSKTQSLLIVNNATNVVIKVCEFQFCNDPFLGVYHHKNNKSWMESEFRVYSSANNCTFEYVSQPFLMDLEGKQGNFKNLREFVFKNIDGYFKIYSKHTPINLVRDLPQGFSALEPLVDLPIGINITRFQTLLALHRSYLTPGDSSSGWTAGAAAYYVGYLQPRTFLLKYNENGTITDAVDCALDPLSETKCTLKSFTVEKGIYQTSNFRVQPTESIVRFPNITNLCPFGEVFNATRFASVYAWNRKRISNCVADYSVLYNSASFSTFKCYGVSPTKLNDLCFTNVYADSFVIRGDEVRQIAPGQTGKIADYNYKLPDDFTGCVIAWNSNNLDSKVGGNYNYLYRLFRKSNLKPFERDISTEIYQAGSTPCNGVEGFNCYFPLQSYGFQPTNGVGYQPYRVVVLSFELLHAPATVCGPKKSTNLVKNKCVNFNFNGLTGTGVLTESNKKFLPFQQFGRDIADTTDAVRDPQTLEILDITPCSFGGVSVITPGTNTSNQVAVLYQGVNCTEVPVAIHADQLTPTWRVYSTGSNVFQTRAGCLIGAEHVNNSYECDIPIGAGICASYQTQTNSPRRARSVASQSIIAYTMSLGAENSVAYSNNSIAIPTNFTISVTTEILPVSMTKTSVDCTMYICGDSTECSNLLLQYGSFCTQLNRALTGIAVEQDKNTQEVFAQVKQIYKTPPIKDFGGFNFSQILPDPSKPSKRSFIEDLLFNKVTLADAGFIKQYGDCLGDIAARDLICAQKFNGLTVLPPLLTDEMIAQYTSALLAGTITSGWTFGAGAALQIPFAMQMAYRFNGIGVTQNVLYENQKLIANQFNSAIGKIQDSLSSTASALGKLQDVVNQNAQALNTLVKQLSSNFGCISSVLNDILSRLDKVEAEVQIDCLITGRLQSLQTYVTQQLIRAAEIRASANLAATKMSECVLGQSKRVDFCGKGYHLMSFPQSAPHGVVFLHVTYVPAQEKNFTTAPAICHDGKAHFPREGVFVSNGTHWFVTQRNFYEPQIITTDNTFVSGNCDVVIGIVNNTVYDPLQPELDSGGGGSDIDPYKEFGSSYQLLNFLPLDFFPDLNALVDTATALYEEELTGREHCSPHHTAIRQALVCWDELTKLIAWMSSNITSEQVRTIIVNHVNDTWGLKVRQSLWFHLSCLTFGQHTVQEFLVSFGVWIRTPAPYRPPNAPILSTLPEHTVIC

SEQ ID NO: 11513 - protein, 1301 aa, Artificial Sequence
  SARS-CoV-2/Iceland/189/2020__EPI_ISL_417709 spike protein (1-1147)(A972C_R995C) WhcAg construct
MFVFLVLLPLVSSQCVNLTTRTQLPPAYTNSFTRGVYYPDKVFRSSVLHSTQDLFLPFFSNVTWFHAIHVSGTNGTKRFDNPVLPFNDGVYFASTEKSNIIRGWIFGTTLDSKTQSLLIVNNATNVVIKVCEFQFCNDPFLGVYYHKNNKSWMESEFRVYSSANNCTFEYVSQPFLMDLEGKQGNFKNLREFVFKNIDGYFKIYSKHTPINLVRDLPQGFSALEPLVDLPIGINITRFQTLLALHRSYLTPGDSSSGWTAGAAAYYVGYLQPRTFLLKYNENGTITDAVDCALDPLSETKCTLKSFTVEKGIYQTSNFRVQPTESIVRFPNITNLCPFGEVFNATRFASVYAWNRKRISNCVADYSVLYNSASFSTFKCYGVSPTKLNDLCFTNVYADSFVIRGDEVRQIAPGQTGKIADYNYKLPDDFTGCVIAWNSNNLDSKVGGNYNYLYRLFRKSNLKPFERDISTEIYQAGSTPCNGVEGFNCYFPLQSYGFQPTNGVGYQPYRVVVLSFELLHAPATVCGPKKSTNLVKNKCVNFNFNGLTGTGVLTESNKKFLPFQQFGRDIADTTDAVRDPQTLEILDITPCSFGGVSVITPGTNTSNQVAVLYQGVNCTEVPVAIHADQLTPTWRVYSTGSNVFQTRAGCLIGAEHVNNSYECDIPIGAGICASYQTQTNSPRRARSVASQSIIAYTMSLGAENSVAYSNNSIAIPTNFTISVTTEILPVSMTKTSVDCTMYICGDSTECSNLLLQYGSFCTQLNRALTGIAVEQDKNTQEVFAQVKQIYKTPPIKDFGGFNFSQILPDPSKPSKRSFIEDLLFNKVTLADAGFTKQYGDCLGDIAARDLICAQKFNGLTVLPPLLTDEMIAQYTSALLAGTITSGWTFGAGAALQIPFAMQMAYRFNGIGVTQNVLYENQKLIANQFNSAIGKIQDSLSSTASALGKLQDVVNQNAQALNTLVKQLSSNFGCISSVLNDILSRLDKVEAEVQIDCLITGRLQSLQTYVTQQLIRAAEIRASANLAATKMSECVLGQSKRVDFCGKGYHLMSFPQSAPHGVVFLHVTYVPAQEKNFTTAPAICHDGKAHFPREGVFVSNGTHWFVTQRNFYEPQIITTDNTFVSGNCDVVIGIVNNTVYDPLQPELDSGGGGSDIDPYKEFGSSYQLLNFLPLDFFPDLNALVDTATALYEEELTGREHCSPHHTAIRQALVCWDELTKLIAWMSSNITSEQVRTIIVNHVNDTWGLKVRQSLWFHLSCLTFGQHTVQEFLVSFGVWIRTPAPYRPPNAPILSTLPEHTVIC

SEQ ID NO: 11514 - protein, 1301 aa, Artificial Sequence
  SARS-CoV-2/Australia/NSW56/2020__EPI_ISL_417408 spike protein (1-1147)(A972C_R995C) WhcAg construct
MFVFLVLLPLVSSQCVNLTTRTQLPPAYTNSFTRGVYYPDKVFRSSVLHSTQDLFLPFFSNVTWFHAIHVSGTNGTKRFDNPVLPFNDGVYFASTEKSNIIRGWIFGTTLDSKTQSLLIVNNATNVVIKVCEFQFCNDPFLGVYYHKNNKSWMESEFRVYSSANNCTFEYVSQPFLMDLEGKQGNFKNLREFVFKNIDGYFKIYSKHTPINLVRDLPQGFSALEPLVDLPIGINITRFQTLLALHRSYLTPGDSSSGWTAGAAAYYVGYLQPRTFLLKYNENGTITDAVDCALDPLSETKCTLKSFTVEKGIYQTSNFRVQPTESIVRFPNITNLCPFGEVFNATRFASVYAWNRKRISNCVADYSVLYNSASFSTFKCYGVSPTKLNDLCFTNVYADSFVIRGDEVRQIAPGQTGKIADYNYKLPDDFTGCVIAWNSNNLDSKVGGNYNYLYRLFRKSNLKPFERDISTEIYQAGSTPCNGVEGFNCYFPLQSYGFQPTNGVGYQPYRVVVLSFELLHAPATVCGPKKSTNLVKNKCVNFNFNGLTGTGVLTESNKKFLPFQQFGRDIADTTDAVRDPQTLEILDITPCSFGGVSVITPGTNTSNQVAVLYQDVNCTEVPVAIHADQLTPTWRVYSTGSNVFQTRAGCLIGAEHVNNSYECDIPIGAGICASYQTQTNSPRRARSVASQSIIAYTMSLGAENSVAYSNNSIAIPTNFTISVTTEILPVSMTKTSVDCTMYICGDSTECSNLLLQYGSFCTQLNRALTGIAVEQDKNTQEVFAQVKQIYKTPPIKDFGGFNFSQILPDSSKPSKRSFIEDLLFNKVTLADAGFIKQYGDCLGDIAARDLICAQKFNGLTVLPPLLTDEMIAQYTSALLAGTITSGWTFGAGAALQIPFAMQMAYRFNGIGVTQNVLYENQKLIANQFNSAIGKIQDSLSSTASALGKLQDVVNQNAQALNTLVKQLSSNFGCISSVLNDILSRLDKVEAEVQIDCLITGRLQSLQTYVTQQLIRAAEIRASANLAATKMSECVLGQSKRVDFCGKGYHLMSFPQSAPHGVVFLHVTYVPAQEKNFTTAPAICHDGKAHFPREGVFVSNGTHWFVTQRNFYEPQIITTDNTFVSGNCDVVIGIVNNTVYDPLQPELDSGGGGSDIDPYKEFGSSYQLLNFLPLDFFPDLNALVDTATALYEEELTGREHCSPHHTAIRQALVCWDELTKLIAWMSSNITSEQVRTIIVNHVNDTWGLKVRQSLWFHLSCLTFGQHTVQEFLVSFGVWIRTPAPYRPPNAPILSTLPEHTVIC

SEQ ID NO: 11515 - protein, 1301 aa, Artificial Sequence
  SARS-CoV-2/Iceland/280/2020__EPI_ISL_417608 spike protein (1-1147)(A972C_R995C) WhcAg construct
MFVFLVLLPLVSSQCVNLTTRTQLPPAYTNSFTRGVYYPDKVFRSSVLHSTQDLFLPFFSNVTWFHAIHVSGTNGTKRFDNPVLPFNDGVYFASTEKSNIIRGWIFGTTLDSKTQSLLIVNNATNVVIKVCEFQFCNDPFLGVYYHKNNKSWMESEFRVYSSANNCTFEYVSQPFLMDLEGKQGNFKNLREFVFKNIDGYFKIYSKHTPINLVRDLPQGFSALEPLVDLPIGINITRFQTLLALHRSYLTPGDSSSGWTAGAAAYYVGYLQPRTFLLKYNENGTITDAVDCALDPLSETKCTLKSFTVEKGIYQTSNFRVQPTESIVRFPNITNLCPFGEVFNATRFASVYAWNRKRISNCVADYSVLYNSASFSTFKCYGVSPTKLNDLCFTNVYADSFVIRGDEVRQIAPGQTGKIADYNYKLPDDFTGCVIAWNSNNLDSKVGGNYNYLYRLFRKSNLKPFERDISTEIYQAGSTPCNGVEGFNCYFPLQSYGFQPTNGVGYQPYRVVVLSFELLHAPATVCGPKKSTNLVKNKCVNFNFNGLTGTGVLTESNKKFLPFQQFGRDIADTTDAVRDPQTLEILDITPCSFGGVSVITPGTNTSNQVAVLYQGVNCTEVPVAIHADQLTPTWRVYSTGSNVFQTRAGCLIGAEHVNNSYECDIPIGAGICASYHTQTNSPRRARSVASQSIIAYTMSLGAENSVAYSNNSIAIPTNFTISVTTEILPVSMTKTSVDCTMYICGDSTECSNLLLQYGSFCTQLNRALTGIAVEQDKNTQEVFAQVKQIYKTPPIKDFGGFNFSQILPDPSKPSKRSFIEDLLFNKVTLADAGFIKQYGDCLGDIAARDLICAQKFNGLTVLPPLLTDEMIAQYTSALLAGTITSGWTFGAGAALQIPFAMQMAYRFNGIGVTQNVLYENQKLIANQFNSAIGKIQDSLSSTASALGKLQDVVNQNAQALNTLVKQLSSNFGCISSVLNDILSRLDKVEAEVQIDCLITGRLQSLQTYVTQQLIRAAEIRASANLAATKMSECVLGQSKRVDFCGKGYHLMSFPQSAPHGVVFLHVTYVPAQEKNFTTAPAICHDGKAHFPREGVFVSNGTHWFVTQRNFYEPQIITTDNTFVSGNCDVVIGIVNNTVYDPLQPELDSGGGGSDIDPYKEFGSSYQLLNFLPLDFFPDLNALVDTATALYEEELTGREHCSPHHTAIRQALVCWDELTKLIAWMSSNITSEQVRTIIVNHVNDTWGLKVRQSLWFHLSCLTFGQHTVQEFLVSFGVWIRTPAPYRPPNAPILSTLPEHTVIC

SEQ ID NO: 11516 - protein, 1301 aa, Artificial Sequence; identical to SEQ ID NO: 11471
  SARS-CoV-2/Iceland/247/2020__EPI_ISL_417575 spike protein (1-1147)(A972C_R995C) WhcAg construct

SEQ ID NO: 11517 - protein, 1301 aa, Artificial Sequence
  SARS-CoV-2/Iceland/238/2020__EPI_ISL_417566 spike protein (1-1147)(A972C_R995C) WhcAg construct
MFVFLVLLPLVSSQCVNLTTRTQLPPAYTNSFTRGVYYPDKVFRSSVLHSTQDLFLPFFSNVTWFHAIHVSGTNGTKRFDNPVLPFNDGVYFASTEKSNIIRGWIFGTTLDSKTQSLLIVNNATNVVIKVCEFQFCNDPFLGVYYHKNNKSWMESEFRVYSSANNCTFEYVSQPFLMDLEGKQGNFKNLREFVFKNIDGYFKIYSKHTPINLVRDLPQGFSALEPLVDLPIGINITRFQTLLALHRSYLTPGDSSSGWTAGAAAYYVGYLQPRTFLLKYNENGTITDAVDCALDPLSETKCTLKSFTVEKGIYQTSNFRVQPTESIVRFPNITNLCPFGEVFNATRFASVYAWNRKRISNCVADYSVLYNSASFSTFKCYGVSPTKLNDLCFTNVYADSFVIRGDEVRQIAPGQTGKIADYNYKLPDDFTGCVIAWNSNNLDSKVGGNYNYLYRLFRKSNLKPFERDISTEIYQAGSTPCNGVEGFNCYFPLQSYGFQPTNGVGYQPYRVVVLSFELLHAPATVCGPKKSTNLVKNKCVNFNFNGLTGTGVLTESNKKFLPFQQFGRDIADTTDAVRDPQTLEILDITPCSFGGVSVITPGTNTSNQVAVLYQGVNCTEVPVAIHADQLTPTWRVYSTGSNVFQTRAGCLIGAEHVNNSYECDIPIGAGICASYQTQTNSPRRARSVASQSIIAYTMSLGAENSVAYSNNSIAIPTNFTISVTTEILPVSMTKTSVDCTMYICGDSTECSNLLLQYGSFCTQLNRALTGIAVEQDKNTQEVFAQVKQIYKTPPIKDFGGFNFSQILPDPSKPSKRSFIEDLLFNKVTLADVGFIKQYGDCLGDIAARDLICAQKFNGLTVLPPLLTDEMIAQYTSALLAGTITSGWTFGAGAALQIPFAMQMAYRFNGIGVTQNVLYENQKLIANQFNSAIGKIQDSLSSTASALGKLQDVVNQNAQALNTLVKQLSSNFGCISSVLNDILSRLDKVEAEVQIDCLITGRLQSLQTYVTQQLIRAAEIRASANLAATKMSECVLGQSKRVDFCGKGYHLMSFPQSAPHGVVFLHVTYVPAQEKNFTTAPAICHDGKAHFPREGVFVSNGTHWFVTQRNFYEPQIITTDNTFVSGNCDVVIGIVNNTVYDPLQPELDSGGGGSDIDPYKEFGSSYQLLNFLPLDFFPDLNALVDTATALYEEELTGREHCSPHHTAIRQALVCWDELTKLIAWMSSNITSEQVRTIIVNHVNDTWGLKVRQSLWFHLSCLTFGQHTVQEFLVSFGVWIRTPAPYRPPNAPILSTLPEHTVIC

SEQ ID NO: 11518 - protein, 1301 aa, Artificial Sequence
  SARS-CoV-2/Greece/16/2020__EPI_ISL_418265 spike protein (1-1147)(A972C_R995C) WhcAg construct
MFVFLVLLPLVSSQCVNLTTRTQLPPAYTNSFTRGVYYPDKVFRSSVLHSTQDLFLPFFSNVTWFHAIHVSGTNGTKRFDNPVLPFNDGVYFASTEKSNIIRGWIFGTTLDSKTQSLLIVNNATNVVIKVCEFQFCNDPFLGVYYHKNNKSWMESEFRVYSSANNCTFEYVSQPFLMDLEGKQGNFKNLREFVFKNVDGYFKIYSKHTPINLVRDLPQGFSALEPLVDLPIGINITRFQTLLALHRSYLTPGDSSSGWTAGAAAYYVGYLQPRTFLLKYNENGTITDAVDCALDPLSETKCTLKSFTVEKGIYQTSNFRVQPTESIVRFPNITNLCPFGEVFNATRFASVYAWNRKRISNCVADYSVLYNSASFSTFKCYGVSPTKLNDLCFTNVYADSFVIRGDEVRQIAPGQTGKIADYNYKLPDDFTGCVIAWNSNNLDSKVGGNYNYLYRLFRKSNLKPFERDISTEIYQAGSTPCNGVEGFNCYFPLQSYGFQPTNGVGYQPYRVVVLSFELLHAPATVCGPKKSTNLVKNKCVNFNFNGLTGTGVLTESNKKFLPFQQFGRDIADTTDAVRDPQTLEILDITPCSFGGVSVITPGTNTSNQVAVLYQDVNCTEVPVAIHADQLTPTWRVYSTGSNVFQTRAGCLIGAEHVNNSYECDIPIGAGICASYQTQTNSPRRARSVASQSIIAYTMSLGAENSVAYSNNSIAIPTNFTISVTTEILPVSMTKTSVDCTMYICGDSTECSNLLLQYGSFCTQLNRALTGIAVEQDKNTQEVFAQVKQIYKTPPIKDFGGFNFSQILPDPSKPSKRSFIEDLLFNKVTLADAGFIKQYGDCLGDIAARDLICAQKFNGLTVLPPLLTDEMIAQYTSALLAGTITSGWTFGAGAALQIPFAMQMAYRFNGIGVTQNVLYENQKLIANQFNSAIGKIQDSLSSTASALGKLQDVVNQNAQALNTLVKQLSSNFGCISSVLNDILSRLDKVEAEVQIDCLITGRLQSLQTYVTQQLIRAAEIRASANLAATKMSECVLGQSKRVDFCGKGYHLMSFPQSAPHGVVFLHVTYVPAQEKNFTTAPAICHDGKAHFPREGVFVSNGTHWFVTQRNFYEPQIITTDNTFVSGNCDVVIGIVNNTVYDPLQPELDSGGGGSDIDPYKEFGSSYQLLNFLPLDFFPDLNALVDTATALYEEELTGREHCSPHHTAIRQALVCWDELTKLIAWMSSNITSEQVRTIIVNHVNDTWGLKVRQSLWFHLSCLTFGQHTVQEFLVSFGVWIRTPAPYRPPNAPILSTLPEHTVIC

SEQ ID NO: 11519 - protein, 1301 aa, Artificial Sequence
  SARS-CoV-2/Iceland/319/2020__EPI_ISL_417648 spike protein (1-1147)(A972C_R995C) WhcAg construct
MFVFLVLLPLVSSQCVNLTTRTQLPPAYTNSFTRGVYYPDKVFRSSVLHSTQDLFLPFFSNVTWFHAIHVSGTNGTKRFDNPVLPFNDGVYFASTEKSNIIRGWIFGTTLDSKTQSLLIVNNATNVVIKVCEFQFCNDPFLGVYYHKNNKSWMESEFRVYSSANNCTFEYVSQPFLIDLEGKQGNFKNLREFVFKNIDGYFKIYSKHTPINLVRDLPQGFSALEPLVDLPIGINITRFQTLLALHRSYLTPGDSSSGWTAGAAAYYVGYLQPRTFLLKYNENGTITDAVDCALDPLSETKCTLKSFTVEKGIYQTSNFRVQPTESIVRFPNITNLCPFGEVFNATRFASVYAWNRKRISNCVADYSVLYNSASFSTFKCYGVSPTKLNDLCFTNVYADSFVIRGDEVRQIAPGQTGKIADYNYKLPDDFTGCVIAWNSNNLDSKVGGNYNYLYRLFRKSNLKPFERDISTEIYQAGSTPCNGVEGFNCYFPLQSYGFQPTNGVGYQPYRVVVLSFELLHAPATVCGPKKSTNLVKNKCVNFNFNGLTGTGVLTESNKKFLPFQQFGRDIADTTDAVRDPQTLEILDITPCSFGGVSVITPGTNTSNQVAVLYQGVNCTEVPVAIHADQLTPTWRVYSTGSNVFQTRAGCLIGAEHVNNSYECDIPIGAGICASYQTQTNSPRRARSVASQSIIAYTMSLGAENSVAYSNNSIAIPTNFTISVTTEILPVSMTKTSVDCTMYICGDSTECSNLLLQYGSFCTQLNRALTGIAVEQDKNTQEVFAQVKQIYKTPPIKDFGGFNFSQILPDPSKPSKRSFIEDLLFNKVTLADAGFIKQYGDCLGDIAARDLICAQKFNGLTVLPPLLTDEMIAQYTSALLAGTITSGWTFGAGAALQIPFAMQMAYRFNGIGVTQNVLYENQKLIANQFNSAIGKIQDSLSSTASALGKLQDVVNQNAQALNTLVKQLSSNFGCISSVLNDILSRLDKVEAEVQIDCLITGRLQSLQTYVTQQLIRAAEIRASANLAATKMSECVLGQSKRVDFCGKGYHLMSFPQSAPHGVVFLHVTYVPAQEKNFTTAPAICHDGKAHFPREGVFVSNGTHWFVTQRNFYEPQIITTDNTFVSGNCDVVIGIVNNTVYDPLQPELDSGGGGSDIDPYKEFGSSYQLLNFLPLDFFPDLNALVDTATALYEEELTGREHCSPHHTAIRQALVCWDELTKLIAWMSSNITSEQVRTIIVNHVNDTWGLKVRQSLWFHLSCLTFGQHTVQEFLVSFGVWIRTPAPYRPPNAPILSTLPEHTVIC

SEQ ID NO: 11520 - protein, 1301 aa, Artificial Sequence
  SARS-CoV-2/Congo/94/2020__EPI_ISL_417947 spike protein (1-1147)(A972C_R995C) WhcAg construct
MFVFLVLLPLVSSQCVNLTTRTQLPPAYTNSFTRGVYYPDKVFRSSVLHSTQDLFLPFFSNVTWFHAIHVSGTNGTKRFDNPVLPFNDGVYFASTEKSNIIRGWIFGTTLDSKTQSLLIVNNATNVVIKVCEFQFCNDPFLGVYYHKNNKSWMESEFRVYSSANNCTFEYVSQPFLMDLEGKQGNFKNLREFVFKNIDGYFKIYSKHTPINLVRDLPQGFSALEPLVDLPIGINITRFQTLLALHRSYLTPGDSSSGWTAGAAAYYVGYLQPRTFLLKYNENGTITDAVDCALDPLSETKCTLKSFTVEKGIYQTSNFRVQPTESIVRFPNITNLCPFGEVFNATRFASVYAWNRKRISNCVADYSVLYNSASFSTFKCYGVSPTKLNDLCFTNVYADSFVIRGDEVRQIAPGQTGKIADYNYKLPDDFTGCVIAWNSNNLDSKVGGNYNYLYRLFRKSNLKPFERDISTEIYQAGSTPCNGVEGFNCYFPLQSYGFQPTNGVGYQPYRVVVLSFELLHAPATVCGPKKSTNLVKNKCVNFNFNGLTGTGVLTESNKKFLPFQQFGRDIADTTDAVRDPQTLEILDITPCSFGGVSVITPGTNTSNQVAVLYQGVNCTEVPVAIHADQLTPTWRVYSTGSNVFQTRAGCLIGAEHVNNSYECDIPIGAGICASYQTQTNSPRRARSVASQSIIAYTMSLGAENSVAYSNNSIAIPTNFTISVTTEILPVSMTKTSVDCTMYICGDSTECSNLLLQYGSFCTQLNRALTGIAVEQDKNTQEVFAQVKQIYKTPPIKDFGGFNFSQILPDPSKPSKRSFIEDILFNKVTLADAGFIKQYGDCLGDIAARDLICAQKFNGLTVLPPLLTDEMIAQYTSALLAGTITSGWTFGAGAALQIPFAMQMAYRFNGIGVTQNVLYENQKLIANQFNSAIGKIQDSLSSTASALGKLQDVVNQNAQALNTLVKQLSSNFGCISSVLNDILSRLDKVEAEVQIDCLITGRLQSLQTYVTQQLIRAAEIRASANLAATKMSECVLGQSKRVDFCGKGYHLMSFPQSAPHGVVFLHVTYVPAQEKNFTTAPAICHDGKAHFPREGVFVSNGTHWFVTQRNFYEPQIITTDNTFVSGNCDVVIGIVNNTVYDPLQPELDSGGGGSDIDPYKEFGSSYQLLNFLPLDFFPDLNALVDTATALYEEELTGREHCSPHHTAIRQALVCWDELTKLIAWMSSNITSEQVRTIIVNHVNDTWGLKVRQSLWFHLSCLTFGQHTVQEFLVSFGVWIRTPAPYRPPNAPILSTLPEHTVIC

SEQ ID NO: 11521 - protein, 1301 aa, Artificial Sequence
  SARS-CoV-2/Congo/158/2020__EPI_ISL_417950 spike protein (1-1147)(A972C_R995C) WhcAg construct
MFVFLVLLPLVSSQCVNLTTRTQLPPAYTNSFTRGVYYPDKVFRSSVLHSTQDLFLPFFSNVTWFHAIHVSGTNGTKRFDNPVLPFNDGVYFASTEKSNIIRGWIFGTTLDSKTQSLLIVNNATNVVIKVCEFQFCNDPFLGVYYHKNNKSWMESEFRVYSSANNCTFEYVSQPFLMDLEGKQGNFKNLREFVFKNIDGYFKIYSKHTPINLVRDLPQGFSALEPLVDLPIGINITRFQTLLALHRSYLTPGDSSSGWTAGAAAYYVGYLQPRTFLLKYNENGTITDAVDCALDPLSETKCTLKSFTVEKGIYQTSNFRVQPTESIVRFPNITNLCPFGEVFNATRFASVYAWNRKRISNCVADYSVLYNSASFSTFKCYGVSPTKLNDLCFTNVYADSFVIRGDEVRQIAPGQTGKIADYNYKLPDDFTGCVIAWNSNNLDSKVGGNYNYLYRLFRKSNLKPFERDISTEIYQAGSTPCNGVEGFNCYFPLQSYGFQPTNGVGYQPYRVVVLSFELLHAPATVCGPKKSTNLVKNKCVNFNFNGLTGTGVLTESNKKFLPFQQFGRDIADTTDAVRDPQTLEILDITPCSFGGVSVITPGTNTSNQVAVLYQDVNCTEVPVAIHADQLTPTWRVYSTGSNVFQTRAGCLIGAEHVNNSYECDIPIGAGICASYQTQTNSPRRARSVASQSIIAYTMSLGAENSVAYSNNSIAIPTNFTISVTTEILPVSMTKTSVDCTMYICGDSTECSNLLLQYGSFCTQLNRALTGIAVEQDKNTQEVFAQVKQIYKTPPIKDFGGFNFSQILPDPSKPSKRSFIEDLLFNKVTLADAGFIKQYGDCLGDIAARDLICAQKFNGLTVLPPLLTDEMIAQYTSALLAGTITSGWTFGAGAALQIPFAMQMAYRFNGIGVTQNVLYENQKLIANQFNSAIGKIQDSLSSTASALGKLQDVVNQNAQALNTLVKQLSSNFGCISSVLNDILSRLDKVEAEVQIDCLITGRLQSLQTYVTQQLIRAAEIRASANLAATKMSECVLGQSKRVDFCGKGYHLMSFPQSAPHGVVFLHVTYVPAQEKNFTTAPAICHDGKAHFPREGVFVSNGTHWFVTQRNFYEPQIITTDNTFLSGNCDVVIGIVNNTVYDPLQPELDSGGGGSDIDPYKEFGSSYQLLNFLPLDFFPDLNALVDTATALYEEELTGREHCSPHHTAIRQALVCWDELTKLIAWMSSNITSEQVRTIIVNHVNDTWGLKVRQSLWFHLSCLTFGQHTVQEFLVSFGVWIRTPAPYRPPNAPILSTLPEHTVIC

SEQ ID NO: 11522 - protein, 1301 aa, Artificial Sequence
  SARS-CoV-2/USA/UT-00034/2020__EPI_ISL_417977 spike protein (1-1147)(A972C_R995C) WhcAg construct
MFVFLVLLPLVSSQCVNLTTRTQLPPAYTNSFTRGVYYPDKVFRSSVLHSTQDLFLPFFSNVTWFHAIHVSGTNGTKRFDNPVLPFNDGVYFASTEKSNIIRGWIFGTTLDSKTQSLLIVNNATNVVIKVCEFQFCNDPFLGVYYYKNNKSWMESEFRVYSSANNCTFEYVSQPFLMDLEGKQGNFKNLREFVFKNIDGYFKIYSKHTPINLVRDLPQGFSALEPLVDLPIGINITRFQTLLALHRSYLTPGDSSSGWTAGAAAYYVGYLQPRTFLLKYNENGTITDAVDCALDPLSETKCTLKSFTVEKGIYQTSNFRVQPTESIVRFPNITNLCPFGEVFNATRFASVYAWNRKRISNCVADYSVLYNSASFSTFKCYGVSPTKLNDLCFTNVYADSFVIRGDEVRQIAPGQTGKIADYNYKLPDDFTGCVIAWNSNNLDSKVGGNYNYLYRLFRKSNLKPFERDISTEIYQAGSTPCNGVEGFNCYFPLQSYGFQPTNGVGYQPYRVVVLSFELLHAPATVCGPKKSTNLVKNKCVNFNFNGLTGTGVLTESNKKFLPFQQFGRDIADTTDAVRDPQTLEILDITPCSFGGVSVITPGTNTSNQVAVLYQGVNCTEVPVAIHADQLTPTWRVYSTGSNVFQTRAGCLIGAEHVNNSYECDIPIGAGICASYQTQTNSPRRARSVASQSIIAYTMSLGAENSVAYSNNSIAIPTNFTISVTTEILPVSMTKTSVDCTMYICGDSTECSNLLLQYGSFCTQLNRALTGIAVEQDKNTQEVFAQVKQIYKTPPIKDFGGFNFSQILPDPSKPSKRSFIEDLLFNKVTLADAGFIKQYGDCLGDIAARDLICAQKFNGLTVLPPLLTDEMIAQYTSALLAGTITSGWTFGAGAALQIPFAMQMAYRFNGIGVTQNVLYENQKLIANQFNSAIGKIQDSLSSTASALGKLQDVVNQNAQALNTLVKQLSSNFGCISSVLNDILSRLDKVEAEVQIDCLITGRLQSLQTYVTQQLIRAAEIRASANLAATKMSECVLGQSKRVDFCGKGYHLMSFPQSAPHGVVFLHVTYVPAQEKNFTTAPAICHDGKAHFPREGVFVSNGTHWFVTQRNFYEPQIITTDNTFVSGNCDVVIGIVNNTVYDPLQPELDSGGGGSDIDPYKEFGSSYQLLNFLPLDFFPDLNALVDTATALYEEELTGREHCSPHHTAIRQALVCWDELTKLIAWMSSNITSEQVRTIIVNHVNDTWGLKVRQSLWFHLSCLTFGQHTVQEFLVSFGVWIRTPAPYRPPNAPILSTLPEHTVIC

SEQ ID NO: 11523 - protein, 1301 aa, Artificial Sequence
  SARS-CoV-2/USA/UT-00033/2020__EPI_ISL_417976 spike protein (1-1147)(A972C_R995C) WhcAg construct
MFVFLVLLPLVSSQCVNLTTRTQLPPAYTNSFTRGVYYPDKVFRSSVLHSTQDLFLPFFSNVTWFHAIHVSGTNGTKRFDNPVLPFNDGVYFASTEKSNIIRGWIFGTTLDSKTQSLLIVNNATNVVIKVCEFQFCNDPFLGVYYHKNNKSWMESEFRVYSSANNCTFEYVSQPFLMDLEGKQGNFKNLREFVFKNIDGYFKIYSKHTPINLVRDLPQGFSALEPLVDLPIGINITRFQTLLALHRSYLTPGDSSSGLTAGAAAYYVGYLQPRTFLLKYNENGTITDAVDCALDPLSETKCTLKSFTVEKGIYQTSNFRVQPTESIVRFPNITNLCPFGEVFNATRFASVYAWNRKRISNCVADYSVLYNSASFSTFKCYGVSPTKLNDLCFTNVYADSFVIRGDEVRQIAPGQTGKIADYNYKLPDDFTGCVIAWNSNNLDSKVGGNYNYLYRLFRKSNLKPFERDISTEIYQAGSTPCNGVEGFNCYFPLQSYGFQPTNGVGYQPYRVVVLSFELLHAPATVCGPKKSTNLVKNKCVNFNFNGLTGTGVLTESNKKFLPFQQFGRDIADTTDAVRDPQTLEILDITPCSFGGVSVITPGTNTSNQVAVLYQGVNCTEVPVAIHADQLTPTWRVYSTGSNVFQTRAGCLIGAEHVNNSYECDIPIGAGICASYQTQTNSPRRARSVASQSIIAYTMSLGAENSVAYSNNSIAIPTNFTISVTTEILPVSMTKTSVDCTMYICGDSTECSNLLLQYGSFCTQLNRALTGIAVEQDKNTQEVFAQVKQIYKTPPIKDFGGFNFSQILPDPSKPSKRSFIEDLLFNKVTLADAGFIKQYGDCLGDIAARDLICAQKFNGLTVLPPLLTDEMIAQYTSALLAGTITSGWTFGAGAALQIPFAMQMAYRFNGIGVTQNVLYENQKLIANQFNSAIGKIQDSLSSTASALGKLQDVVNQNAQALNTLVKQLSSNFGCISSVLNDILSRLDKVEAEVQIDCLITGRLQSLQTYVTQQLIRAAEIRASANLAATKMSECVLGQSKRVDFCGKGYHLMSFPQSAPHGVVFLHVTYVPAQEKNFTTAPAICHDGKAHFPREGVFVSNGTHWFVTQRNFYEPQIITTDNTFVSGNCDVVIGIVNNTVYDPLQPELDSGGGGSDIDPYKEFGSSYQLLNFLPLDFFPDLNALVDTATALYEEELTGREHCSPHHTAIRQALVCWDELTKLIAWMSSNITSEQVRTIIVNHVNDTWGLKVRQSLWFHLSCLTFGQHTVQEFLVSFGVWIRTPAPYRPPNAPILSTLPEHTVIC

SEQ ID NO: 11524 - protein, 1301 aa, Artificial Sequence
  SARS-CoV-2/USA/WI-13/2020__EPI_ISL_417516 spike protein (1-1147)(A972C_R995C) WhcAg construct
MFVFLVLLPLVSSQCVNLTTRTQLPPAYTNSFTRGVYYPDKVFRSSVLHSTQDLFLPFFSNVTWFHAIHVSGTNGTKRFDNPVLPFNDGVYFASTEKSNIIRGWIFGTTLDSKTQSLLIVNNATNVVIKVCEFQFCNDPFLGVYYHKNNKSWMESEFRVYSSANNCTFEYVSQPFLMDLEGKQGNFKNLREFVFKNIDGYFKIYSKHTPINLVRDLPQGFSALEPLVDLPIGINITRFQTLLALHRSYLTPGDSSSGWTAGAAAYYVGYLQPRTFLLKYNENGTITDAVDCALDPLSETKCTLKSFTVEKGIYQTSNFRVLPTESIVRFPNITNLCPFGEVFNATRFASVYAWNRKRISNCVADYSVLYNSASFSTFKCYGVSPTKLNDLCFTNVYADSFVIRGDEVRQIAPGQTGKIADYNYKLPDDFTGCVIAWNSNNLDSKVGGNYNYLYRLFRKSNLKPFERDISTEIYQAGSTPCNGVEGFNCYFPLQSYGFQPTNGVGYQPYRVVVLSFELLHAPATVCGPKKSTNLVKNKCVNFNFNGLTGTGVLTESNKKFLPFQQFGRDIADTTDAVRDPQTLEILDITPCSFGGVSVITPGTNTSNQVAVLYQGVNCTEVPVAIHADQLTPTWRVYSTGSNVFQTRAGCLIGAEHVNNSYECDIPIGAGICASYQTQTNSPRRARSVASQSIIAYTMSLGAENSVAYSNNSIAIPTNFTISVTTEILPVSMTKTSVDCTMYICGDSTECSNLLLQYGSFCTQLNRALTGIAVEQDKNTQEVFAQVKQIYKTPPIKDFGGFNFSQILPDPSKPSKRSFIEDLLFNKVTLADAGFIKQYGDCLGDIAARDLICAQKFNGLTVLPPLLTDEMIAQYTSALLAGTITSGWTFGAGAALQIPFAMQMAYRFNGIGVTQNVLYENQKLIANQFNSAIGKIQDSLSSTASALGKLQDVVNQNAQALNTLVKQLSSNFGCISSVLNDILSRLDKVEAEVQIDCLITGRLQSLQTYVTQQLIRAAEIRASANLAATKMSECVLGQSKRVDFCGKGYHLMSFPQSAPHGVVFLHVTYVPAQEKNFTTAPAICHDGKAHFPREGVFVSNGTHWFVTQRNFYEPQIITTDNTFVSGNCDVVIGIVNNTVYDPLQPELDSGGGGSDIDPYKEFGSSYQLLNFLPLDFFPDLNALVDTATALYEEELTGREHCSPHHTAIRQALVCWDELTKLIAWMSSNITSEQVRTIIVNHVNDTWGLKVRQSLWFHLSCLTFGQHTVQEFLVSFGVWIRTPAPYRPPNAPILSTLPEHTVIC

SEQ ID NO: 11525 - protein, 1300 aa, Artificial Sequence
  SARS-CoV-2/India/1-27/2020__EPI_ISL_413522 spike protein (1-1146)(A971C_R994C) WhcAg construct
MFVFLVLLPLVSSQCVNLTTRTQLPPAYTNSFTRGVYYPDKVFRSSVLHSTQDLFLPFFSNVTWFHAIHVSGTNGTKRFDNPVLPFNDGVYFASTEKSNIIRGWIFGTTLDSKTQSLLIVNNATNVVIKVCEFQFCNDPFLGVYHKNNKSWMESEFRVYSSANNCTFEYVSQPFLMDLEGKQGNFKNLREFVFKNIDGYFKIYSKHTPINLVRDLPQGFSALEPLVDLPIGINITRFQTLLALHRSYLTPGDSSSGWTAGAAAYYVGYLQPRTFLLKYNENGTITDAVDCALDPLSETKCTLKSFTVEKGIYQTSNFRVQPTESIVRFPNITNLCPFGEVFNATRFASVYAWNRKRISNCVADYSVLYNSASFSTFKCYGVSPTKLNDLCFTNVYADSFVIRGDEVIQIAPGQTGKIADYNYKLPDDFTGCVIAWNSNNLDSKVGGNYNYLYRLFRKSNLKPFERDISTEIYQAGSTPCNGVEGFNCYFPLQSYGFQPTNGVGYQPYRVVVLSFELLHAPATVCGPKKSTNLVKNKCVNFNFNGLTGTGVLTESNKKFLPFQQFGRDIADTTDAVRDPQTLEILDITPCSFGGVSVITPGTNTSNQVAVLYQDVNCTEVPVAIHADQLTPTWRVYSTGSNVFQTRAGCLIGAEHVNNSYECDIPIGAGICASYQTQTNSPRRARSVASQSIIAYTMSLGAENSVAYSNNSIAIPTNFTISVTTEILPVSMTKTSVDCTMYICGDSTECSNLLLQYGSFCTQLNRALTGIAVEQDKNTQEVFAQVKQIYKTPPIKDFGGFNFSQILPDPSKPSKRSFIEDLLFNKVTLADAGFIKQYGDCLGDIAARDLICAQKFNGLTVLPPLLTDEMIAQYTSALLAGTITSGWTFGAGAALQIPFAMQMAYRFNGIGVTQNVLYENQKLIANQFNSAIGKIQDSLSSTASALGKLQDVVNQNAQALNTLVKQLSSNFGCISSVLNDILSRLDKVEAEVQIDCLITGRLQSLQTYVTQQLIRAAEIRASANLAATKMSECVLGQSKRVDFCGKGYHLMSFPQSAPHGVVFLHVTYVPAQEKNFTTAPAICHDGKAHFPREGVFVSNGTHWFVTQRNFYEPQIITTDNTFVSGNCDVVIGIVNNTVYDPLQPELDSGGGGSDIDPYKEFGSSYQLLNFLPLDFFPDLNALVDTATALYEEELTGREHCSPHHTAIRQALVCWDELTKLIAWMSSNITSEQVRTIIVNHVNDTWGLKVRQSLWFHLSCLTFGQHTVQEFLVSFGVWIRTPAPYRPPNAPILSTLPEHTVIC

SEQ ID NO: 11526 - protein, 1295 aa, Artificial Sequence
  SARS-CoV-2/pangolin/Guangxi/P4L/2017__EPI_ISL_410538 spike protein (1-1141)(A966C_R989C) WhcAg construct
MFVFLFVLPLVSSQCVNLTTRTGIPPGYTNSSTRGVYYPDKVFRSSILHLTQDLFLPFFSNVTWFNTINYQGGFKKFDNPVLPFNDGVYFASTEKSNIIRGWIFGTTLDARTQSLLIVNNATNVVIKVCEFQFCTDPFLGVYYHNNNKTWVENEFRVYSSANNCTFEYISQPFLMDLEGKQGNFKNLREFVFKNVDGYFKIYSKHTPIDLVRDLPRGFAALEPLVDLPIGINITRFQTLLALHRSYLTPGNLESGWTTGAAAYYVGYLQQRTFLLSYNQNGTITDAVDCSLDPLSETKCTLKSLTVEKGIYQTSNFRVQPTISIVRFPNITNLCPFGEVFNASKFASVYAWNRKRISNCVADYSVLYNSTSFSTFKCYGVSPTKLNDLCFTNVYADSFVVKGDEVRQIAPGQTGVIADYNYKLPDDFTGCVIAWNSVKQDALTGGNYGYLYRLFRKSKLKPFERDISTEIYQAGSTPCNGQVGLNCYYPLERYGFHPTTGVNYQPFRVVVLSFELLNGPATVCGPKLSTTLVKDKCVNFNFNGLTGTGVLTTSKKQFLPFQQFGRDISDTTDAVRDPQTLEILDITPCSFGGVSVITPGTNTSNQVAVLYQDVNCTEVPMAIHAEQLTPAWRVYSAGANVFQTRAGCLVGAEHVNNSYECDIPVGAGICASYHSMSSLRSVNQRSIIAYTMSLGAENSVAYSNNSIAIPTNFTISVTTEILPVSMTKTSVDCTMYICGDSIECSNLLLQYGSFCTQLNRALTGIAVEQDKNTQEVFAQVKQIYKTPPIKDFGGFNFSQILPDPSKPSKRSFIEDLLFNKVTLADAGFIKQYGDCLGDIAARDLICAQKFNGLTVLPPLLTDEMIAQYTSALLAGTITSGWTFGAGAALQIPFAMQMAYRFNGIGVTQNVLYENQKLIANQFNSAIGKIQDSLSSTASALGKLQDVVNQNAQALNTLVKQLSSNFGCISSVLNDILSRLDKVEAEVQIDCLITGRLQSLQTYVTQQLIRAAEIRASANLAATKMSECVLGQSKRVDFCGKGYHLMSFPQSAPHGVVFLHVTYVPAQEKNFTTAPAICHEGKAHFPREGVFVSNGTHWFITQRNFYEPQIITTDNTFVSGSCDVVIGIVNNTVYDPLQPELDSGGGGSDIDPYKEFGSSYQLLNFLPLDFFPDLNALVDTATALYEEELTGREHCSPHHTAIRQALVCWDELTKLIAWMSSNITSEQVRTIIVNHVNDTWGLKVRQSLWFHLSCLTFGQHTVQEFLVSFGVWIRTPAPYRPPNAPILSTLPEHTVIC

SEQ ID NO: 11527 - protein, 1295 aa, Artificial Sequence
  SARS-CoV-2/pangolin/Guangxi/P5L/2017__EPI_ISL_410540 spike protein (1-1141)(A966C_R989C) WhcAg construct
MFVFLFVLPLVSSQCVNLTTRTGIPPGYTNSSTRGVYYPDKVFRSSILHLTQDLFLPFFSNVTWFNTINYQGGFKKFDNPVLPFNDGVYFASTEKSNIIRGWIFGTTLDARTQSLLIVNNATNVVIKVCEFQFCTDPFLGVYYHNNNKTWVENEFRVYSSANNCTFEYISQPFLMDLEGKQGNFKNLREFVFKNVDGYFKIYSKHTPIDLVRDLPRGFAALEPLVDLPIGINITRFQTLLALHRSYLTPGKLESGWTTGAAAYYVGYLQQRTFLLSYNQNGTITDAVDCSLDPLSETKCTLKSLTVEKGIYQTSNFRVQPTISIVRFPNITNLCPFGEVFNASKFASVYAWNRKRISNCVADYSVLYNSTSFSTFKCYGVSPTKLNDLCFTNVYADSFVVKGDEVRQIAPGQTGVIADYNYKLPDDFTGCVIAWNSVKQDALTGGNYGYLYRLFRKSKLKPFERDISTEIYQAGSTPCNGQVGLNCYYPLERYGFHPTTGVNYQPFRVVVLSFELLNGPATVCGPKLSTTLVKDKCVNFNFNGLTGTGVLTTSKKQFLPFQQFGRDISDTTDAVRDPQTLEILDITPCSFGGVSVITPGTNTSNQVAVLYQDVNCTEVPMAIHAEQLTPAWRVYSAGANVFQTRAGCLVGAEHVNNSYECDIPVGAGICASYHSMSSFRSVNQRSIIAYTMSLGAENSVAYSNNSIAIPTNFTISVTTEILPVSMTKTSVDCTMYICGDSIECSNLLLQYGSFCTQLNRALTGIAVEQDKNTQEVFAQVKQIYKTPPIKDFGGFNFSQILPDPSKPSKRSFIEDLLFNKVTLADAGFIKQYGDCLGDIAARDLICAQKFNGLTVLPPLLTDEMIAQYTSALLAGTITSGWTFGAGAALQIPFAMQMAYRFNGIGVTQNVLYENQKLIANQFNSAIGKIQDSLSSTASALGKLQDVVNQNAQALNTLVKQLSSNFGCISSVLNDILSRLDKVEAEVQIDCLITGRLQSLQTYVTQQLIRAAEIRASANLAATKMSECVLGQSKRVDFCGKGYHLMSFPQSAPHGVVFLHVTYVPAQEKNFTTAPAICHEGKAHFPREGVFVSNGTHWFITQRNFYEPQIITTDNTFVSGSCDVVIGIVNNTVYDPLQPELDSGGGGSDIDPYKEFGSSYQLLNFLPLDFFPDLNALVDTATALYEEELTGREHCSPHHTAIRQALVCWDELTKLIAWMSSNITSEQVRTIIVNHVNDTWGLKVRQSLWFHLSCLTFGQHTVQEFLVSFGVWIRTPAPYRPPNAPILSTLPEHTVIC

SEQ ID NO: 11528 - protein, 1295 aa, Artificial Sequence
  SARS-CoV-2/pangolin/Guangxi/P5E/2017__EPI_ISL_410541 spike protein (1-1141)(A966C_R989C) WhcAg construct
MFVFLFVLPLVSSQCVNLTTRTGIPPGYTNSSTRGVYYPDKVFRSSILHLTQDLFLPFFSNVTWFNTITYQGGSKKFDNPVLPFNDGVYFASTEKSNIIRGWIFGTTLDARTQSLLIVNNATNVVIKVCEFQFCTDPFLGVYYHNNNKTWVENEFRVYSSANNCTFEYISQPFLMDLEGKQGNFKNLREFVFKNVDGYFKIYSKHTPIDLVRDLPRGFAALEPLVDLPIGINITRFQTLLALHRSYLTPGKLESGWTTGAAAYYVGYLQQRTFLLSYNQNGTITDAVDCSLDPLSETKCTLKSLTVEKGIYQTSNFRVQPTISIVRFPNITNLCPFGEVFNASKFASVYAWNRKRISNCVADYSVLYNSTSFSTFKCYGVSPTKLNDLCFTNVYADSFVVKGDEVRQIAPGQTGVIADYNYKLPDDFTGCVIAWNSVKQDALTGDNYGYLYRLFRKSKLKPFERDISTEIYQAGSTPCNGQVGLNCYYPLERYGFHPTTGVNYQPFRVVVLSFELLNGPATVCGPKLSTTLVKDKCVNFNFNGLTGTGVLTTSKKQFLPFQQFGRDISDTTDAVRDPQTLEILDITPCSFGGVSVITPGTNTSNQVAVLYQDVNCTEVPMAIHAEQLTPAWRVYSAGANVFQTRAGCLVGAEHVNNSYECDIPVGAGICASYHSMSSFRSVNQRSIIAYTMSLGAENSVAYSNNSIAIPTNFTISVTTEILPVSMTKTSVDCTMYICGDSIECSNLLLQYGSFCTQLNRALTGIAVEQDKNTQEVFAQVKQIYKTPPIKDFGGFNFSQILPDPSKPSKRSFIEDLLFNKVTLADAGFIKQYGDCLGDIAARDLICAQKFNGLTVLPPLLTDEMIAQYTSALLAGTITSGWTFGAGAALQIPFAMQMAYRFNGIGVTQNVLYENQKLIANQFNSAIGKIQDSLSSTASALGKLQDVVNQNAQALNTLVKQLSSNFGCISSVLNDILSRLDKVEAEVQIDCLITGRLQSLQTYVTQQLIRAAEIRASANLAATKMSECVLGQSKRVDFCGKGYHLMSFPQSAPHGVVFLHVTYVPAQEKNFTTAPAICHEGKAHFPREGVFVSNGTHWFITQRNFYEPQIITTDNTFVSGSCDVVIGIVNNTVYDPLQPELDSGGGGSDIDPYKEFGSSYQLLNFLPLDFFPDLNALVDTATALYEEELTGREHCSPHHTAIRQALVCWDELTKLIAWMSSNITSEQVRTIIVNHVNDTWGLKVRQSLWFHLSCLTFGQHTVQEFLVSFGVWIRTPAPYRPPNAPILSTLPEHTVIC

SEQ ID NO: 11529 - protein, 1293 aa, Artificial Sequence
  SARS-CoV-2/pangolin/Guangxi/P1E/2017__EPI_ISL_410539 spike protein (1-1139)(A964C_R987C) WhcAg construct
MFVFLFVLPLVSSQCVNLTTRTGIQPGYTNSSTRGVYYPDKVFRSSILHLTQDLFLPFFSNVTWFNTINYQGGFKKFDNPVLPFNDGVYFASTEKSNIIRGWIFGTTLDARTQSLLIVNNATNVVIKVCEFQFCTDPFLGVYYHNNNKTWVENEFRVYSSANNCTFEYISQPFLMDLEGKQGNFKNLREFVFKNVDGYFKIYSKHTPIDLVRDLPRGFAALEPLVDLPIGINITRFQTLLALHRSYLTPGKLESGWTTGAAAYYVGYLQQRTFLLSYNQNGTITDAVDCSLDPLSETKCTLKSLTVEKGIYQTSNFRVQPTISIVRFPNITNLCPFGEVFNASKFASVYAWNRKRISNCVADYSVLYNSTSFSTFKCYGVSPTKLNDLCFTNVYADSFVVKGDEVRQIAPGQTGVIADYNYKLPDDFTGCVIAWNSVKQDALTGGNYLYRLFRKSKLKPFERDISTEIYQAGSTPCNGQVGLNCYYPLERYGFHPTTGVNYQPFRVVVLSFELLNGPATVCGPKLSTTLVKDKCVNFNFNGLTGTGVLTTSKKQFLPFQQFGRDISDTTDAVRDPQTLEILDITPCSFGGVSVITPGTNTSNQVAVLYQDVNCTEVPMAIHAEQLTPAWRVYSAGANVFQTRAGCLVGAEHVNNSYECDIPVGAGICASYHSMSSLRSVNQRSIIAYTMSLGAENSVAYSNNSIAIPTNFTISVTTEILPVSMTKTSVDCTMYICGDSIECSNLLLQYGSFCTQLNRALTGIAVEQDKNTQEVFAQVKQIYKTPPIKDFGGFNFSQILPDPSKPSKRSFIEDLLFNKVTLADAGFIKQYGDCLGDIAARDLICAQKFNGLTVLPPLLTDEMIAQYTSALLAGTITSGWTFGAGAALQIPFAMQMAYRFNGIGVTQNVLYENQKLIANQFNSAIGKIQDSLSSTASALGKLQDVVNQNAQALNTLVKQLSSNFGCISSVLNDILSRLDKVEAEVQIDCLITGRLQSLQTYVTQQLIRAAEIRASANLAATKMSECVLGQSKRVDFCGKGYHLMSFPQSAPHGVVFLHVTYVPAQEKNFTTAPAICHEGKAHFPREGVFVSNGTHWFITQRNFYEPQIITTDNTFVSGSCDVVIGIVNNTVYDPLQPELDSGGGGSDIDPYKEFGSSYQLLNFLPLDFFPDLNALVDTATALYEEELTGREHCSPHHTAIRQALVCWDELTKLIAWMSSNITSEQVRTIIVNHVNDTWGLKVRQSLWFHLSCLTFGQHTVQEFLVSFGVWIRTPAPYRPPNAPILSTLPEHTVIC

SEQ ID NO: 11530 - protein, 1301 aa, Artificial Sequence
  SARS-CoV-2/Wuhan/WIV05/2019__EPI_ISL_402128 spike protein (1-1147)(A890C_V1040C) WhcAg construct
MFVFLVLLPLVSSQCVNLTTRTQLPPAYTNSFTRGVYYPDKVFRSSVLHSTQDLFLPFFSNVTWFHAIHVSGTNGTKRFDNPVLPFNDGVYFASTEKSNIIRGWIFGTTLDSKTQSLLIVNNATNVVIKVCEFQFCNDPFLGVYYHKNNKSWMESEFRVYSSANNCTFEYVSQPFLMDLEGKQGNFKNLREFVFKNIDGYFKIYSKHTPINLVRDLPQGFSALEPLVDLPIGINITRFQTLLALHRSYLTPGDSSSGWTAGAAAYYVGYLQPRTFLLKYNENGTITDAVDCALDPLSETKCTLKSFTVEKGIYQTSNFRVQPTESIVRFPNITNLCPFGEVFNATRFASVYAWNRKRISNCVADYSVLYNSASFSTFKCYGVSPTKLNDLCFTNVYADSFVIRGDEVRQIAPGQTGKIADYNYKLPDDFTGCVIAWNSNNLDSKVGGNYNYLYRLFRKSNLKPFERDISTEIYQAGSTPCNGVEGFNCYFPLQSYGFQPTNGVGYQPYRVVVLSFELLHAPATVCGPKKSTNLVKNKCVNFNFNGLTGTGVLTESNKKFLPFQQFGRDIADTTDAVRDPQTLEILDITPCSFGGVSVITPGTNTSNQVAVLYQDVNCTEVPVAIHADQLTPTWRVYSTGSNVFQTRAGCLIGAEHVNNSYECDIPIGAGICASYQTQTNSPRRARSVASQSIIAYTMSLGAENSVAYSNNSIAIPTNFTISVTTEILPVSMTKTSVDCTMYICGDSTECSNLLLQYGSFCTQLNRALTGIAVEQDKNTQEVFAQVKQIYKTPPIKDFGGFNFSQILPDPSKPSKRSFIEDLLFNKVTLADAGFIKQYGDCLGDIAARDLICAQKFNGLTVLPPLLTDEMIAQYTSALLAGTITSGWTFGCGAALQIPFAMQMAYRFNGIGVTQNVLYENQKLIANQFNSAIGKIQDSLSSTASALGKLQDVVNQNAQALNTLVKQLSSNFGAISSVLNDILSRLDKVEAEVQIDRLITGRLQSLQTYVTQQLIRAAEIRASANLAATKMSECVLGQSKRCDFCGKGYHLMSFPQSAPHGVVFLHVTYVPAQEKNFTTAPAICHDGKAHFPREGVFVSNGTHWFVTQRNFYEPQIITTDNTFVSGNCDVVIGIVNNTVYDPLQPELDSGGGGSDIDPYKEFGSSYQLLNFLPLDFFPDLNALVDTATALYEEELTGREHCSPHHTAIRQALVCWDELTKLIAWMSSNITSEQVRTIIVNHVNDTWGLKVRQSLWFHLSCLTFGQHTVQEFLVSFGVWIRTPAPYRPPNAPILSTLPEHTVIC

SEQ ID NO: 11531 - protein, 1297 aa, Artificial Sequence; identical to SEQ ID NO: 11263
  SARS-CoV-2/bat/Yunnan/RaTG13/2013__EPI_ISL_402131 spike protein (1-1143)(A886C_V1036C) WhcAg construct

SEQ ID NO: 11532 - protein, 1301 aa, Artificial Sequence; identical to SEQ ID NO: 11264
  SARS-CoV-2/Wuhan/HBCDC-HB-01/2019__EPI_ISL_402132 spike protein (1-1147)(A890C_V1040C) WhcAg construct

SEQ ID NO: 11533 - protein, 1301 aa, Artificial Sequence; identical to SEQ ID NO: 11265
  SARS-CoV-2/Guangdong/20SF028/2020__EPI_ISL_403936 spike protein (1-1147)(A890C_V1040C) WhcAg construct

SEQ ID NO: 11534 - protein, 1301 aa, Artificial Sequence; identical to SEQ ID NO: 11266
  SARS-CoV-2/Shenzhen/SZTH-001/2020__EPI_ISL_406592 spike protein (1-1147)(A890C_V1040C) WhcAg construct

SEQ ID NO: 11535 - protein, 1301 aa, Artificial Sequence; identical to SEQ ID NO: 11267
  SARS-CoV-2/Shenzhen/SZTH-004/2020__EPI_ISL_406595 spike protein (1-1147)(A890C_V1040C) WhcAg construct

SEQ ID NO: 11536 - protein, 1301 aa, Artificial Sequence; identical to SEQ ID NO: 11268
  SARS-CoV-2/France/IDF0372/2020__EPI_ISL_406596 spike protein (1-1147)(A890C_V1040C) WhcAg construct

SEQ ID NO: 11537 - protein, 1301 aa, Artificial Sequence; identical to SEQ ID NO: 11269
  SARS-CoV-2/Australia/VIC01/2020__EPI_ISL_406844 spike protein (1-1147)(A890C_V1040C) WhcAg construct

SEQ ID NO: 11538 - protein, 1301 aa, Artificial Sequence; identical to SEQ ID NO: 11270
  SARS-CoV-2/Germany/BavPat1/2020__EPI_ISL_406862 spike protein (1-1147)(A890C_V1040C) WhcAg construct

SEQ ID NO: 11539 - protein, 1301 aa, Artificial Sequence; identical to SEQ ID NO: 11271
  SARS-CoV-2/Wuhan/HBCDC-HB-02/2020__EPI_ISL_412978 spike protein (1-1147)(A890C_V1040C) WhcAg construct

SEQ ID NO: 11540 - protein, 1301 aa, Artificial Sequence; identical to SEQ ID NO: 11272
  SARS-CoV-2/Australia/QLD02/2020__EPI_ISL_407896 spike protein (1-1147)(A890C_V1040C) WhcAg construct

SEQ ID NO: 11541 - protein, 1301 aa, Artificial Sequence; identical to SEQ ID NO: 11273
  SARS-CoV-2/India/1-31/2020__EPI_ISL_413523 spike protein (1-1147)(A890C_V1040C) WhcAg construct

SEQ ID NO: 11542 - protein, 1301 aa, Artificial Sequence; identical to SEQ ID NO: 11274
  SARS-CoV-2/Guangdong/GD2020087-P0008/2020__EPI_ISL_413863 spike protein (1-1147)(A890C_V1040C) WhcAg construct

SEQ ID NO: 11543 - protein, 1301 aa, Artificial Sequence; identical to SEQ ID NO: 11275
  SARS-CoV-2/Sweden/01/2020__EPI_ISL_411951 spike protein (1-1147)(A890C_V1040C) WhcAg construct

SEQ ID NO: 11544 - protein, 1301 aa, Artificial Sequence; identical to SEQ ID NO: 11276
  SARS-CoV-2/Tianmen/HBCDC-HB-07/2020__EPI_ISL_412983 spike protein (1-1147)(A890C_V1040C) WhcAg construct

SEQ ID NO: 11545 - protein, 1301 aa, Artificial Sequence; identical to SEQ ID NO: 11277
  SARS-CoV-2/Hong Kong/case42_VM20002493/2020__EPI_ISL_414527 spike protein (1-1147)(A890C_V1040C) WhcAg construct

SEQ ID NO: 11546 - protein, 1301 aa, Artificial Sequence; identical to SEQ ID NO: 11278
  SARS-CoV-2/USA/CruiseA-23/2020__EPI_ISL_414482 spike protein (1-1147)(A890C_V1040C) WhcAg construct

SEQ ID NO: 11547 - protein, 1301 aa, Artificial Sequence; identical to SEQ ID NO: 11279
  SARS-CoV-2/Hong Kong/case85_VM20002868/2020__EPI_ISL_414519 spike protein (1-1147)(A890C_V1040C) WhcAg construct

SEQ ID NO: 11548 - protein, 1301 aa, Artificial Sequence; identical to SEQ ID NO: 11270
  SARS-CoV-2/England/200990660/2020__EPI_ISL_414523 spike protein (1-1147)(A890C_V1040C) WhcAg construct

SEQ ID NO: 11549 - protein, 1301 aa, Artificial Sequence; identical to SEQ ID NO: 11281
  SARS-CoV-2/Australia/NSW09/2020__EPI_ISL_413595 spike protein (1-1147)(A890C_V1040C) WhcAg construct

SEQ ID NO: 11550 - protein, 1301 aa, Artificial Sequence; identical to SEQ ID NO: 11262
  SARS-CoV-2/Australia/NSW10/2020__EPI_ISL_413596 spike protein (1-1147)(A890C_V1040C) WhcAg construct

SEQ ID NO: 11551 - protein, 1301 aa, Artificial Sequence; identical to SEQ ID NO: 11283
  SARS-CoV-2/Switzerland/1000477797/2020__EPI_ISL_413023 spike protein (1-1147)(A890C_V1040C) WhcAg construct

SEQ ID NO: 11552 - protein, 1301 aa, Artificial Sequence; identical to SEQ ID NO: 11284
  SARS-CoV-2/Belgium/BA-02291/2020__EPI_ISL_415159 spike protein (1-1147)(A890C_V1040C) WhcAg construct

SEQ ID NO: 11553 - protein, 1301 aa, Artificial Sequence; identical to SEQ ID NO: 11285
  SARS-CoV-2/USA/WA8-UW5/2020__EPI_ISL_413486 spike protein (1-1147)(A890C_V1040C) WhcAg construct

SEQ ID NO: 11554 - protein, 1301 aa, Artificial Sequence; identical to SEQ ID NO: 11286
  SARS-CoV-2/England/20102000506/2020__EPI_ISL_415147 spike protein (1-1147)(A890C_V1040C) WhcAg construct

SEQ ID NO: 11555 - protein, 1301 aa, Artificial Sequence; identical to SEQ ID NO: 11287
  SARS-CoV-2/Belgium/VAG-03013/2020__EPI_ISL_415155 spike protein (1-1147)(A890C_V1040C) WhcAg construct

SEQ ID NO: 11556 - protein, 1301 aa, Artificial Sequence; identical to SEQ ID NO: 11288
  SARS-CoV-2/Belgium/BC-03016/2020__EPI_ISL_415157 spike protein (1-1147)(A890C_V1040C) WhcAg construct

SEQ ID NO: 11557 - protein, 1301 aa, Artificial Sequence; identical to SEQ ID NO: 11289
  SARS-CoV-2/Germany/BavPat3/2020__EPI_ISL_414521 spike protein (1-1147)(A890C_V1040C) WhcAg construct

SEQ ID NO: 11558 - protein, 1301 aa, Artificial Sequence; identical to SEQ ID NO: 11290
  SARS-CoV-2/France/HF1805/2020__EPI_ISL_414628 spike protein (1-1147)(A890C_V1040C) WhcAg construct

SEQ ID NO: 11559 - protein, 1301 aa, Artificial Sequence; identical to SEQ ID NO: 11291
  SARS-CoV-2/Netherlands/ZuidHolland_9/2020__EPI_ISL_414445 spike protein (1-1147)(A890C_V1040C) WhcAg construct

SEQ ID NO: 11560 - protein, 1301 aa, Artificial Sequence; identical to SEQ ID NO: 11292
  SARS-CoV-2/Finland/FIN03032020A/2020__EPI_ISL_413602 spike protein (1-1147)(A890C_V1040C) WhcAg construct

SEQ ID NO: 11561 - protein, 1301 aa, Artificial Sequence; identical to SEQ ID NO: 11293
  SARS-CoV-2/France/GE1977/2020__EPI_ISL_414632 spike protein (1-1147)(A890C_V1040C) WhcAg construct

SEQ ID NO: 11562 - protein, 1301 aa, Artificial Sequence; identical to SEQ ID NO: 11294
  SARS-CoV-2/Finland/FIN-313/2020__EPI_ISL_414641 spike protein (1-1147)(A890C_V1040C) WhcAg construct

SEQ ID NO: 11563 - protein, 1301 aa, Artificial Sequence; identical to SEQ ID NO: 11295
  SARS-CoV-2/Netherlands/ZuidHolland_2/2020__EPI_ISL_414556 spike protein (1-1147)(A890C_V1040C) WhcAg construct

SEQ ID NO: 11564 - protein, 1301 aa, Artificial Sequence; identical to SEQ ID NO: 11296
  SARS-CoV-2/USA/WA-UW31/2020__EPI_ISL_414618 spike protein (1-1147)(A890C_V1040C) WhcAg construct

SEQ ID NO: 11565 - protein, 1301 aa, Artificial Sequence; identical to SEQ ID NO: 11297
  SARS-CoV-2/South Korea/SNU01/2020__EPI_ISL_411929 spike protein (1-1147)(A890C_V1040C) WhcAg construct

SEQ ID NO: 11566 - protein, 1301 aa, Artificial Sequence; identical to SEQ ID NO: 11298
  SARS-CoV-2/China/WF0004/2020__EPI_ISL_413694 spike protein (1-1147)(A890C_V1040C) WhcAg construct

SEQ ID NO: 11567 - protein, 1301 aa, Artificial Sequence; identical to SEQ ID NO: 11299
  SARS-CoV-2/China/WF0028/2020__EPI_ISL_413791 spike protein (1-1147)(A890C_V1040C) WhcAg construct

SEQ ID NO: 11568 - protein, 1301 aa, Artificial Sequence; identical to SEQ ID NO: 11300
  SARS-CoV-2/2019-nCoV/USA-CruiseA-18/2020__MT159716.1 spike protein (1-1147)(A890C_V1040C) WhcAg construct

SEQ ID NO: 11569 - protein, 1301 aa, Artificial Sequence; identical to SEQ ID NO: 11301
  SARS-CoV-2/SARS-CoV-2/Yunnan-01/human/2020/CHN__MT049951.1 spike protein (1-1147)(A890C_V1040C) WhcAg construct

SEQ ID NO: 11570 - protein, 1301 aa, Artificial Sequence; identical to SEQ ID NO: 11302
  SARS-CoV-2/USA/WA-UW292/2020__EPI_ISL_418077 spike protein (1-1147)(A890C_V1040C) WhcAg construct

SEQ ID NO: 11571 - protein, 1301 aa, Artificial Sequence; identical to SEQ ID NO: 11303
  SARS-CoV-2/Iceland/192/2020__EPI_ISL_417819 spike protein (1-1147)(A890C_V1040C) WhcAg construct

SEQ ID NO: 11572 - protein, 1301 aa, Artificial Sequence; identical to SEQ ID NO: 11304
  SARS-CoV-2/Belgium/ULG-6939/2020__EPI_ISL_417020 spike protein (1-1147)(A890C_V1040C) WhcAg construct

SEQ ID NO: 11573 - protein, 1301 aa, Artificial Sequence; identical to SEQ ID NO: 11305
  SARS-CoV-2/France/HF2496/2020__EPI_ISL_418231 spike protein (1-1147)(A890C_V1040C) WhcAg construct

SEQ ID NO: 11574 - protein, 1301 aa, Artificial Sequence; identical to SEQ ID NO: 11306
  SARS-CoV-2/USA/WA-UW291/2020__EPI_ISL_418076 spike protein (1-1147)(A890C_V1040C) WhcAg construct

SEQ ID NO: 11575 - protein, 1301 aa, Artificial Sequence; identical to SEQ ID NO: 11270
  SARS-CoV-2/Portugal/PT0034/2020__EPI_ISL_418019 spike protein (1-1147)(A890C_V1040C) WhcAg construct

SEQ ID NO: 11576 - protein, 1301 aa, Artificial Sequence; identical to SEQ ID NO: 11262
  SARS-CoV-2/Iceland/202/2020__EPI_ISL_417750 spike protein (1-1147)(A890C_V1040C) WhcAg construct

SEQ ID NO: 11577 - protein, 1301 aa, Artificial Sequence; identical to SEQ ID NO: 11309
  SARS-CoV-2/USA/WA-UW261/2020__EPI_ISL_418046 spike protein (1-1147)(A890C_V1040C) WhcAg construct

SEQ ID NO: 11578 - protein, 1301 aa, Artificial Sequence; identical to SEQ ID NO: 11310
  SARS-CoV-2/Portugal/PT0035/2020__EPI_ISL_418020 spike protein (1-1147)(A890C_V1040C) WhcAg construct

SEQ ID NO: 11579 - protein, 1301 aa, Artificial Sequence; identical to SEQ ID NO: 11311
  SARS-CoV-2/USA/NY-NYUMC7/2020__EPI_ISL_418192 spike protein (1-1147)(A890C_V1040C) WhcAg construct

SEQ ID NO: 11580 - protein, 1301 aa, Artificial Sequence; identical to SEQ ID NO: 11312
  SARS-CoV-2/Iceland/189/2020__EPI_ISL_417709 spike protein (1-1147)(A890C_V1040C) WhcAg construct

SEQ ID NO: 11581 - protein, 1301 aa, Artificial Sequence; identical to SEQ ID NO: 11313
  SARS-CoV-2/Australia/NSW56/2020__EPI_ISL_417408 spike protein (1-1147)(A890C_V1040C) WhcAg construct

SEQ ID NO: 11582 - protein, 1301 aa, Artificial Sequence; identical to SEQ ID NO: 11314
  SARS-CoV-2/Iceland/280/2020__EPI_ISL_417608 spike protein (1-1147)(A890C_V1040C) WhcAg construct

SEQ ID NO: 11583 - protein, 1301 aa, Artificial Sequence; identical to SEQ ID NO: 11270
  SARS-CoV-2/Iceland/247/2020__EPI_ISL_417575 spike protein (1-1147)(A890C_V1040C) WhcAg construct

SEQ ID NO: 11584 - protein, 1301 aa, Artificial Sequence; identical to SEQ ID NO: 11316
  SARS-CoV-2/Iceland/238/2020__EPI_ISL_417566 spike protein (1-1147)(A890C_V1040C) WhcAg construct

SEQ ID NO: 11585 - protein, 1301 aa, Artificial Sequence; identical to SEQ ID NO: 11317
  SARS-CoV-2/Greece/16/2020__EPI_ISL_418265 spike protein (1-1147)(A890C_V1040C) WhcAg construct

SEQ ID NO: 11586 - protein, 1301 aa, Artificial Sequence; identical to SEQ ID NO: 11318
  SARS-CoV-2/Iceland/319/2020__EPI_ISL_417648 spike protein (1-1147)(A890C_V1040C) WhcAg construct

SEQ ID NO: 11587 - protein, 1301 aa, Artificial Sequence; identical to SEQ ID NO: 11319
  SARS-CoV-2/Congo/94/2020__EPI_ISL_417947 spike protein (1-1147)(A890C_V1040C) WhcAg construct

SEQ ID NO: 11588 - protein, 1301 aa, Artificial Sequence; identical to SEQ ID NO: 11320
  SARS-CoV-2/Congo/158/2020__EPI_ISL_417950 spike protein (1-1147)(A890C_V1040C) WhcAg construct

SEQ ID NO: 11589 - protein, 1301 aa, Artificial Sequence; identical to SEQ ID NO: 11321
  SARS-CoV-2/USA/UT-00034/2020__EPI_ISL_417977 spike protein (1-1147)(A890C_V1040C) WhcAg construct

SEQ ID NO: 11590 - protein, 1301 aa, Artificial Sequence; identical to SEQ ID NO: 11322
  SARS-CoV-2/USA/UT-00033/2020__EPI_ISL_417976 spike protein (1-1147)(A890C_V1040C) WhcAg construct

SEQ ID NO: 11591 - protein, 1301 aa, Artificial Sequence; identical to SEQ ID NO: 11323
  SARS-CoV-2/USA/WI-13/2020__EPI_ISL_417516 spike protein (1-1147)(A890C_V1040C) WhcAg construct

SEQ ID NO: 11592 - protein, 1300 aa, Artificial Sequence; identical to SEQ ID NO: 11324
  SARS-CoV-2/India/1-27/2020__EPI_ISL_413522 spike protein (1-1146)(A889C_V1039C) WhcAg construct

SEQ ID NO: 11593 - protein, 1295 aa, Artificial Sequence; identical to SEQ ID NO: 11325
  SARS-CoV-2/pangolin/Guangxi/P4L/2017__EPI_ISL_410538 spike protein (1-1141)(A884C_V1034C) WhcAg construct

SEQ ID NO: 11594 - protein, 1295 aa, Artificial Sequence; identical to SEQ ID NO: 11326
  SARS-CoV-2/pangolin/Guangxi/P5L/2017__EPI_ISL_410540 spike protein (1-1141)(A884C_V1034C) WhcAg construct

SEQ ID NO: 11595 - protein, 1295 aa, Artificial Sequence; identical to SEQ ID NO: 11327
  SARS-CoV-2/pangolin/Guangxi/P5E/2017__EPI_ISL_410541 spike protein (1-1141)(A884C_V1034C) WhcAg construct

SEQ ID NO: 11596 - protein, 1293 aa, Artificial Sequence; identical to SEQ ID NO: 11328
  SARS-CoV-2/pangolin/Guangxi/P1E/2017__EPI_ISL_410539 spike protein (1-1139)(A882C_V1032C) WhcAg construct

SEQ ID NO: 11597 - protein, 1301 aa, Artificial Sequence
  SARS-CoV-2/Wuhan/WIV05/2019__EPI_ISL_402128 spike protein (1-1147)(T874C_S1055C) WhcAg construct
MFVFLVLLPLVSSQCVNLTTRTQLPPAYTNSFTRGVYYPDKVFRSSVLHSTQDLFLPFFSNVTWFHAIHVSGTNGTKRFDNPVLPFNDGVYFASTEKSNIIRGWIFGTTLDSKTQSLLIVNNATNVVIKVCEFQFCNDPFLGVYYHKNNKSWMESEFRVYSSANNCTFEYVSQPFLMDLEGKQGNFKNLREFVFKNIDGYFKIYSKHTPINLVRDLPQGFSALEPLVDLPIGINITRFQTLLALHRSYLTPGDSSSGWTAGAAAYYVGYLQPRTFLLKYNENGTITDAVDCALDPLSETKCTLKSFTVEKGIYQTSNFRVQPTESIVRFPNITNLCPFGEVFNATRFASVYAWNRKRISNCVADYSVLYNSASFSTFKCYGVSPTKLNDLCFTNVYADSFVIRGDEVRQIAPGQTGKIADYNYKLPDDFTGCVIAWNSNNLDSKVGGNYNYLYRLFRKSNLKPFERDISTEIYQAGSTPCNGVEGFNCYFPLQSYGFQPTNGVGYQPYRVVVLSFELLHAPATVCGPKKSTNLVKNKCVNFNFNGLTGTGVLTESNKKFLPFQQFGRDIADTTDAVRDPQTLEILDITPCSFGGVSVITPGTNTSNQVAVLYQDVNCTEVPVAIHADQLTPTWRVYSTGSNVFQTRAGCLIGAEHVNNSYECDIPIGAGICASYQTQTNSPRRARSVASQSIIAYTMSLGAENSVAYSNNSIAIPTNFTISVTTEILPVSMTKTSVDCTMYICGDSTECSNLLLQYGSFCTQLNRALTGIAVEQDKNTQEVFAQVKQIYKTPPIKDFGGFNFSQILPDPSKPSKRSFIEDLLFNKVTLADAGFIKQYGDCLGDIAARDLICAQKFNGLTVLPPLLTDEMIAQYCSALLAGTITSGWTFGAGAALQIPFAMQMAYRFNGIGVTQNVLYENQKLIANQFNSAIGKIQDSLSSTASALGKLQDVVNQNAQALNTLVKQLSSNFGAISSVLNDILSRLDKVEAEVQIDRLITGRLQSLQTYVTQQLIRAAEIRASANLAATKMSECVLGQSKRVDFCGKGYHLMSFPQCAPHGVVFLHVTYVPAQEKNFTTAPAICHDGKAHFPREGVFVSNGTHWFVTQRNFYEPQIITTDNTFVSGNCDVVIGIVNNTVYDPLQPELDSGGGGSDIDPYKEFGSSYQLLNFLPLDFFPDLNALVDTATALYEEELTGREHCSPHHTAIRQALVCWDELTKLIAWMSSNITSEQVRTIIVNHVNDTWGLKVRQSLWFHLSCLTFGQHTVQEFLVSFGVWIRTPAPYRPPNAPILSTLPEHTVIC

SEQ ID NO: 11598 - protein, 1297 aa, Artificial Sequence
  SARS-CoV-2/bat/Yunnan/RaTG13/2013__EPI_ISL_402131 spike protein (1-1143)(T870C_S1051C) WhcAg construct
MFVFLVLLPLVSSQCVNLTTRTQLPPAYTNSSTRGVYYPDKVFRSSVLHLTQDLFLPFFSNVTWFHAIHVSGTNGIKRFDNPVLPFNDGVYFASTEKSNIIRGWIFGTTLDSKTQSLLIVNNATNVVIKVCEFQFCNDPFLGVYYHKNNKSWMESEFRVYSSANNCTFEYVSQPFLMDLEGKQGNFKNLREFVFKNIDGYFKIYSKHTPINLVRDLPPGFSALEPLVDLPIGINITRFQTLLALHRSYLTPGDSSSGWTAGAAAYYVGYLQPRTFLLKYNENGTITDAVDCALDPLSETKCTLKSFTVEKGIYQTSNFRVQPTDSIVRFPNITNLCPFGEVFNATTFASVYAWNRKRISNCVADYSVLYNSTSFSTFKCYGVSPTKLNDLCFTNVYADSFVITGDEVRQIAPGQTGKIADYNYKLPDDFTGCVIAWNSKHIDAKEGGNFNYLYRLFRKANLKPFERDISTEIYQAGSKPCNGQTGLNCYYPLYRYGFYPTDGVGHQPYRVVVLSFELLNAPATVCGPKKSTNLVKNKCVNFNFNGLTGTGVLTESNKKFLPFQQFGRDIADTTDAVRDPQTLEILDITPCSFGGVSVITPGTNASNQVAVLYQDVNCTEVPVAIHADQLTPTWRVYSTGSNVFQTRAGCLIGAEHVNNSYECDIPIGAGICASYQTQTNSRSVASQSIIAYTMSLGAENSVAYSNNSIAIPTNFTISVTTEILPVSMTKTSVDCTMYICGDSTECSNLLLQYGSFCTQLNRALTGIAVEQDKNTQEVFAQVKQIYKTPPIKDFGGFNFSQILPDPSKPSKRSFIEDLLFNKVTLADAGFIKQYGDCLGDIAARDLICAQKFNGLTVLPPLLTDEMIAQYCSALLAGTITSGWTFGAGAALQIPFAMQMAYRFNGIGVTQNVLYENQKLIANQFNSAIGKIQDSLSSTASALGKLQDVVNQNAQALNTLVKQLSSNFGAISSVLNDILSRLDKVEAEVQIDRLITGRLQSLQTYVTQQLIRAAEIRASANLAATKMSECVLGQSKRVDFCGKGYHLMSFPQCAPHGVVFLHVTYVPAQEKNFTTAPAICHDGKAHFPREGVFVSNGTHWFVTQRNFYEPQIITTDNTFVSGSCDVVIGIVNNTVYDPLQPELDSGGGGSDIDPYKEFGSSYQLLNFLPLDFFPDLNALVDTATALYEEELTGREHCSPHHTAIRQALVCWDELTKLIAWMSSNITSEQVRTIIVNHVNDTWGLKVRQSLWFHLSCLTFGQHTVQEFLVSFGVWIRTPAPYRPPNAPILSTLPEHTVIC

SEQ ID NO: 11599 - protein, 1301 aa, Artificial Sequence
  SARS-CoV-2/Wuhan/HBCDC-HB-01/2019__EPI_ISL_402132 spike protein (1-1147)(T874C_S1055C) WhcAg construct
MFVFLVLLPLVSSQCVNLTTRTQLPPAYTNSITRGVYYPDKVFRSSVLHSTQDLFLPFFSNVTWFHAIHVSGTNGTKRFDNPVLPFNDGVYFASTEKSNIIRGWIFGTTLDSKTQSLLIVNNATNVVIKVCEFQFCNDPFLGVYYHKNNKSWMESEFRVYSSANNCTFEYVSQPFLMDLEGKQGNFKNLREFVFKNIDGYFKIYSKHTPINLVRDLPQGFSALEPLVDLPIGINITRFQTLLALHRSYLTPGDSSSGWTAGAAAYYVGYLQPRTFLLKYNENGTITDAVDCALDPLSETKCTLKSFTVEKGIYQTSNFRVQPTESIVRFPNITNLCPFGEVFNATRFASVYAWNRKRISNCVADYSVLYNSASFSTFKCYGVSPTKLNDLCFTNVYADSFVIRGDEVRQIAPGQTGKIADYNYKLPDDFTGCVIAWNSNNLDSKVGGNYNYLYRLFRKSNLKPFERDISTEIYQAGSTPCNGVEGFNCYFPLQSYGFQPTNGVGYQPYRVVVLSFELLHAPATVCGPKKSTNLVKNKCVNFNFNGLTGTGVLTESNKKFLPFQQFGRDIADTTDAVRDPQTLEILDITPCSFGGVSVITPGTNTSNQVAVLYQDVNCTEVPVAIHADQLTPTWRVYSTGSNVFQTRAGCLIGAEHVNNSYECDIPIGAGICASYQTQTNSPRRARSVASQSIIAYTMSLGAENSVAYSNNSIAIPTNFTISVTTEILPVSMTKTSVDCTMYICGDSTECSNLLLQYGSFCTQLNRALTGIAVEQDKNTQEVFAQVKQIYKTPPIKDFGGFNFSQILPDPSKPSKRSFIEDLLFNKVTLADAGFIKQYGDCLGDIAARDLICAQKFNGLTVLPPLLTDEMIAQYCSALLAGTITSGWTFGAGAALQIPFAMQMAYRFNGIGVTQNVLYENQKLIANQFNSAIGKIQDSLSSTASALGKLQDVVNQNAQALNTLVKQLSSNFGAISSVLNDILSRLDKVEAEVQIDRLITGRLQSLQTYVTQQLIRAAEIRASANLAATKMSECVLGQSKRVDFCGKGYHLMSFPQCAPHGVVFLHVTYVPAQEKNFTTAPAICHDGKAHFPREGVFVSNGTHWFVTQRNFYEPQIITTDNTFVSGNCDVVIGIVNNTVYDPLQPELDSGGGGSDIDPYKEFGSSYQLLNFLPLDFFPDLNALVDTATALYEEELTGREHCSPHHTAIRQALVCWDELTKLIAWMSSNITSEQVRTIIVNHVNDTWGLKVRQSLWFHLSCLTFGQHTVQEFLVSFGVWIRTPAPYRPPNAPILSTLPEHTVIC

SEQ ID NO: 11600 - protein, 1301 aa, Artificial Sequence
  SARS-CoV-2/Guangdong/20SF028/2020__EPI_ISL_403936 spike protein (1-1147)(T874C_S1055C) WhcAg construct
MFVFLVLLPLVSSQCVNLTTRTQLPPAYTNSFTRGVYYPDKVFRSSVLYSTQDLFLPFFSNVTWFHAIHVSGTNGTKRFDNPVLPFNDGVYFASTEKSNIIRGWIFGTTLDSKTQSLLIVNNATNVVIKVCEFQFCNDPFLGVYYHKNNKSWMESEFRVYSSANNCTFEYVSQPFLMDLEGKQGNFKNLREFVFKNIDGYFKIYSKHTPINLVRDLPQGFSALEPLVDLPIGINITRFQTLLALHRSYLTPGDSSSGWTAGAAAYYVGYLQPRTFLLKYNENGTITDAVDCALDPLSETKCTLKSFTVEKGIYQTSNFRVQPTESIVRFPNITNLCPFGEVFNATRFASVYAWNRKRISNCVADYSVLYNSASFSTFKCYGVSPTKLNDLCFTNVYADSFVIRGDEVRQIAPGQTGKIADYNYKLPDDFTGCVIAWNSNNLDSKVGGNYNYLYRLFRKSNLKPFERDISTEIYQAGSTPCNGVEGFNCYFPLQSYGFQPTNGVGYQPYRVVVLSFELLHAPATVCGPKKSTNLVKNKCVNFNFNGLTGTGVLTESNKKFLPFQQFGRDIADTTDAVRDPQTLEILDITPCSFGGVSVITPGTNTSNQVAVLYQDVNCTEVPVAIHADQLTPTWRVYSTGSNVFQTRAGCLIGAEHVNNSYECDIPIGAGICASYQTQTNSPRRARSVASQSIIAYTMSLGAENSVAYSNNSIAIPTNFTISVTTEILPVSMTKTSVDCTMYICGDSTECSNLLLQYGSFCTQLNRALTGIAVEQDKNTQEVFAQVKQIYKTPPIKDFGGFNFSQILPDPSKPSKRSFIEDLLFNKVTLADAGFIKQYGDCLGDIAARDLICAQKFNGLTVLPPLLTDEMIAQYCSALLAGTITSGWTFGAGAALQIPFAMQMAYRFNGIGVTQNVLYENQKLIANQFNSAIGKIQDSLSSTASALGKLQDVVNQNAQALNTLVKQLSSNFGAISSVLNDILSRLDKVEAEVQIDRLITGRLQSLQTYVTQQLIRAAEIRASANLAATKMSECVLGQSKRVDFCGKGYHLMSFPQCAPHGVVFLHVTYVPAQEKNFTTAPAICHDGKAHFPREGVFVSNGTHWFVTQRNFYEPQIITTDNTFVSGNCDVVIGIVNNTVYDPLQPELDSGGGGSDIDPYKEFGSSYQLLNFLPLDFFPDLNALVDTATALYEEELTGREHCSPHHTAIRQALVCWDELTKLIAWMSSNITSEQVRTIIVNHVNDTWGLKVRQSLWFHLSCLTFGQHTVQEFLVSFGVWIRTPAPYRPPNAPILSTLPEHTVIC

SEQ ID NO: 11601 - protein, 1301 aa, Artificial Sequence
  SARS-CoV-2/Shenzhen/SZTH-001/2020__EPI_ISL_406592 spike protein (1-1147)(T874C_S1055C) WhcAg construct
MFVFLVLLPLVSSQCVNLTTRTQLPPAYTNSFTRGVYYPDKVFRSSVLHSTQDLFLPFFSNVTWFHAIHVSGTNGTKRFDNPVLPFNDGVYFASTEKSNIIRGWIFGTTLDSKTQSLLIVNNATNVVIKVCEFQFCNDPFLGVYYHKNNKSWMESEFRVYSSANNCTFEYVSQPFLMDLEGKQGNFKNLREFVFKNIDGYFKIYSKHTPINLVRDLPQGFSALEPLVDLPIGINITRFQTLLALHRSYLTPGDSSSGWTAGAAAYYVGYLQPRTFLLKYNENGTITDAVDCALDPLSETKCTLKSFTVEKGIYQTSNFRVQPTESIVRFPNITNLCPFGEVFNATRFASVYAWNRKRISNCVADYSVLYNSASFSTFKCYGVSPTKLNDLCFTNVYADSFVIRGDEVRQIAPGQTGKIADYNYKLPDDFTGCVIAWNSNNLDSKVGGNYNYLYRLFRKSNLKPFERDISTEIYQAGSTPCNGVEGFNCYFPLQSYGFQPTNGVGYQPYRVVVLSFELLHAPATVCGPKKSTNLVKNKCVNFNFNGLTGTGVLTESNKKFLPFQQFGRDIADTTDAVRDPQTLEILDITPCSFGGVSVITPGTNTSNQVAVLYQDVNCTEVPVAIHADQLTPTWRVYSTGSNVFQTRAGCLIGAEHVNNSYECDIPIGAGICASYQTQTNSPRRARSVASQSIIAYTMSLGAENSVAYSNNSIAIPTNFTISVTTEILPVSMTKTSVDCTMYICGDSTECSNLLLQYGSFCTQLNRALTGIAVEQDKNTQEVFAQVKQIYKTPPIKDFGGFNFSQILPDPSKPSKRSFIEDLLFNKVTLADAGFIKQYGDCLGDIAARDLICAQKFNGLTVLPPLLTDEMIAQYCSALLAGTITSGWTFGAGAALQIPFAMQMAYRFNGIGVTQNVLYENQKLIANQFNSAIGKIQDSLSSTASALGKLQDVVNQNAQALNTLVKQLSSNFGAISSVLNDILSRLDKVEAEVQIDRLITGRLQSLQTYVTQQLIRAAEIRASANLAATKMSECVLGQSKRVDFCGKGYHLMSFPQCAPHGVVFLHVTYVPAQEKNFTTAPAICHDGKAHFPREGVFVSNGTHWFVTQRNFYEPQIITTDNTFVSGNCDVLIGIVNNTVYDPLQPELDSGGGGSDIDPYKEFGSSYQLLNFLPLDFFPDLNALVDTATALYEEELTGREHCSPHHTAIRQALVCWDELTKLIAWMSSNITSEQVRTIIVNHVNDTWGLKVRQSLWFHLSCLTFGQHTVQEFLVSFGVWIRTPAPYRPPNAPILSTLPEHTVIC

SEQ ID NO: 11602 - protein, 1301 aa, Artificial Sequence
  SARS-CoV-2/Shenzhen/SZTH-004/2020__EPI_ISL_406595 spike protein (1-1147)(T874C_S1055C) WhcAg construct
MFVFLVLLPLVSSQCVNLTTRTQLPPAYTNSFTRGVYYPDKVFRSSVLHSTQDLFLPFFSNVTWFHAIHVSGTNGTKRFDNPVLPFNDGVYFASTEKSNIIRGWIFGTTLDSKTQSLLIVNNATNVVIKVCEFQFCNDPFLGVYYHKNNKSWMESEFRVYSSANNCTFEYVSQPFLMDLEGKQGNFKNLREFVFKNIDGYFKIYSKHTPINLVRDLPQGFSALEPLVDLPIGINITRFQTLLALHRSYLTPGDSSSGWTAGAAAYYVGYLQPRTFLLKYNENGTITDAVDCALDPLSETKCTLKSFTVEKGIYQTSNFRVQPTESIVRFPNITNLCPFGEVFNATRFASVYAWDRKRISNCVAYYSVLYNSASFSTFKCYGVSPTKLNDLCFTNVYADSFVIRGDEVRQIAPGQTGKIADYNYKLPDDFTGCVIAWNSNNLDSKVGGNYNYLYRLFRKSNLKPFERDISTEIYQAGSTPCNGVEGFNCYFPLQSYGFQPTNGVGYQPYRVVVLSFELLHAPATVCGPKKSTNLVKNKCVNFNFNGLTGTGVLTESNKKFLPFQQFGRDIADTTDAVRDPQTLEILDITPCSFGGVSVITPGTNTSNQVAVLYQDVNCTEVPVAIHADQLTPTWRVYSTGSNVFQTRAGCLIGAEHVNNSYECDIPIGAGICASYQTQTNSPRRARSVASQSIIAYTMSLGAENSVAYSNNSIAIPTNFTISVTTEILPVSMTKTSVDCTMYICGDSTECSNLLLQYGSFCTQLNRALTGIAVEQDKNTQEVFAQVKQIYKTPPIKDFGGFNFSQILPDPSKPSKRSFIEDLLFNKVTLADAGFIKQYGDCLGDIAARDLICAQKFNGLTVLPPLLTDEMIAQYCSALLAGTITSGWTFGAGAALQIPFAMQMAYRFNGIGVTQNVLYENQKLIANQFNSAIGKIQDSLSSTASALGKLQDVVNQNAQALNTLVKQLSSNFGAISSVLNDILSRLDKVEAEVQIDRLITGRLQSLQTYVTQQLIRAAEIRASANLAATKMSECVLGQSKRVDFCGKGYHLMSFPQCAPHGVVFLHVTYVPAQEKNFTTAPAICHDGKAHFPREGVFVSNGTHWFVTQRNFYEPQIITTDNTFVSGNCDVVIGIVNNTVYDPLQPELDSGGGGSDIDPYKEFGSSYQLLNFLPLDFFPDLNALVDTATALYEEELTGREHCSPHHTAIRQALVCWDELTKLIAWMSSNITSEQVRTIIVNHVNDTWGLKVRQSLWFHLSCLTFGQHTVQEFLVSFGVWIRTPAPYRPPNAPILSTLPEHTVIC

SEQ ID NO: 11603 - protein, 1301 aa, Artificial Sequence
  SARS-CoV-2/France/IDF0372/2020__EPI_ISL_406596 spike protein (1-1147)(T874C_S1055C) WhcAg construct
MFVFLVLLPLVSSQCVNLTTRTQLPPAYTNSFTRGVYYPDKVFRSSVLHSTQDLFLPFFSNVTWFHAIHVSGTNGTKRFDNPVLPFNDGVYFASTEKSNIIRGWIFGTTLDSKTQSLLIVNNATNVVIKVCEFQFCNDPFLGVYYHKNNKSWMESEFRVYSSANNCTFEYVSQPFLMDLEGKQGNFKNLREFVFKNIDGYFKIYSKHTPINLVRDLPQGFSALEPLVDLPIGINITRFQTLLALHRSYLTPGDSSSGWTAGAAAYYVGYLQPRTFLLKYNENGTITDAVDCALDPLSETKCTLKSFTVEKGIYQTSNFRVQPTESIVRFPNITNLCPFGEVFNATRFASVYAWNRKRISNCVADYSFLYNSASFSTFKCYGVSPTKLNDLCFTNVYADSFVIRGDEVRQIAPGQTGKIADYNYKLPDDFTGCVIAWNSNNLDSKVGGNYNYLYRLFRKSNLKPFERDISTEIYQAGSTPCNGVEGFNCYFPLQSYGFQPTNGVGYQPYRVVVLSFELLHAPATVCGPKKSTNLVKNKCVNFNFNGLTGTGVLTESNKKFLPFQQFGRDIADTTDAVRDPQTLEILDITPCSFGGVSVITPGTNTSNQVAVLYQDVNCTEVPVAIHADQLTPTWRVYSTGSNVFQTRAGCLIGAEHVNNSYECDIPIGAGICASYQTQTNSPRRARSVASQSIIAYTMSLGAENSVAYSNNSIAIPTNFTISVTTEILPVSMTKTSVDCTMYICGDSTECSNLLLQYGSFCTQLNRALTGIAVEQDKNTQEVFAQVKQIYKTPPIKDFGGFNFSQILPDPSKPSKRSFIEDLLFNKVTLADAGFIKQYGDCLGDIAARDLICAQKFNGLTVLPPLLTDEMIAQYCSALLAGTITSGWTFGAGAALQIPFAMQMAYRFNGIGVTQNVLYENQKLIANQFNSAIGKIQDSLSSTASALGKLQDVVNQNAQALNTLVKQLSSNFGAISSVLNDILSRLDKVEAEVQIDRLITGRLQSLQTYVTQQLIRAAEIRASANLAATKMSECVLGQSKRVDFCGKGYHLMSFPQCAPHGVVFLHVTYVPAQEKNFTTAPAICHDGKAHFPREGVFVSNGTHWFVTQRNFYEPQIITTDNTFVSGNCDVVIGIVNNTVYDPLQPELDSGGGGSDIDPYKEFGSSYQLLNFLPLDFFPDLNALVDTATALYEEELTGREHCSPHHTAIRQALVCWDELTKLIAWMSSNITSEQVRTIIVNHVNDTWGLKVRQSLWFHLSCLTFGQHTVQEFLVSFGVWIRTPAPYRPPNAPILSTLPEHTVIC

SEQ ID NO: 11604 - protein, 1301 aa, Artificial Sequence
  SARS-CoV-2/Australia/VIC01/2020__EPI_ISL_406844 spike protein (1-1147)(T874C_S1055C) WhcAg construct
MFVFLVLLPLVSSQCVNLTTRTQLPPAYTNSFTRGVYYPDKVFRSSVLHSTQDLFLPFFSNVTWFHAIHVSGTNGTKRFDNPVLPFNDGVYFASTEKSNIIRGWIFGTTLDSKTQSLLIVNNATNVVIKVCEFQFCNDPFLGVYYHKNNKSWMESEFRVYSSANNCTFEYVSQPFLMDLEGKQGNFKNLREFVFKNIDGYFKIYSKHTPINLVRDLPQGFSALEPLVDLPIGINITRFQTLLALHRRYLTPGDSSSGWTAGAAAYYVGYLQPRTFLLKYNENGTITDAVDCALDPLSETKCTLKSFTVEKGIYQTSNFRVQPTESIVRFPNITNLCPFGEVFNATRFASVYAWNRKRISNCVADYSVLYNSASFSTFKCYGVSPTKLNDLCFTNVYADSFVIRGDEVRQIAPGQTGKIADYNYKLPDDFTGCVIAWNSNNLDSKVGGNYNYLYRLFRKSNLKPFERDISTEIYQAGSTPCNGVEGFNCYFPLQSYGFQPTNGVGYQPYRVVVLSFELLHAPATVCGPKKSTNLVKNKCVNFNFNGLTGTGVLTESNKKFLPFQQFGRDIADTTDAVRDPQTLEILDITPCSFGGVSVITPGTNTSNQVAVLYQDVNCTEVPVAIHADQLTPTWRVYSTGSNVFQTRAGCLIGAEHVNNSYECDIPIGAGICASYQTQTNSPRRARSVASQSIIAYTMSLGAENSVAYSNNSIAIPTNFTISVTTEILPVSMTKTSVDCTMYICGDSTECSNLLLQYGSFCTQLNRALTGIAVEQDKNTQEVFAQVKQIYKTPPIKDFGGFNFSQILPDPSKPSKRSFIEDLLFNKVTLADAGFIKQYGDCLGDIAARDLICAQKFNGLTVLPPLLTDEMIAQYCSALLAGTITSGWTFGAGAALQIPFAMQMAYRFNGIGVTQNVLYENQKLIANQFNSAIGKIQDSLSSTASALGKLQDVVNQNAQALNTLVKQLSSNFGAISSVLNDILSRLDKVEAEVQIDRLITGRLQSLQTYVTQQLIRAAEIRASANLAATKMSECVLGQSKRVDFCGKGYHLMSFPQCAPHGVVFLHVTYVPAQEKNFTTAPAICHDGKAHFPREGVFVSNGTHWFVTQRNFYEPQIITTDNTFVSGNCDVVIGIVNNTVYDPLQPELDSGGGGSDIDPYKEFGSSYQLLNFLPLDFFPDLNALVDTATALYEEELTGREHCSPHHTAIRQALVCWDELTKLIAWMSSNITSEQVRTIIVNHVNDTWGLKVRQSLWFHLSCLTFGQHTVQEFLVSFGVWIRTPAPYRPPNAPILSTLPEHTVIC

SEQ ID NO: 11605 - protein, 1301 aa, Artificial Sequence
  SARS-CoV-2/Germany/BavPat1/2020__EPI_ISL_406862 spike protein (1-1147)(T874C_S1055C) WhcAg construct
MFVFLVLLPLVSSQCVNLTTRTQLPPAYTNSFTRGVYYPDKVFRSSVLHSTQDLFLPFFSNVTWFHAIHVSGTNGTKRFDNPVLPFNDGVYFASTEKSNIIRGWIFGTTLDSKTQSLLIVNNATNVVIKVCEFQFCNDPFLGVYYHKNNKSWMESEFRVYSSANNCTFEYVSQPFLMDLEGKQGNFKNLREFVFKNIDGYFKIYSKHTPINLVRDLPQGFSALEPLVDLPIGINITRFQTLLALHRSYLTPGDSSSGWTAGAAAYYVGYLQPRTFLLKYNENGTITDAVDCALDPLSETKCTLKSFTVEKGIYQTSNFRVQPTESIVRFPNITNLCPFGEVFNATRFASVYAWNRKRISNCVADYSVLYNSASFSTFKCYGVSPTKLNDLCFTNVYADSFVIRGDEVRQIAPGQTGKIADYNYKLPDDFTGCVIAWNSNNLDSKVGGNYNYLYRLFRKSNLKPFERDISTEIYQAGSTPCNGVEGFNCYFPLQSYGFQPTNGVGYQPYRVVVLSFELLHAPATVCGPKKSTNLVKNKCVNFNFNGLTGTGVLTESNKKFLPFQQFGRDIADTTDAVRDPQTLEILDITPCSFGGVSVITPGTNTSNQVAVLYQGVNCTEVPVAIHADQLTPTWRVYSTGSNVFQTRAGCLIGAEHVNNSYECDIPIGAGICASYQTQTNSPRRARSVASQSIIAYTMSLGAENSVAYSNNSIAIPTNFTISVTTEILPVSMTKTSVDCTMYICGDSTECSNLLLQYGSFCTQLNRALTGIAVEQDKNTQEVFAQVKQIYKTPPIKDFGGFNFSQILPDPSKPSKRSFIEDLLFNKVTLADAGFIKQYGDCLGDIAARDLICAQKFNGLTVLPPLLTDEMIAQYCSALLAGTITSGWTFGAGAALQIPFAMQMAYRFNGIGVTQNVLYENQKLIANQFNSAIGKIQDSLSSTASALGKLQDVVNQNAQALNTLVKQLSSNFGAISSVLNDILSRLDKVEAEVQIDRLITGRLQSLQTYVTQQLIRAAEIRASANLAATKMSECVLGQSKRVDFCGKGYHLMSFPQCAPHGVVFLHVTYVPAQEKNFTTAPAICHDGKAHFPREGVFVSNGTHWFVTQRNFYEPQIITTDNTFVSGNCDVVIGIVNNTVYDPLQPELDSGGGGSDIDPYKEFGSSYQLLNFLPLDFFPDLNALVDTATALYEEELTGREHCSPHHTAIRQALVCWDELTKLIAWMSSNITSEQVRTIIVNHVNDTWGLKVRQSLWFHLSCLTFGQHTVQEFLVSFGVWIRTPAPYRPPNAPILSTLPEHTVIC

SEQ ID NO: 11606 - protein, 1301 aa, Artificial Sequence
  SARS-CoV-2/Wuhan/HBCDC-HB-02/2020__EPI_ISL_412978 spike protein (1-1147)(T874C_S1055C) WhcAg construct
MFVFLVLLPLVSSQCVNLTTRTQLPPAYTNSFTRGVYYPDKVFRSSVLHSTQDLFLPFFSNVTWFHAIHVSGTNGTKRFDNPVLPFNDGVYFASTEKSNIIRGWIFGTTLDSKTQSLLIVNNATNVVIKVCEFQFCNDPFLGVYYHKNNKSWMESEFRVYSSANNCTFEYVSQPFLMDLEGKQGNFKNLREFVFKNIDGYFKIYSKHTPINLVRDLPQGFSALEPLVDLPIGINITRFQTLLALHRSYLTPGDSSSGWTAGAAAYYVGYLQPRTFLLKYNENGTITDAVDCALDPLSETKCTLKSFTVEKGIYQTSNFRVQPTESIVRFPNITNLCPFGEVFNATRFASVYAWNRKRISNCVADYSVLYNSASFSTFKCYGVSPTKLNDLCFTNVYADSFVIRGDEVRQIAPGQTGKIADYNYKLPDDFTGCVIAWNSNNLDSKVGGNYNYLYRLFRKSNLKPFERDISTEIYQAGSTPCNGVEGFNCYFPLQSYGFQPTNGVGYQPYRVVVLSFELLHAPATVCGPKKSTNLVKNKCVNFNFNGLTGTGVLTESNKKFLPFQQFGRDIADTTDAVRDPQTLEILDITPCSFGGVSVITPGTNTSNQVAVLYQDVNCTEVPVAIHADQLTPTWRVYSTGSNVFQTRAGCLIGAEHVNNSYECDIPIGAGICASYQTQTNSPRRARSVASQSIIAYTMSLGAENSVAYSNNSIAIPTNFTISVTTEILPVSMTKTSVDCTMYICGDSTECSNFLLQYGSFCTQLNRALTGIAVEQDKNTQEVFAQVKQIYKTPPIKDFGGFNFSQILPDPSKPSKRSFIEDLLFNKVTLADAGFIKQYGDCLGDIAARDLICAQKFNGLTVLPPLLTDEMIAQYCSALLAGTITSGWTFGAGAALQIPFAMQMAYRFNGIGVTQNVLYENQKLIANQFNSAIGKIQDSLSSTASALGKLQDVVNQNAQALNTLVKQLSSNFGAISSVLNDILSRLDKVEAEVQIDRLITGRLQSLQTYVTQQLIRAAEIRASANLAATKMSECVLGQSKRVDFCGKGYHLMSFPQCAPHGVVFLHVTYVPAQEKNFTTAPAICHDGKAHFPREGVFVSNGTHWFVTQRNFYEPQIITTDNTFVSGNCDVVIGIVNNTVYDPLQPELDSGGGGSDIDPYKEFGSSYQLLNFLPLDFFPDLNALVDTATALYEEELTGREHCSPHHTAIRQALVCWDELTKLIAWMSSNITSEQVRTIIVNHVNDTWGLKVRQSLWFHLSCLTFGQHTVQEFLVSFGVWIRTPAPYRPPNAPILSTLPEHTVIC

SEQ ID NO: 11607 - protein, 1301 aa, Artificial Sequence
  SARS-CoV-2/Australia/QLD02/2020__EPI_ISL_407896 spike protein (1-1147)(T874C_S1055C) WhcAg construct
MFVFLVLLPLVSSQCVNLTTRTQLPPAYTNSFTRGVYYPDKVFRSSVLHSTQDLFLPFFSNVTWFHAIHVSGTNGTKRFDNPVLPFNDGVYFASTEKSNIIRGWIFGTTLDSKTQSLLIVNNATNVVIKVCEFQFCNDPFLGVYYHKNNKSWMESEFRVYSSANNCTFEYVSQPFLMDLEGKQGNFKNLREFVFKNIDGYFKIYSKHTPINLVRDLPQGFSALEPLVDLPIGINITRFQTLLALHRSYLTPGDSSSGWTAGAAAYYVGYLQPRTFLLKYNENGTITDAVDCALDPLSETKCTLKSFTVEKGIYQTSNFRVQPTESIVRFPNITNLCPFGEVFNATRFASVYAWNRKRISNCVADYSVLYNSASFSTFKCYGVSPTKLNDLCFTNVYADSFVIRGDEVRQIAPGQTGKIADYNYKLPDDFTGCVIAWNSNNLDSKVGGNYNYLYRLFRKSNLKPFERDISTEIYQAGSTPCNGVEGFNCYFPLQSYGFQPTNGVGYQPYRVVVLSFELLHAPATVCGPKKSTNLVKNKCVNFNFNGLTGTGVLTESNKKFLPFQQFGRDIADTTDAVRDPQTLEILDITPCSFGGVSVITPGTNTSNQVAVLYQDVNCTEVPVAIHADQLTPTWRVYSTGSNVFQTRAGCLIGAEHVNNSYECDIPIGAGICASYQTQTNSPRRARSVASQSIIAYTMSLGAENSVAYSNNSIAIPTNFTISVTTEILPVSMTKTSVDCTMYICGDSTECSNLLLQYGSFCTQLNRALTGIAVEQDKNTQEVFAQVKQIYKTPPIKDFGGFNFSQILPDPSKPSKRSFIEDLLFNKVTLADAGFIKQYGDCLGDIAARDLICAQKFNGLTVLPPLLTDEMIAQYCSALLAGTITSGWTFGAGAALQIPFAMQMAYRFNGIGVTQNVLYENQKLIANQFNSAIGKIQDSLSSTASALGKLQDVVNQNAQALNTLVKQLSSNFGAISSVLNDILSRLDKVEAEVQIDRLITGRLQSLQTYVTQQLIRAAEIRASANLAATKMSECVLGQSKRVDFCGKGYHLMSFPQCAPHGVVFLHVTYVPAQEKNFTTAPAICHDGKAHFPREGVFVSNGTHWFVTQRNFYEPQIITTDNTFVSGNCDVVIGIVNNTVYDPLQLELDSGGGGSDIDPYKEFGSSYQLLNFLPLDFFPDLNALVDTATALYEEELTGREHCSPHHTAIRQALVCWDELTKLIAWMSSNITSEQVRTIIVNHVNDTWGLKVRQSLWFHLSCLTFGQHTVQEFLVSFGVWIRTPAPYRPPNAPILSTLPEHTVIC

SEQ ID NO: 11608 - protein, 1301 aa, Artificial Sequence
  SARS-CoV-2/India/1-31/2020__EPI_ISL_413523 spike protein (1-1147)(T874C_S1055C) WhcAg construct
MFVFLVLLPLVSSQCVNLTTRTQLPPAYTNSFTRGVYYPDKVFRSSVLHSTQDLFLPFFSNVTWFHAIHVSGTNGTKRFDNPVLPFNDGVYFASTEKSNIIRGWIFGTTLDSKTQSLLIVNNATNVVIKVCEFQFCNDPFLGVYYHKNNKSWMESEFRVYSSANNCTFEYVSQPFLMDLEGKQGNFKNLREFVFKNIDGYFKIYSKHTPINLVRDLPQGFSALEPLVDLPIGINITRFQTLLALHRSYLTPGDSSSGWTAGAAAYYVGYLQPRTFLLKYNENGTITDAVDCALDPLSETKCTLKSFTVEKGIYQTSNFRVQPTESIVRFPNITNLCPFGEVFNATRFASVYAWNRKRISNCVADYSVLYNSASFSTFKCYGVSPTKLNDLCFTNVYADSFVIRGDEVRQIAPGQTGKIADYNYKLPDDFTGCVIAWNSNNLDSKVGGNYNYLYRLFRKSNLKPFERDISTEIYQAGSTPCNGVEGFNCYFPLQSYGFQPTNGVGYQPYRVVVLSFELLHAPATVCGPKKSTNLVKNKCVNFNFNGLTGTGVLTESNKKFLPFQQFGRDIADTTDAVRDPQTLEILDITPCSFGGVSVITPGTNTSNQVAVLYQDVNCTEVPVAIHADQLTPTWRVYSTGSNVFQTRAGCLIGAEHVNNSYECDIPIGAGICASYQTQTNSPRRARSVASQSIIAYTMSLGAENSVAYSNNSIAIPTNFTISVTTEILPVSMTKTSVDCTMYICGDSTECSNLLLQYGSFCTQLNRALTGIAVEQDKNTQEVFAQVKQIYKTPPIKDFGGFNFSQILPDPSKPSKRSFIEDLLFNKVTLADAGFIKQYGDCLGDIAARDLICAQKFNGLTVLPPLLTDEMIAQYCSALLAGTITSGWTFGAGAALQIPFAMQMAYRFNGIGVTQNVLYENQKLIANQFNSVIGKIQDSLSSTASALGKLQDVVNQNAQALNTLVKQLSSNFGAISSVLNDILSRLDKVEAEVQIDRLITGRLQSLQTYVTQQLIRAAEIRASANLAATKMSECVLGQSKRVDFCGKGYHLMSFPQCAPHGVVFLHVTYVPAQEKNFTTAPAICHDGKAHFPREGVFVSNGTHWFVTQRNFYEPQIITTDNTFVSGNCDVVIGIVNNTVYDPLQPELDSGGGGSDIDPYKEFGSSYQLLNFLPLDFFPDLNALVDTATALYEEELTGREHCSPHHTAIRQALVCWDELTKLIAWMSSNITSEQVRTIIVNHVNDTWGLKVRQSLWFHLSCLTFGQHTVQEFLVSFGVWIRTPAPYRPPNAPILSTLPEHTVIC

SEQ ID NO: 11609 - protein, 1301 aa, Artificial Sequence
  SARS-CoV-2/Guangdong/GD2020087-P0008/2020__EPI_ISL_413863 spike protein (1-1147)(T874C_S1055C) WhcAg construct
MFVFLVLLPLVSSQCVNLTTRTQLPPAYTNSFTRGVYYPDKVFRSSVLHSTQDLFLPFFSNVTWFHAIHVSGTNGTKRFDNPVLPFNDGVYFASTEKSNIIRGWIFGTTLDSKTQSLLIVNNATNVVIKVCEFQFCNDPFLGVYYHKNNKSWMESEFRVYSSANNCTFEYVSQPFLMDLEGKQGNFKNLREFVFKNIDGYFKIYSKHTPINLVRDLPQGFSALEPLVDLPIGINITRFQTLLALHRSYLTPGDSSSGWTAGAAAYYVGYLQPRTFLLKYNENGTITDAVDCALDPLSETKCTLKSFTVEKGIYQTSNFRVQPTESIVRFPNITNLCPFGEVFNATRFASVYAWNRKRISNCVADYSVLYNSASFSTFKCYGVSPTKLNDLCFTNVYADSFVIRGDEVREIAPGQTGKIADYNYKLPDDFTGCVIAWNSNNLDSKVGGNYNYLYRLFRKSNLKPFERDISTEIYQAGSTPCNGVEGFNCYFPLQSYGFQPTNGVGYQPYRVVVLSFELLHAPATVCGPKKSTNLVKNKCVNFNFNGLTGTGVLTESNKKFLPFQQFGRDIADTTDAVRDPQTLEILDITPCSFGGVSVITPGTNTSNQVAVLYQDVNCTEVPVAIHADQLTPTWRVYSTGSNVFQTRAGCLIGAEHVNNSYECDIPIGAGICASYQTQTNSPRRARSVASQSIIAYTMSLGAENSVAYSNNSIAIPTNFTISVTTEILPVSMTKTSVDCTMYICGDSTECSNLLLQYGSFCTQLNRALTGIAVEQDKNTQEVFAQVKQIYKTPPIKDFGGFNFSQILPDPSKPSKRSFIEDLLFNKVTLADAGFIKQYGDCLGDIAARDLICAQKFNGLTVLPPLLTDEMIAQYCSALLAGTITSGWTFGAGAALQIPFAMQMAYRFNGIGVTQNVLYENQKLIANQFNSAIGKIQDSLSSTASALGKLQDVVNQNAQALNTLVKQLSSNFGAISSVLNDILSRLDKVEAEVQIDRLITGRLQSLQTYVTQQLIRAAEIRASANLAATKMSECVLGQSKRVDFCGKGYHLMSFPQCAPHGVVFLHVTYVPAQEKNFTTAPAICHDGKAHFPREGVFVSNGTHWFVTQRNFYEPQIITTDNTFVSGNCDVVIGIVNNTVYDPLQPELDSGGGGSDIDPYKEFGSSYQLLNFLPLDFFPDLNALVDTATALYEEELTGREHCSPHHTAIRQALVCWDELTKLIAWMSSNITSEQVRTIIVNHVNDTWGLKVRQSLWFHLSCLTFGQHTVQEFLVSFGVWIRTPAPYRPPNAPILSTLPEHTVIC

SEQ ID NO: 11610 - protein, 1301 aa, Artificial Sequence
  SARS-CoV-2/Sweden/01/2020__EPI_ISL_411951 spike protein (1-1147)(T874C_S1055C) WhcAg construct
MFVFLVLLPLVSSQCVNLTTRTQLPPAYTNSFTRGVYYPDKVFRSSVLHSTQDLFLPFFSNVTWFHAIHVSGTNGTKRFDNPVLPFNDGVYFASTEKSNIIRGWIFGTTLDSKTQSLLIVNNATNVVIKVCEFQFCNDPFLGVYYHKNNKSWMESEFRVYSSANNCTFEYVSQPFLMDLEGKQGNFKNLREFVFKNIDGYFKIYSKHTPINLVRDLPQGFSALEPLVDLPIGINITRFQTLLALHRSYLTPGDSSSGWTAGAAAYYVGYLQPRTFLLKYNENGTITDAVDCALDPLSETKCTLKSFTVEKGIYQTSNFRVQPTESIVRFPNITNLCPFGEVFNATRFASVYAWNRKRISNCVADYSVLYNSASFSTFKCYGVSPTKLNDLCFTNVYADSFVIRGDEVRQIAPGQTGKIADYNYKLPDDFTGCVIAWNSNNLDSKVGGNYNYLYRLFRKSNLKPFERDISTEIYQAGSTPCNGVEGFNCYFPLQSYGFQPTNGVGYQPYRVVVLSFELLHAPATVCGPKKSTNLVKNKCVNFNFNGLTGTGVLTESNKKFLPFQQFGRDIADTTDAVRDPQTLEILDITPCSFGGVSVITPGTNTSNQVAVLYQDVNCTEVPVAIHADQLTPTWRVYSTGSNVFQTRAGCLIGAEHVNNSYECDIPIGAGICASYQTQTNSPRRARSVASQSIIAYTMSLGAENSVAYSNNSIAIPTNFTISVTTEILPVSMTKTSVDCTMYICGDSTECSNLLLQYGSFCTQLNRALTGIAVEQDKNTQEVFAQVKQIYKTPPIKDCGGFNFSQILPDPSKPSKRSFIEDLLFNKVTLADAGFIKQYGDCLGDIAARDLICAQKFNGLTVLPPLLTDEMIAQYCSALLAGTITSGWTFGAGAALQIPFAMQMAYRFNGIGVTQNVLYENQKLIANQFNSAIGKIQDSLSSTASALGKLQDVVNQNAQALNTLVKQLSSNFGAISSVLNDILSRLDKVEAEVQIDRLITGRLQSLQTYVTQQLIRAAEIRASANLAATKMSECVLGQSKRVDFCGKGYHLMSFPQCAPHGVVFLHVTYVPAQEKNFTTAPAICHDGKAHFPREGVFVSNGTHWFVTQRNFYEPQIITTDNTFVSGNCDVVIGIVNNTVYDPLQPELDSGGGGSDIDPYKEFGSSYQLLNFLPLDFFPDLNALVDTATALYEEELTGREHCSPHHTAIRQALVCWDELTKLIAWMSSNITSEQVRTIIVNHVNDTWGLKVRQSLWFHLSCLTFGQHTVQEFLVSFGVWIRTPAPYRPPNAPILSTLPEHTVIC

SEQ ID NO: 11611 - protein, 1301 aa, Artificial Sequence
  SARS-CoV-2/Tianmen/HBCDC-HB-07/2020__EPI_ISL_412983 spike protein (1-1147)(T874C_S1055C) WhcAg construct
MFVFLVLLPLVSSQCVNLTTRTQLPPAYTNSFTRGVYYPDKVFRSSVLHSTQDLFLPFFSNVTWFHAIHVSGTNGTKRFDNPVLPFNDGVYFASTEKSNIIRGWIFGTTLDSKTQSLLIVNNATNVVIKVCEFQFCNDPFLGVYYHKNNKSWMESEFRVYSSANNCTFEYVSQPFLMDLEGKQGNFKNLREFVFKNIDGYFKIYSKHTPINLVRDLPQGFSALEPLVDLPIGINITRFQTLLALHRSYLTPGDSSSGWTAGAAAYYVGYLQPRTFLLKYNENGTITDAVDCALDPLSETKCTLKSFTVEKGIYQTSNFRVQPTESIVRFPNITNLCPFGEVFNATRFASVYAWNRKRISNCVADYSVLYNSASFSTFKCYGVSPTKLNDLCFTNVYADSFVIRGDEVRQIAPGQTGKIADYNYKLPDDFTGCVIAWNSNNLDSKVGGNYNYLYRLFRKSNLKPFERDISTEIYQAGSTPCNGVEGFNCYFPLQSYGFQPTNGVGYQPYRVVVLSFELLHAPATVCGPKKSTNLVKNKCVNFNFNGLTGTGVLTESNKKFLPFQQFGRDIADTTDAVRDPQTLEILDITPCSFGGVSVITPGTNTSNQVAVLYQDLNCTEVPVAIHADQLTPTWRVYSTGSNVFQTRAGCLIGAEHVNNSYECDIPIGAGICASYQTQTNSPRRARSVASQSIIAYTMSLGAENSVAYSNNSIAIPTNFTISVTTEILPVSMTKTSVDCTMYICGDSTECSNLLLQYGSFCTQLNRALTGIAVEQDKNTQEVFAQVKQIYKTPPIKDFGGFNFSQILPDPSKPSKRSFIEDLLFNKVTLADAGFIKQYGDCLGDIAARDLICAQKFNGLTVLPPLLTDEMIAQYCSALLAGTITSGWTFGAGAALQIPFAMQMAYRFNGIGVTQNVLYENQKLIANQFNSAIGKIQDSLSSTASALGKLQDVVNQNAQALNTLVKQLSSNFGAISSVLNDILSRLDKVEAEVQIDRLITGRLQSLQTYVTQQLIRAAEIRASANLAATKMSECVLGQSKRVDFCGKGYHLMSFPQCAPHGVVFLHVTYVPAQEKNFTTAPAICHDGKAHFPREGVFVSNGTHWFVTQRNFYEPQIITTDNTFVSGNCDVVIGIVNNTVYDPLQPELDSGGGGSDIDPYKEFGSSYQLLNFLPLDFFPDLNALVDTATALYEEELTGREHCSPHHTAIRQALVCWDELTKLIAWMSSNITSEQVRTIIVNHVNDTWGLKVRQSLWFHLSCLTFGQHTVQEFLVSFGVWIRTPAPYRPPNAPILSTLPEHTVIC

SEQ ID NO: 11612 - protein, 1301 aa, Artificial Sequence
  SARS-CoV-2/Hong Kong/case42_VM20002493/2020__EPI_ISL_414527 spike protein (1-1147)(T874C_S1055C) WhcAg construct
MFVFLVLLPLVSSQCVNLTTRTQLPPAYTNSFTRGVYYPDKVFRSSVLHSTQDLFLPFFSNVTWFHAIHVSGTNGTKRFDNPVLPFNDGVYFASTEKSNIIRGWIFGTTLDSKTQSLLIVNNATNVVIKVCEFQFCNDPFLGVYYHKNNKSWMESEFRVYSSANNCTFEYVSQPFLMDLEGKQGNFKNLREFVFKNIDGYFKIYSKHTPINLVRDLPQGFSALEPLVDLPIGINITRFQTLLALHRSYLTPGDSSSGWTAGAAAYYVGYLQPRTFLLKYNENGTITDAVDCALDPLSETKCTLKSFTVEKGIYQTSNFRVQPTESIVRFPNITNLCPFGEVFNATRFASVYAWNRKRISNCVADYSVLYNSASFSTFKCYGVSPTKLNDLCFTNVYADSFVIRGDEVRQIAPGQTGKIADYNYKLPDDFTGCVIAWNSNNLDSKVGGNYNYLYRLFRKSNLKPFERDISTEIYQAGSTPCNGVEGFNCYFPLQSYGFQPTNGVGYQPYRVVVLSFELLHAPATVCGPKKSTNLVKNKCVNFNFNGLTGTGVLTESNKKFLPFQQFGRDIADTTDAVRDPQTLEILDITPCSFGGVSVITPGTNTSNQVAVLYQDVNCTEVPVAIHADQLTPTWRVYSTGSNVFQTRAGCLIGAEHVNNSYECDIPIGAGICASYQTQTNSPRRARSVASQSIIAYTMSLGAENSVAYSNNSIAIPTNFAISVTTEILPVSMTKTSVDCTMYICGDSTECSNLLLQYGSFCTQLNRALTGIAVEQDKNTQEVFAQVKQIYKTPPIKDFGGFNFSQILPDPSKPSKRSFIEDLLFNKVTLADAGFIKQYGDCLGDIAARDLICAQKFNGLTVLPPLLTDEMIAQYCSALLAGTITSGWTFGAGAALQIPFAMQMAYRFNGIGVTQNVLYENQKLIANQFNSAIGKIQDSLSSTASALGKLQDVVNQNAQALNTLVKQLSSNFGAISSVLNDILSRLDKVEAEVQIDRLITGRLQSLQTYVTQQLIRAAEIRASANLAATKMSECVLGQSKRVDFCGKGYHLMSFPQCAPHGVVFLHVTYVPAQEKNFTTAPAICHDGKAHFPREGVFVSNGTHWFVTQRNFYEPQIITTDNTFVSGNCDVVIGIVNNTVYDPLQPELDSGGGGSDIDPYKEFGSSYQLLNFLPLDFFPDLNALVDTATALYEEELTGREHCSPHHTAIRQALVCWDELTKLIAWMSSNITSEQVRTIIVNHVNDTWGLKVRQSLWFHLSCLTFGQHTVQEFLVSFGVWIRTPAPYRPPNAPILSTLPEHTVIC

SEQ ID NO: 11613 - protein, 1301 aa, Artificial Sequence
  SARS-CoV-2/USA/CruiseA-23/2020__EPI_ISL_414482 spike protein (1-1147)(T874C_S1055C) WhcAg construct
MFVFLVLLPLVSSQCVNLTTRTQLPPAYTNSFTRGVYYPDKVFRSSVLHSTQDLFLPFFSNVTWFHAIHVSGTNGTKRFDNPVLPFNDGVYFASTEKSNIIRGWIFGTTLDSKTQSLLIVNNATNVVIKVCEFQFCNDPFLGVYYHKNNKSWMESEFRVYSSANNCTFEYVSQPFLMDLEVKQGNFKNLREFVFKNIDGYFKIYSKHTPINLVRDLPQGFSALEPLVDLPIGINITRFQTLLALHRSYLTPGDSSSGWTAGAAAYYVGYLQPRTFLLKYNENGTITDAVDCALDPLSETKCTLKSFTVEKGIYQTSNFRVQPTESIVRFPNITNLCPFGEVFNATRFASVYAWNRKRISNCVADYSVLYNSASFSTFKCYGVSPTKLNDLCFTNVYADSFVIRGDEVRQIAPGQTGKIADYNYKLPDDFTGCVIAWNSNNLDSKVGGNYNYLYRLFRKSNLKPFERDISTEIYQAGSTPCNGVEGFNCYFPLQSYGFQPTNGVGYQPYRVVVLSFELLHAPATVCGPKKSTNLVKNKCVNFNFNGLTGTGVLTESNKKFLPFQQFGRDIADTTDAVRDPQTLEILDITPCSFGGVSVITPGTNTSNQVAVLYQDVNCTEVPVAIHADQLTPTWRVYSTGSNVFQTRAGCLIGAEHVNNSYECDIPIGAGICASYQTQTNSPRRARSVASQSIIAYTMSLGAENSVAYSNNSIAIPTNFTISVTTEILPVSMTKTSVDCTMYICGDSTECSNLLLQYGSFCTQLNRALTGIAVEQDKNTQEVFAQVKQIYKTPPIKDFGGFNFSQILPDPSKPSKRSFIEDLLFNKVTLADAGFIKQYGDCLGDIAARDLICAQKFNGLTVLPPLLTDEMIAQYCSALLAGTITSGWTFGAGAALQIPFAMQMAYRFNGIGVTQNVLYENQKLIANQFNSAIGKIQDSLSSTASALGKLQDVVNQNAQALNTLVKQLSSNFGAISSVLNDILSRLDKVEAEVQIDRLITGRLQSLQTYVTQQLIRAAEIRASANLAATKMSECVLGQSKRVDFCGKGYHLMSFPQCAPHGVVFLHVTYVPAQEKNFTTAPAICHDGKAHFPREGVFVSNGTHWFVTQRNFYEPQIITTDNTFVSGNCDVVIGIVNNTVYDPLQPELDSGGGGSDIDPYKEFGSSYQLLNFLPLDFFPDLNALVDTATALYEEELTGREHCSPHHTAIRQALVCWDELTKLIAWMSSNITSEQVRTIIVNHVNDTWGLKVRQSLWFHLSCLTFGQHTVQEFLVSFGVWIRTPAPYRPPNAPILSTLPEHTVIC

SEQ ID NO: 11614 - protein, 1301 aa, Artificial Sequence
  SARS-CoV-2/Hong Kong/case85_VM20002868/2020__EPI_ISL_414519 spike protein (1-1147)(T874C_S1055C) WhcAg construct
MFVFLVLVPLVSSQCVNLTTRTQLPPAYTNSFTRGVYYPDKVFRSSVLHSTQDLFLPFFSNVTWFHAIHVSGTNGTKRFDNPVLPFNDGVYFASTEKSNIIRGWIFGTTLDSKTQSLLIVNNATNVVIKVCEFQFCNDPFLGVYYHKNNKSWMESEFRVYSSANNCTFEYVSQPFLMDLEGKQGNFKNLREFVFKNIDGYFKIYSKHTPINLVRDLPQGFSALEPLVDLPIGINITRFQTLLALHRSYLTPGDSSSGWTAGAAAYYVGYLQPRTFLLKYNENGTITDAVDCALDPLSETKCTLKSFTVEKGIYQTSNFRVQPTESIVRFPNITNLCPFGEVFNATRFASVYAWNRKRISNCVADYSVLYNSASFSTFKCYGVSPTKLNDLCFTNVYADSFVIRGDEVRQIAPGQTGKIADYNYKLPDDFTGCVIAWNSNNLDSKVGGNYNYLYRLFRKSNLKPFERDISTEIYQAGSTPCNGVEGFNCYFPLQSYGFQPTNGVGYQPYRVVVLSFELLHAPATVCGPKKSTNLVKNKCVNFNFNGLTGTGVLTESNKKFLPFQQFGRDIADTTDAVRDPQTLEILDITPCSFGGVSVITPGTNTSNQVAVLYQDVNCTEVPVAIHADQLTPTWRVYSTGSNVFQTRAGCLIGAEHVNNSYECDIPIGAGICASYQTQTNSPRRARSVASQSIIAYTMSLGAENSVAYSNNSIAIPTNFTISVTTEILPVSMTKTSVDCTMYICGDSTECSNLLLQYGSFCTQLNRALTGIAVEQDKNTQEVFAQVKQIYKTPPIKDFGGFNFSQILPDPSKPSKRSFIEDLLFNKVTLADAGFIKQYGDCLGDIAARDLICAQKFNGLTVLPPLLTDEMIAQYCSALLAGTITSGWTFGAGAALQIPFAMQMAYRFNGIGVTQNVLYENQKLIANQFNSAIGKIQDSLSSTASALGKLQDVVNQNAQALNTLVKQLSSNFGAISSVLNDILSRLDKVEAEVQIDRLITGRLQSLQTYVTQQLIRAAEIRASANLAATKMSECVLGQSKRVDFCGKGYHLMSFPQCAPHGVVFLHVTYVPAQEKNFTTAPAICHDGKAHFPREGVFVSNGTHWFVTQRNFYEPQIITTDNTFVSGNCDVVIGIVNNTVYDPLQPELDSGGGGSDIDPYKEFGSSYQLLNFLPLDFFPDLNALVDTATALYEEELTGREHCSPHHTAIRQALVCWDELTKLIAWMSSNITSEQVRTIIVNHVNDTWGLKVRQSLWFHLSCLTFGQHTVQEFLVSFGVWIRTPAPYRPPNAPILSTLPEHTVIC

SEQ ID NO: 11615 - protein, 1301 aa, Artificial Sequence; identical to SEQ ID NO: 11605
  SARS-CoV-2/England/200990660/2020__EPI_ISL_414523 spike protein (1-1147)(T874C_S1055C) WhcAg construct

SEQ ID NO: 11616 - protein, 1301 aa, Artificial Sequence
  SARS-CoV-2/Australia/NSW09/2020__EPI_ISL_413595 spike protein (1-1147)(T874C_S1055C) WhcAg construct
MFVFLVLLPLVSSQCVNLTTRTQLPPAYTNSFTRGVYYPDKVFRSSVLHSTQDLFLPFFSNVTWFHAIHVSGTNGTKRFDNPVLPFNDGVYFASTEKSNIIRGWIFGTTLDSKTQSLLIVNNATNVVIKVCEFQFCNDPFLGVYYHKNNKSWMESEFRVYSSANNCTFEYVSQPFLMDLEGKQGNFKNLREFVFKNIDGYFKIYSKHTPINLVRDLPQGFSALEPLVDLPIGINITRFQTLLALHRSYLTPGDSSSGWTAGAAAYYVGYLQPRTFLLKYNENGTITDAVDCALDPLSETKCTLKSFTVEKGIYQTSNFRVQPTESIVRFPNITNLCPFGEVFNATRFASVYAWNRKRISNCVADYSVLYNSASFSTFKCYGVSPTKLNDLCFTNVYADSFVIRGDEVRQIAPGQTGKIADYNYKLPDDFTGCVIAWNSNNLDSKVGGNYNYLYRLFRKSNLKPFERDISTEIYQAGSTPCNGVEGFNCYFPLQSYGFQPTNGVGYQPYRVVVLSFELLHAPATVCGPKKSTNLVKNKCVNFNFNGLTGTGVLTESNKKFLPFQQFGRDIADTTDAVRDPQTLEILDITPCSFGGVSVITPGTNTSNQVAVLYQDVNCTEVPVAIHADQLTPTWRVYSTGSNVFQTRAGCLIGAEHVNNSYECDIPIGAGICASYQTQTNSPRRARSVASQSIIAYTMSLGAENSVAYSNNSIAIPTNFTISVTTEILPVSMTKTSVDCTMYICGDSTECSNLLLQYGSFCTQLNRALTGIAVEQDKNTQEVFAQVKQIYKTPPIKDFGGFNFSQILPDPSKPSKRSFIEDLLFNKVTLADAGFIKQYGDCLGDIAARDLICAQKFNGLTVLPPLLTDEMIAQYCSALLAGTITSGWTFGAGAALQIPFAMQMAYRFNGIGVTQNVLYENQKLIANQFNSAIGKIQDSLSFTASALGKLQDVVNQNAQALNTLVKQLSSNFGAISSVLNDILSRLDKVEAEVQIDRLITGRLQSLQTYVTQQLIRAAEIRASANLAATKMSECVLGQSKRVDFCGKGYHLMSFPQCAPHGVVFLHVTYVPAQEKNFTTAPAICHDGKAHFPREGVFVSNGTHWFVTQRNFYEPQIITTDNTFVSGNCDVVIGIVNNTVYDPLQPELDSGGGGSDIDPYKEFGSSYQLLNFLPLDFFPDLNALVDTATALYEEELTGREHCSPHHTAIRQALVCWDELTKLIAWMSSNITSEQVRTIIVNHVNDTWGLKVRQSLWFHLSCLTFGQHTVQEFLVSFGVWIRTPAPYRPPNAPILSTLPEHTVIC

SEQ ID NO: 11617 - protein, 1301 aa, Artificial Sequence; identical to SEQ ID NO: 11597
  SARS-CoV-2/Australia/NSW10/2020__EPI_ISL_413596 spike protein (1-1147)(T874C_S1055C) WhcAg construct

SEQ ID NO: 11618 - protein, 1301 aa, Artificial Sequence
  SARS-CoV-2/Switzerland/1000477797/2020__EPI_ISL_413023 spike protein (1-1147)(T874C_S1055C) WhcAg construct
MFVFLVLLPLVSSQCVNLTTRTQLPPAYTNSFTRGVYYPDKVFRSSVLHSTQDLFLPFFSNVTWFHAIHVSGTNGTKRFDNPVLPFNDGVYFASTEKSNIIRGWIFGTTLDSKTQSLLIVNNATNVVIKVCEFQFCNDPFLGVYYHKNNKSWMESEFRVYSSANNCTFEYVSQPFLMDLEGKQGNFKNLREFVFKNIDGYFNIYSKHTPINLVRDLPQGFSALEPLVDLPIGINITRFQTLLALHRSYLTPGDSSSGWTAGAAAYYVGYLQPRTFLLKYNENGTITDAVDCALDPLSETKCTLKSFTVEKGIYQTSNFRVQPTESIVRFPNITNLCPFGEVFNATRFASVYAWNRKRISNCVADYSVLYNSASFSTFKCYGVSPTKLNDLCFTNVYADSFVIRGDEVRQIAPGQTGKIADYNYKLPDDFTGCVIAWNSNNLDSKVGGNYNYLYRLFRKSNLKPFERDISTEIYQAGSTPCNGVEGFNCYFPLQSYGFQPTNGVGYQPYRVVVLSFELLHAPATVCGPKKSTNLVKNKCVNFNFNGLTGTGVLTESNKKFLPFQQFGRDIADTTDAVRDPQTLEILDITPCSFGGVSVITPGTNTSNQVAVLYQGVNCTEVPVAIHADQLTPTWRVYSTGSNVFQTRAGCLIGAEHVNNSYECDIPIGAGICASYQTQTNSPRRARSVASQSIIAYTMSLGAENSVAYSNNSIAIPTNFTISVTTEILPVSMTKTSVDCTMYICGDSTECSNLLLQYGSFCTQLNRALTGIAVEQDKNTQEVFAQVKQIYKTPPIKDFGGFNFSQILPDPSKPSKRSFIEDLLFNKVTLADAGFIKQYGDCLGDIAARDLICAQKFNGLTVLPPLLTDEMIAQYCSALLAGTITSGWTFGAGAALQIPFAMQMAYRFNGIGVTQNVLYENQKLIANQFNSAIGKIQDSLSSTASALGKLQDVVNQNAQALNTLVKQLSSNFGAISSVLNDILSRLDKVEAEVQIDRLITGRLQSLQTYVTQQLIRAAEIRASANLAATKMSECVLGQSKRVDFCGKGYHLMSFPQCAPHGVVFLHVTYVPAQEKNFTTAPAICHDGKAHFPREGVFVSNGTHWFVTQRNFYEPQIITTDNTFVSGNCDVVIGIVNNTVYDPLQPELDSGGGGSDIDPYKEFGSSYQLLNFLPLDFFPDLNALVDTATALYEEELTGREHCSPHHTAIRQALVCWDELTKLIAWMSSNITSEQVRTIIVNHVNDTWGLKVRQSLWFHLSCLTFGQHTVQEFLVSFGVWIRTPAPYRPPNAPILSTLPEHTVIC

SEQ ID NO: 11619 - protein, 1301 aa, Artificial Sequence
  SARS-CoV-2/Belgium/BA-02291/2020__EPI_ISL_415159 spike protein (1-1147)(T874C_S1055C) WhcAg construct
MFVFLVLLPLVSSQCVNLTTRTQLPPAYTNSFTRGVYYPDKVFRSSVLHSTQDLFLPFFSNVTWFHAIHVSGTNGTKRFDNPVLPFNDGVYFASTEKSNIIRGWIFGTTLDSKTQSLLIVNNATNVVIKVCEFQFCNDPFLGVYYHKNNKSWMESEFRVYSSANNCTFEYVSQPFLMDLEGKQGNFKNLREFVFKNIDGYFKIYSKHTPINLVRDLPQGFSALEPLVDLPIGINITRFQTLLALHRSYLTPGDSSSGWTAGAAAYYVGYLQPRTFLLKYNENGTITDAVDCALDPLSETKCTLKSFTVEKGIYQTSNFRVQPTESIVRFPNITNLCPFGEVFNATRFASVYAWNRKRISNCVADYSVLYNSASFSTFKCYGVSPTKLNDLCFTNVYADSFVIRGDEVRQIAPGQTGKIADYNYKLPDDFTGCVIAWNSNNLDSKVGGNYNYLYRLFRRSNLKPFERDISTEIYQAGSTPCNGVEGFNCYFPLQSYGFQPTNGVGYQPYRVVVLSFELLPAPATVCGPKKSTNLVKNKCVNFNFNGLTGTGVLTESNKKFLPFQQFGRDIADTTDAVRDPQTLEILDITPCSFGGVSVITPGTNTSNQVAVLYQGVNCTEVPVAIHADQLTPTWRVYSTGSNVFQTRAGCLIGAEHVNNSYECDIPIGAGICASYQTQTNSPRRARSVASQSIIAYTMSLGAENSVAYSNNSIAIPTNFTISVTTEILPVSMTKTSVDCTMYICGDSTECSNLLLQYGSFCTQLNRALTGIAVEQDKNTQEVFAQVKQIYKTPPIKDFGGFNFSQILPDPSKPSKRSFIEDLLFNKVTLADAGFIKQYGDCLGDIAARDLICAQKFNGLTVLPPLLTDEMIAQYCSALLAGTITSGWTFGAGAALQIPFAMQMAYRFNGIGVTQNVLYENQKLIANQFNSAIGKIQDSLSSAAPALGKLQDVVNQNAQALNTLVKQLSSNFGAISSVLNDILSRLDKVEAEVQIDRLITGRLQSLQTYVTQQLIRAAEIRASANLAATKMSECVLGQSKRVDFCGKGYHLMSFPQCAPHGVVFLHVTYVPAQEKNFTTAPAICHDGKAHFPREGVFVSNGTHWFVTQRNFYEPQIITTDNTFVSGNCDVVIGIVNNTVYDPLQPELDSGGGGSDIDPYKEFGSSYQLLNFLPLDFFPDLNALVDTATALYEEELTGREHCSPHHTAIRQALVCWDELTKLIAWMSSNITSEQVRTIIVNHVNDTWGLKVRQSLWFHLSCLTFGQHTVQEFLVSFGVWIRTPAPYRPPNAPILSTLPEHTVIC

SEQ ID NO: 11620 - protein, 1301 aa, Artificial Sequence
  SARS-CoV-2/USA/WA8-UW5/2020__EPI_ISL_413486 spike protein (1-1147)(T874C_S1055C) WhcAg construct
MFVFLVLLPLVSSQCVNLTTRTQLPPAYTNSFTRGVYYPDKVFRSSVLHSTQDLFLPFFSNVTWFHAIHVSGTNGTKRFDNPVLPFNDGVYFASTEKSNIIRGWIFGTTLDSKTQSLLIVNNATNVVIKVCEFQFCNDPFLGVYYHKNNKSWMESEFRVYSSANNCTFEYVSQPFLMDLEGKQGNFKNLREFVFKNIDGYFKIYSKHTPINLVRDLPQGFSALEPLVDLPIGINITRFQTLLALHRSYLTPGDSSSGWTAGAAAYYVGYLQPRTFLLKYNENGTITDAVDCALDPLSETKCTLKSFTVEKGIYQTSNFRVQPTESIVRFPNITNLCPFGEVFNATRFASVYAWNRKRISNCVADYSVLYNSASFSTFKCYGVSPTKLNDLCFTNVYADSFVIRGDEVRQIAPGQTGKIADYNYKLPDDFTGCVIAWNSNNLDSKVGGNYNYLYRLFRKSNLKPFERDISTEIYQAGSTPCNGVEGFNCYFPLQSYGFQPTNGVGYQPYRVVVLSFELLHAPATVCGPKKSTNLVKNKCVNFNFNGLTGTGVLTESNKKFLPFQQFGRDIADTTDAVRDPQTLEILDITPCSFGGVSVITPGTNTSNQVAVLYQDVNCTEVPVAIHADQLTPTWRVYSTGSNVFQTRAGCLIGAEYVNNSYECDIPIGAGICASYQTQTNSPRRARSVASQSIIAYTMSLGAENSVAYSNNSIAIPTNFTISVTTEILPVSMTKTSVDCTMYICGDSTECSNLLLQYGSFCTQLNRALTGIAVEQDKNTQEVFAQVKQIYKTPPIKDFGGFNFSQILPDPSKPSKRSFIEDLLFNKVTLADAGFIKQYGDCLGDIAARDLICAQKFNGLTVLPPLLTDEMIAQYCSALLAGTITSGWTFGAGAALQIPFAMQMAYRFNGIGVTQNVLYENQKLIANQFNSAIGKIQDSLSSTASALGKLQDVVNQNAQALNTLVKQLSSNFGAISSVLNDILSRLDKVEAEVQIDRLITGRLQSLQTYVTQQLIRAAEIRASANLAATKMSECVLGQSKRVDFCGKGYHLMSFPQCAPHGVVFLHVTYVPAQEKNFTTAPAICHDGKAHFPREGVFVSNGTHWFVTQRNFYEPQIITTDNTFVSGNCDVVIGIVNNTVYDPLQPELDSGGGGSDIDPYKEFGSSYQLLNFLPLDFFPDLNALVDTATALYEEELTGREHCSPHHTAIRQALVCWDELTKLIAWMSSNITSEQVRTIIVNHVNDTWGLKVRQSLWFHLSCLTFGQHTVQEFLVSFGVWIRTPAPYRPPNAPILSTLPEHTVIC

SEQ ID NO: 11621 - protein, 1301 aa, Artificial Sequence
  SARS-CoV-2/England/20102000506/2020__EPI_ISL_415147 spike protein (1-1147)(T874C_S1055C) WhcAg construct
MFVFLVLLPLVSSQCVNLTTRTQLPPAYTNSFTRGVYYPDKVFRSSVLHSTQDLFLPFFSNVTWFHAIHVSGTNGTKRFDNPVLPFNDGVYFASTEKSNIIRGWIFGTTLDSKTQSLLIVNNATNVVIKVCEFQFCNDPFLGVYYHKNNKSWMESEFRVYSSANNCTFEYVSQPFLMDLEGKQGNFKNLREFVFKNIDGYFKIYSKHTPINLVRDLPQGFSALEPLVDLPIGINITRFQTLLALHRSYLTPGDSSSGWTAGAAAYYVGYLQPRTFLLKYNENGTITDAVDCALDPLSETKCTLKSFTVEKGIYQTSNFRVQPTESIVRFPNITNLCPFGEVFNATRFASVYAWNRKRISNCVADYSVLYNSASFSTFKCYGVSPTKLNDLCFTNVYADSFVIRGDEVRQIAPGQTGKIADYNYKLPDDFTGCVIAWNSNNLDSKVGGNYNYLYRLFRKSNLKPFERDISTEIYQAGSTPCNGVEGFNCYFPLQSYGFQPTNGVGYQPYRVVVLSFELLHAPATVCGPKKSTNLVKNKCVNFNFNGLTGTGVLTESNKKFLPFQQFGRDIADTTDAVRDPQTLEILDITPCSFGGVSVITPGTNTSNQVAVLYQGVNCTEVPVAIHADQLTPTWRVYSTGSNVFQTRAGCLIGAEHVNNSYECDIPIGAGICASYQTQTNSPRRARSVASQSIIAYTMSLGAENSVAYSNNSIAIPTNFTISVTTEILPVSMTKTSVDCTMYICGDSTECSNLLLQYGSFCTQLNRALTGIAVEQDKNTQEVFAQVKQIYKTPPIKDFGGFNFSQILPDPSKPSKRSFIEDLLFNKVTLADAGFIKQYGYCLGDIAARDLICAQKFNGLTVLPPLLTDEMIAQYCSALLAGTITSGWTFGAGAALQIPFAMQMAYRFNGIGVTQNVLYENQKLIANQFNSAIGKIQDSLSSTASALGKLQDVVNQNAQALNTLVKQLSSNFGAISSVLNDILSRLDKVEAEVQIDRLITGRLQSLQTYVTQQLIRAAEIRASANLAATKMSECVLGQSKRVDFCGKGYHLMSFPQCAPHGVVFLHVTYVPAQEKNFTTAPAICHDGKAHFPREGVFVSNGTHWFVTQRNFYEPQIITTDNTFVSGNCDVVIGIVNNTVYDPLQPELDSGGGGSDIDPYKEFGSSYQLLNFLPLDFFPDLNALVDTATALYEEELTGREHCSPHHTAIRQALVCWDELTKLIAWMSSNITSEQVRTIIVNHVNDTWGLKVRQSLWFHLSCLTFGQHTVQEFLVSFGVWIRTPAPYRPPNAPILSTLPEHTVIC

SEQ ID NO: 11622 - protein, 1301 aa, Artificial Sequence
  SARS-CoV-2/Belgium/VAG-03013/2020__EPI_ISL_415155 spike protein (1-1147)(T874C_S1055C) WhcAg construct
MFVFLVLLPLVSSQCVNLTTRTQLPPAYTNSFTRGVYYPDKVFRSSVLHSTQDLFLPFFSNVTWFHAIHVSGTNGTKRFDNPVLPFNDGVYFASTEKSNIIRGWIFGTTLDSKTQSLLIVNNATNVVIKVCEFQFCNDPFLGVYYHKNNKSWMESEFRVYSSANNCTFEYVSQPFLMDLEGKQGNFKNLREFVFKNIDGYFKIYSKHTPINLVRDLPQGFSALEPLVDLPIGINITRFQTLLALHRSYLTPGDSSSGWTAGAAAYYVGYLQPRTFLLKYNENGTITDAVDCALDPLSETKCTLKSFTVEKGIYQTSNFRVQPTESIVRFPNITNLCPFGEVFNATRFASVYAWNRKRISNCVADYSVLYNSASFSTFKCYGVSPTKLNDLCFTNVYADSFVIRGDEVRQIAPGQTGKIADYNYKLPDDFTGCVIAWNSNNLDSKVGGNYNYLYRLFRKSNLKPFERDISTEIYQAGSTPCNGVEGFNCYFPLQSYGFQPTNGVGYQPYRVVVLSFELLHAPATVCGPKKSTNLVKNKCVNFNFNGLTGTGVLTESNKKFLPFQQFGRDIADTTDAVRDPQTLEILDITPCSFGGVSVITPGTNTSNQVAVLYQGVNCTEVPVAIHADQLTPTWRVYSTGSNVFQTRAGCLIGAEHVNNSYECDIPIGAGICASYQTQTNSPRRARSVASQSIIAYTMSLGAENSVAYSNNSIAIPTNFTISVTTEILPVSMTKTSVDCTMYICGDSTECSNLLLQYGSFCTQLNRALTGIAVEQDKNTQEVFAQVKQIYKTPPIKDFGGFNFSQILPDPSKPSKRSFIEDLLFNKVTLADAGFIKQYGDCLGDIAARDLICAQKFNGLTVLPPLLTDEMIAQYCSALLAGTITSGWTFGAGAALQIPFAMQMAYRFNGIGVTQNVLYENQKLIANQFNSAIGKIQDSLSSTATALGKLQDVVNQNAQALNTLVKQLSSNFGAISSVLNDILSRLDKVEAEVQIDRLITGRLQSLQTYVTQQLIRAAEIRASANLAATKMSECVLGQSKRVDFCGKGYHLMSFPQCAPHGVVFLHVTYVPAQEKNFTTAPAICHDGKAHFPREGVFVSNGTHWFVTQRNFYEPQIITTDNTFVSGNCDVVIGIVNNTVYDPLQPELDSGGGGSDIDPYKEFGSSYQLLNFLPLDFFPDLNALVDTATALYEEELTGREHCSPHHTAIRQALVCWDELTKLIAWMSSNITSEQVRTIIVNHVNDTWGLKVRQSLWFHLSCLTFGQHTVQEFLVSFGVWIRTPAPYRPPNAPILSTLPEHTVIC

SEQ ID NO: 11623 - protein, 1301 aa, Artificial Sequence
  SARS-CoV-2/Belgium/BC-03016/2020__EPI_ISL_415157 spike protein (1-1147)(T874C_S1055C) WhcAg construct
MFVFLVLLPLVSSQCVNLTTRTQLPPAYTNSFTRGVYYPDKVFRSSVLHSTQDLFLPFFSNVTWFHAIHVSGTNGTKRFDNPVLPFNDGVYFASTEKSNIIRGWIFGTTLDSKTQSLLIVNNATNVVIKVCEFQFCNDPFLGVYYHKNNKSWMESEFRVYSSANNCTFEYVSQPFLMDLEGKQGNFKNLREFVFKNIDGYFKIYSKHTPINLVRDLPQGFSALEPLVDLPIGINITRFQTLLALHRSYLTPGDSSSGWTAGAAAYYVGYLQPRTFLLKYNENGTITDAVDCALDPLSETKCTLKSFTVEKGIYQTSNFRVQPTESIVRFPNITNLCPFGEVFNATRFASVYAWNRKRISNCVADYSVLYNSASFSTFKCYGVSPTKLNDLCFTNVYADSFVIRGDEVRQIAPGQTGKIADYNYKLPDDFTGCVIAWNSNNLDSKVGGNYNYLYRLFRKSNLKPFERDISTEIYQAGSTPCNGVEGFNCYFPLQSYGFQPTNGVGYQPYRVVVLSFELLHAPATVCGPKKSTNLVKNKCVNFNFNGLTGTGVLTESNKKFLPFQQFGRDIADTTDAVRDPQTLEILDITPCSFGGVSVITPGTNTSNQVAVLYQGVNCTEVPVAIHADQLTPTWRVYSTGSNVFQTRAGCLIGAEHVNNSYECDIPIGAGICASYQTQTNSPRRARSVASQSIIAYTMSLGAENSVAYSNNSIAIPTNFTISVTTEILPVSMTKTSVDCTMYICGDSTECSNLLLQYGSFCTQLNRALTGIAVEQDKNTQEVFAQVKQIYKTPPIKDFGGFNFSQILPDPSKPSKRSFIEDLLFNKVTLADAGFIKQYGDCLGDIAARDLICAQKFNGLTVLPPLLTDEMIAQYCSALLAGTITSGWTFGAGAALQIPFAMQMAYRFNGIGVTQNVLYENQKLIANQFNSAIGKIQDSLSSTAPALGKLQDVVNQNAQALNTLVKQLSSNFGAISSVLNDILSRLDKVEAEVQIDRLITGRLQSLQTYVTQQLIRAAEIRASANLAATKMSECVLGQSKRVDFCGKGYHLMSFPQCAPHGVVFLHVTYVPAQEKNFTTAPAICHDGKAHFPREGVFVSNGTHWFVTQRNFYEPQIITTDNTFVSGNCDVVIGIVNNTVYDPLQPELDSGGGGSDIDPYKEFGSSYQLLNFLPLDFFPDLNALVDTATALYEEELTGREHCSPHHTAIRQALVCWDELTKLIAWMSSNITSEQVRTIIVNHVNDTWGLKVRQSLWFHLSCLTFGQHTVQEFLVSFGVWIRTPAPYRPPNAPILSTLPEHTVIC

SEQ ID NO: 11624 - protein, 1301 aa, Artificial Sequence
  SARS-CoV-2/Germany/BavPat3/2020__EPI_ISL_414521 spike protein (1-1147)(T874C_S1055C) WhcAg construct
MFVFLVLLPLVSSQCVNLTTRTQLPPAYTNSFTRGVYYPDKVFRSSVLHSTQDLFLPFFSNVTWFHAIHVSGTNGTKRFDNPVLPFNDGVYFASTEKSNIIRGWIFGTTLDSKTQSLLIVNNATNVVIKVCEFQFCNDPFLGVYYHKNNKSWMESEFRVYSSANNCTFEYVSQPFLMDLEGKQGNFKNLREFVFKNIDGYFKIYSKHTPINLVRDLPQGFSALEPLVDLPIGINITRFQTLLALHRSYLTPGDSSSGWTAGAAAYYVGYLQPRTFLLKYNENGTITDAVDCALDPLSETKCTLKSFTVEKGIYQTSNFRVQPTESIVRFPNITNLCPFGEVFNATRFASVYAWNRKRISNCVADYSVLYNSASFSTFKCYGVSPTKLNDLCFTNVYADSFVIRGDEVRQIAPGQTGKIADYNYKLPDDFTGCVIAWNSNNLDSKVGGNYNYLYRLFRKSNLKPFERDISTEIYQAGSTPCNGVEGFNCYFPLQSYGFQPTNGVGYQPYRVVVLSFELLHAPATVCGPKKSTNLVKNKCVNFNFNGLTGTGVLTESNKKFLPFQQFGRDIADTTDAVRDPQTLEILDITPCSFGGVSVITPGTNTSNQVAVLYQDVNCTEVPVAIHADQLTPTWRVYSTGSNVFQTRAGCLIGAEHVNNSYECDIPIGAGICASYQTQTNSPRRARSVASQSIIAYTMSLGAENSVAYSNNSIAIPTNFTISVTTEILPVSMTKTSVDCTMYICGDSTECSNLLLQYGSFCTQLNRALTGIAVEQDKNTQQVFAQVKQIYKTPPIKDFGGFNFSQILPDPSKPSKRSFIEDLLFNKVTLADAGFIKQYGDCLGDIAARDLICAQKFNGLTVLPPLLTDEMIAQYCSALLAGTITSGWTFGAGAALQIPFAMQMAYRFNGIGVTQNVLYENQKLIANQFNSAIGKIQDSLSSTASALGKLQDVVNQNAQALNTLVKQLSSNFGAISSVLNDILSRLDKVEAEVQIDRLITGRLQSLQTYVTQQLIRAAEIRASANLAATKMSECVLGQSKRVDFCGKGYHLMSFPQCAPHGVVFLHVTYVPAQEKNFTTAPAICHDGKAHFPREGVFVSNGTHWFVTQRNFYEPQIITTDNTFVSGNCDVVIGIVNNTVYDPLQPELDSGGGGSDIDPYKEFGSSYQLLNFLPLDFFPDLNALVDTATALYEEELTGREHCSPHHTAIRQALVCWDELTKLIAWMSSNITSEQVRTIIVNHVNDTWGLKVRQSLWFHLSCLTFGQHTVQEFLVSFGVWIRTPAPYRPPNAPILSTLPEHTVIC

SEQ ID NO: 11625 - protein, 1301 aa, Artificial Sequence
  SARS-CoV-2/France/HF1805/2020__EPI_ISL_414628 spike protein (1-1147)(T874C_S1055C) WhcAg construct
MFVFLVLLPLVSSQCVNLTTRTQLPPAYTNSFTRGVYYPDKVFRSSVLHSTQDLFLPFFSNVTWFHAIHVSGTNGTKRFDNPVLPFNDGVYFASTEKSNIIRGWIFGTTLDSKTQSLLIVNNATNVVIKVCEFQFCNDPFLGVYYHKNNKSWMESEFRVYSSANNCTFEYVSQPFLMDLEGKQGNFKNLREFVFKNIDGYFKIYSKHTPINLVRDLPQGFSALEPLVDLPIGINITRFQTLLALHRSYLTPGDSSSGWTAGAAAYYVGYLQPRTFLLKYNENGTITDAVDCALDPLSETKCTLKSFTVEKGIYQTSNFRVQPTESIVRFPNITNLCPFGEVFNATRFASVYAWNRKRISNCVADYSVLYNSASFSTFKCYGVSPTKLNDLCFTNVYADSFVIRGDEVRQIAPGQTGKIADYNYKLPDDFTGCVIAWNSNNLDSKVGGNYNYLYRLFRKSNLKPFERDISTEIYQAGSTPCNGVEGFNCYFPLQSYGFQPTNGVGYQPYRVVVLSFELLHAPATVCGPKKSTNLVKNKCVNFNFNGLTGTGVLTESNKKFLPFQQFGRDIADTTDAVRDPQTLEILDITPCSFGGVSVITPGTNTSNQVAVLYQGVNCTEVPVAIHADQLTPTWRVYSTGSNVFQTRAGCLIGAEHVNNSYECDIPIGAGICASYQTQTNSPRRARSVASQSIIAYTMSLGAENSVAYSNNSIAIPTNFTISVTTEILPVSMTKTSVDCTMYICGDSTECSNLLLQYGSFCTQLNRALTGIAVEQDKNTQEVFAQVKQIYKTPPIKDFGGFNFSQILPDPSKPSKRSFIEDLLFNKVTLADAGFIKQYGDCLGDIAARDLICAQKFNGLTVLPPLLTDEMIAQYCSALLAGTITSGWTFGAGAALQIPFAMQMAYRFNGIGVTQNVLYENQKLIANQFNSAIGKIQDSLSSTASALGKLQDVVNQNAQALNTLVKQLSSNFGAISSVLNDILSRLDKVEAEVQIDRLITGRLQSLQTYVTQQLIRAAEIRASANLAATKMSECVLGQSKRVDFCGKGYHLMSFPQCAPHGVVFLHVTYVPAQEKNFTTAPAICHDGKAHFPREGVFVSNGTHWFVTQRNFYEPQIITTDNTFVSGNCDVVIGVVNNTVYDPLQPELDSGGGGSDIDPYKEFGSSYQLLNFLPLDFFPDLNALVDTATALYEEELTGREHCSPHHTAIRQALVCWDELTKLIAWMSSNITSEQVRTIIVNHVNDTWGLKVRQSLWFHLSCLTFGQHTVQEFLVSFGVWIRTPAPYRPPNAPILSTLPEHTVIC

SEQ ID NO: 11626 - protein, 1301 aa, Artificial Sequence
  SARS-CoV-2/Netherlands/ZuidHolland_9/2020__EPI_ISL_414445 spike protein (1-1147)(T874C_S1055C) WhcAg construct
MFVFLVLLPLVSSQCVNLTTRTQLPPAYTNSFTRGVYYPDKVFRSSVLHSTQDLFLPFFSNVTWFHAIHVSGTNGTKRFDNPVLPFNDGVYFASTEKSNIIRGWIFGTTLDSKTQSLLIVNNATNVVIKVCEFQFCNDPFLGVYYHKNNKSWMESEFRVYSSANNCTFEYVSQPFLMDLEGKQGNFKNLREFVFKNIDGYFKIYSKHTPINLVRDLPQGFSALEPLVDLPIGINITRFQTLLALHRSYLTPGDSSSGWTAGAAAYYVGYLQPRTFLLKYNENGTITDAVDCALDPLSETKCTLKSFTVEKGIYQTSNFRVQPTESIVRFPNITNLCPFGEVFNATRFASVYAWNRKRISNCVADYSVLYNSASFSTFKCYGVSPTKLNDLCFTNVYADSFVIRGDEVRQIAPGQTGKIADYNYKLPDDFTGCVIAWNSNNLDSKVGGNYNYLYRLFRKSNLKPFERDISTEIYQAGSTPCNGVEGFNCYFPLQSYGFQPTNGVGYQPYRVVVLSFELLHAPATVCGPKKSTNLVKNKCVNFNFNGLTGTGVLTESNKKFLPFQQFGRDIADTTDAVRDPQTLEILDITPCSFGGVSVITPGTNTSNQVAVLYQGVNCTEVPVAIHADQLTPTWRVYSTGSNVFQTRAGCLIGAEHVNNSYECDIPIGAGICASYQTQTNSPRRARSVASQSIIAYTMSLGAENSVAYSNNSIAIPTNFTISVTTEILPVSMTKTSVDCTMYICGDSTECSNLLLQYGSFCTQLNRALTGIAVEQDKNTQEVFAQVKQIYKTPPIKDFGGFNFSQILPDPSKPSKRSFIEDLLFNKVTLADAGFIKQYGDCLGDIAARDLICVQKFNGLTVLPPLLTDEMIAQYCSALLAGTITSGWTFGAGAALQIPFAMQMAYRFNGIGVTQNVLYENQKLIANQFNSAIGKIQDSLSSTASALGKLQDVVNQNAQALNTLVKQLSSNFGAISSVLNDILSRLDKVEAEVQIDRLITGRLQSLQTYVTQQLIRAAEIRASANLAATKMSECVLGQSKRVDFCGKGYHLMSFPQCAPHGVVFLHVTYVPAQEKNFTTAPAICHDGKAHFPREGVFVSNGTHWFVTQRNFYEPQIITTDNTFVSGNCDVVIGIVNNTVYDPLQPELDSGGGGSDIDPYKEFGSSYQLLNFLPLDFFPDLNALVDTATALYEEELTGREHCSPHHTAIRQALVCWDELTKLIAWMSSNITSEQVRTIIVNHVNDTWGLKVRQSLWFHLSCLTFGQHTVQEFLVSFGVWIRTPAPYRPPNAPILSTLPEHTVIC

SEQ ID NO: 11627 - protein, 1301 aa, Artificial Sequence
  SARS-CoV-2/Finland/FIN03032020A/2020__EPI_ISL_413602 spike protein (1-1147)(T874C_S1055C) WhcAg construct
MFVFLVLLPLVSSQCVNLTTRTQLPPAYTNSFTRGVYYPDKVFRSSVLHSTQDLFLPFFSNVTWFHAIHVSGTNGTKRFDNPVLPFNDGVYFASTEKSNIIRGWIFGTTLDSKTQSLLIVNNATNVVIKVCEFQFCNDPFLGVYYHKNNKSWMESEFRVYSSANNCTFEYVSQPFLMDLEGKQGNFKNLREFVFKNIDGYFKIYSKHTPINLVRDLPQGFSALEPLVDLPIGINITRFQTLLALHRSYLTPGDSSSGWTAGAAAYYVGYLQPRTFLLKYNENGTITDAVDCALDPLSETKCTLKSFTVEKGIYQTSNFRVQPTESIVRFPNITNLCPFGEVFNATRFASVYAWNRKRISNCVADYSVLYNSASFSTFKCYGVSPTKLNDLCFTNVYADSFVIRGDEVRQIAPGQTGKIADYNYKLPDDFTGCVISWNSNNLDSKVGGNYNYLYRLFRKSNLKPFERDISTEIYQAGSTPCNGVEGFNCYFPLQSYGFQPTNGVGYQPYRVVVLSFELLHAPATVCGPKKSTNLVKNKCVNFNFNGLTGTGVLTESNKKFLPFQQFGRDIADTTDAVRDPQTLEILDITPCSFGGVSVITPGTNTSNQVAVLYQGVNCTEVPVAIHADQLTPTWRVYSTGSNVFQTRAGCLIGAEHVNNSYECDIPIGAGICASYQTQTNSPRRARSVASQSIIAYTMSLGAENSVAYSNNSIAIPTNFTISVTTEILPVSMTKTSVDCTMYICGDSTECSNLLLQYGSFCTQLNRALTGIAVEQDKNTQEVFAQVKQIYKTPPIKDFGGFNFSQILPDPSKPSKRSFIEDLLFNKVTLADAGFIKQYGDCLGDIAARDLICAQKFNGLTVLPPLLTDEMIAQYCSALLAGTITSGWTFGAGAALQIPFAMQMAYRFNGIGVTQNVLYENQKLIANQFNSAIGKIQDSLSSTASALGKLQDVVNQNAQALNTLVKQLSSNFGAISSVLNDILSRLDKVEAEVQIDRLITGRLQSLQTYVTQQLIRAAEIRASANLAATKMSECVLGQSKRVDFCGKGYHLMSFPQCAPHGVVFLHVTYVPAQEKNFTTAPAICHDGKAHFPREGVFVSNGTHWFVTQRNFYEPQIITTDNTFVSGNCDVVIGIVNNTVYDPLQPELDSGGGGSDIDPYKEFGSSYQLLNFLPLDFFPDLNALVDTATALYEEELTGREHCSPHHTAIRQALVCWDELTKLIAWMSSNITSEQVRTIIVNHVNDTWGLKVRQSLWFHLSCLTFGQHTVQEFLVSFGVWIRTPAPYRPPNAPILSTLPEHTVIC

SEQ ID NO: 11628 - protein, 1301 aa, Artificial Sequence
  SARS-CoV-2/France/GE1977/2020__EPI_ISL_414632 spike protein (1-1147)(T874C_S1055C) WhcAg construct
MFVFLVLLPLVSSQCVNLTTRTQLPPAYTNSFTRGVYYPDKVFRSSVLHSTQDLFLPFFSNVTWFHAIHVSGTNGTKRFDNPVLPFNDGVYFASTEKSNIIRGWIFGTTLDSKTQSLLIVNNATNVVIKVCEFQFCNDPFLGVYYHKNNKSWMESEFRVYSSANNCTFEYVSQPFLMDLEGKQGNFKNLREFVFKNIDGYFKIYSKHTPINLVRDLPQGFSALEPLVDLPIGINITRFQTLLALHRSYLTPGDSSSGWTAGAAAYYVGYLQPRTFLLKYNENGTITDAVDCALDPLSETKCTLKSFTVEKGIYQTSNFRVQPTESIVRFPNITNLCPFGEVFNATRFASVYAWNRKRISNCVADYSVLYNSASFSTFKCYGVSPTKLNDLCFTNVYADSFVIRGDEVRQIAPGQTGKIADYNYKLPDDFTGCVIAWNSNNLDSKVGGNYNYLYRLFRKSNLKPFERDISTEIYQAGSTPCNGVEGFNCYFPLQSYGFQPTNGVGYQPYRVVVLSFELLHAPATVCGPKKSTNLVKNKCVNFNFNGLTGTGVLTESNKKFLPFQQFGRDIADTTDAVRDPQTLEILDITPCSFGGVSVITPGTNTSNQVAVLYQGVNCTEVPVAIHADQLTPTWRVYSTGSNVFQTRAGCLIGAEHVNNSYECDIPIGAGICASYQTQTNSPRRARSVASQSIIAYTMSLGAENSVAYSNNSIAIPTNFTISVTTEILPVSMTKTSVDCTMYICGDSTECSNLLLQYGSFCTQLNRALTGIAVEQDKNTQEVFAQVKQIYKTPPIKDFGGFNFSQILPDPSKPSKRSFIEDLLFNKVTLADAGFIKQYGDCLGDIAARDLICAQKFNGLTVLPPLLTDEMIAQYCSALLAGTITSGWTFGAGAALQIPFAMQMAYRFNGIGVTQNVLYENQKLIANQFNSAIGKIQDSLFSTASALGKLQDVVNQNAQALNTLVKQLSSNFGAISSVLNDILSRLDKVEAEVQIDRLITGRLQSLQTYVTQQLIRAAEIRASANLAATKMSECVLGQSKRVDFCGKGYHLMSFPQCAPHGVVFLHVTYVPAQEKNFTTAPAICHDGKAHFPREGVFVSNGTHWFVTQRNFYEPQIITTDNTFVSGNCDVVIGIVNNTVYDPLQPELDSGGGGSDIDPYKEFGSSYQLLNFLPLDFFPDLNALVDTATALYEEELTGREHCSPHHTAIRQALVCWDELTKLIAWMSSNITSEQVRTIIVNHVNDTWGLKVRQSLWFHLSCLTFGQHTVQEFLVSFGVWIRTPAPYRPPNAPILSTLPEHTVIC

SEQ ID NO: 11629 - protein, 1301 aa, Artificial Sequence
  SARS-CoV-2/Finland/FIN-313/2020__EPI_ISL_414641 spike protein (1-1147)(T874C_S1055C) WhcAg construct
MFVFLVLLPLVSSQCVNLTTRTQLPPAYTNSFTRGVYYPDKVFRSSVLHSTQDLFLPFFSNVTWFHAIHVSGTNGTKRFDNPVLPFNDGVYFASTEKSNIIRGWIFGTTLDSKTQSLLIVNNATNVVIKVCEFQFCNDPFLGVYYHKNNKSWMESEFRVYSSANNCTFEYVSQPFLMDLEGKQGNFKNLREFVFKNIDGYFKIYSKHTPINLVRDLPQGFSALEPLVDLPIGINITRFKTLLALHRSYLTPGDSSSGWTAGAAAYYVGYLQPRTFLLKYNENGTITDAVDCALDPLSETKCTLKSFTVEKGIYQTSNFRVQPTESIVRFPNITNLCPFGEVFNATRFASVYAWNRKRISNCVADYSVLYNSASFSTFKCYGVSPTKLNDLCFTNVYADSFVIRGDEVRQIAPGQTGKIADYNYKLPDDFTGCVIAWNSNNLDSKVGGNYNYLYRLFRKSNLKPFERDISTEIYQAGSTPCNGVEGFNCYFPLQSYGFQPTNGVGYQPYRVVVLSFELLHAPATVCGPKKSTNLVKNKCVNFNFNGLTGTGVLTESNKKFLPFQQFGRDIADTTDAVRDPQTLEILDITPCSFGGVSVITPGTNTSNQVAVLYQGVNCTEVPVAIHADQLTPTWRVYSTGSNVFQTRAGCLIGAEHVNNSYECDIPIGAGICASYQTQTNSPRRARSVASQSIIAYTMSLGAENSVAYSNNSIAIPTNFTISVTTEILPVSMTKTSVDCTMYICGDSTECSNLLLQYGSFCTQLNRALTGIAVEQDKNTQEVFAQVKQIYKTPPIKDFGGFNFSQILPDPSKPSKRSFIEDLLFNKVTLADAGFIKQYGDCLGDIAARDLICAQKFNGLTVLPPLLTDEMIAQYCSALLAGTITSGWTFGAGAALQIPFAMQMAYRFNGIGVTQNVLYENQKLIANQFNSAIGKIQDSLSSTASALGKLQDVVNQNAQALNTLVKQLSSNFGAISSVLNDILSRLDKVEAEVQIDRLITGRLQSLQTYVTQQLIRAAEIRASANLAATKMSECVLGQSKRVDFCGKGYHLMSFPQCAPHGVVFLHVTYVPAQEKNFTTAPAICHDGKAHFPREGVFVSNGTHWFVTQRNFYEPQIITTDNTFVSGNCDVVIGIVNNTVYDPLQPELDSGGGGSDIDPYKEFGSSYQLLNFLPLDFFPDLNALVDTATALYEEELTGREHCSPHHTAIRQALVCWDELTKLIAWMSSNITSEQVRTIIVNHVNDTWGLKVRQSLWFHLSCLTFGQHTVQEFLVSFGVWIRTPAPYRPPNAPILSTLPEHTVIC

SEQ ID NO: 11630 - protein, 1301 aa, Artificial Sequence
  SARS-CoV-2/Netherlands/ZuidHolland_2/2020__EPI_ISL_414556 spike protein (1-1147)(T874C_S1055C) WhcAg construct
MFVFLVLLPLVSSQCVNLTTRTQLPPAYTNSFTRGVYYPDKVFRSSVLHSTQDLFLPFFSNVTWFHAIHVSGTNGTKRFDNPVLPFNDGVYFASTEKSNIIRGWIFGTTLDSKTQSLLIVNNATNVVIKVCEFQFCNDPFLGVYYHKNNKSWMESEFRVYSSANNCTFEYVSQPFLMDLEGKQGNFKNLREFVFKNIDGYFKIYSKHTPINLVRDLPQGFSALEPLVDLPIGINITRFQTLLALHRSYLTPGDSSSGWTAGAAAYYVGYLQPRTFLLKYNENGTITDAVDCALDPLSETKCTLKSFTVEKGIYQTSNFRVQPTESIVRFPNITNLCPFGEVFNATRFASVYAWNRKRISNCVADYSVLYNSASFSTFKCYGVSPTKLNDLCFTNVYADSFVIRGDEVRQIAPGQTGKIADYNYKLPDDFTGCVIAWNSNNLDSKVGGNYNYLYRLFRKSNLKPFERDISTEIYQAGSTPCNGVEGFNCYFPLQSYGFQPTNGVGYQPYRVVVLSFELLHAPATVCGPKKSTNLVKNKCVNFNFNGLTGTGVLTESNKKFLPFQQFGRDIADTTDAVRDPQTLEILDITPCSFGGVSVITPGTNTSNQVAVLYQGVNCTEVPVAIHADQLTPTWRVYSTGSNVFQTRAGCLIGAEHVNNSYECDIPIGAGICASYQTQTNSPRRARSVASQSIIAYTMSLGAENSVAYSNNSIAIPTNFTISVTTEILPVSMTKTSVDCTMYICGDSTECSNLLLQYGSFCTQLNRALTGIALEQDKNTQEVFAQVKQIYKTPPIKDFGGFNFSQILPDPSKPSKRSFIEDLLFNKVTLADAGFIKQYGDCLGDIAARDLICAQKFNGLTVLPPLLTDEMIAQYCSALLAGTITSGWTFGAGAALQIPFAMQMAYRFNGIGVTQNVLYENQKLIANQFNSAIGKIQDSLSSTASALGKLQDVVNQNAQALNTLVKQLSSNFGAISSVLNDILSRLDKVEAEVQIDRLITGRLQSLQTYVTQQLIRAAEIRASANLAATKMSECVLGQSKRVDFCGKGYHLMSFPQCAPHGVVFLHVTYVPAQEKNFTTAPAICHDGKAHFPREGVFVSNGTHWFVTQRNFYEPQIITTDNTFVSGNCDVVIGIVNNTVYDPLQPELDSGGGGSDIDPYKEFGSSYQLLNFLPLDFFPDLNALVDTATALYEEELTGREHCSPHHTAIRQALVCWDELTKLIAWMSSNITSEQVRTIIVNHVNDTWGLKVRQSLWFHLSCLTFGQHTVQEFLVSFGVWIRTPAPYRPPNAPILSTLPEHTVIC

SEQ ID NO: 11631 - protein, 1301 aa, Artificial Sequence
  SARS-CoV-2/USA/WA-UW31/2020__EPI_ISL_414618 spike protein (1-1147)(T874C_S1055C) WhcAg construct
MFVFLVLLPLVSSQCVNLTTRTQLPPAYTNSFTRGVYYPDKVFRSSVLHSTQDLFLPFFSNVTWFHAIHVSGTNGTKRFDNPVLPFNDGVYFASTEKSNIIRGWIFGTTLDSKTQSLLIVNNATNVVIKVCEFQFCNDPFLGVYYHKNNKSWMESEFRVYSSANNCTFEYVSQPFLMDLEGKQGNFKNLREFVFKNIDGYFKIYSKHTPINLVRDLPQGFSALEPLVDLPIGINITRFQTLLALHRSYLTPGDSSSGWTAGAAAYYVGYLQPRTFLLKYNENGTITDAVDCALDPLSETKCTLKSFTVEKGIYQTSNFRVQPTESIVRFPNITNLCPFGEVFNATRFASVYAWNRKRISNCVADYSVLYNSASFSTFKCYGVSPTKLNDLCFTNVYADSFVIRGDEVRQIAPGQTGKIADYNYKLPDDFTGCVIAWNSNNLDSKVGGNYNYLYRLFRKSNLKPFERDISTEIYQAGSTPCNGAEGFNCYFPLQSYGFQPTNGVGYQPYRVVVLSFELLHAPATVCGPKKSTNLVKNKCVNFNFNGLTGTGVLTESNKKFLPFQQFGRDIADTTDAVRDPQTLEILDITPCSFGGVSVITPGTNTSNQVAVLYQDVNCTEVPVAIHADQLTPTWRVYSTGSNVFQTRAGCLIGAEHVNNSYECDIPIGAGICASYQTQTNSPRRARSVASQSIIAYTMSLGAENSVAYSNNSIAIPTNFTISVTTEILPVSMTKTSVDCTMYICGDSTECSNLLLQYGSFCTQLNRALTGIAVEQDKNTQEVFAQVKQIYKTPPIKDFGGFNFSQILPDPSKPSKRSFIEDLLFNKVTLADAGFIKQYGDCLGDIAARDLICAQKFNGLTVLPPLLTDEMIAQYCSALLAGTITSGWTFGAGAALQIPFAMQMAYRFNGIGVTQNVLYENQKLIANQFNSAIGKIQDSLSSTASALGKLQDVVNQNAQALNTLVKQLSSNFGAISSVLNDILSRLDKVEAEVQIDRLITGRLQSLQTYVTQQLIRAAEIRASANLAATKMSECVLGQSKRVDFCGKGYHLMSFPQCAPHGVVFLHVTYVPAQEKNFTTAPAICHDGKAHFPREGVFVSNGTHWFVTQRNFYEPQIITTDNTFVSGNCDVVIGIVNNTVYDPLQPELDSGGGGSDIDPYKEFGSSYQLLNFLPLDFFPDLNALVDTATALYEEELTGREHCSPHHTAIRQALVCWDELTKLIAWMSSNITSEQVRTIIVNHVNDTWGLKVRQSLWFHLSCLTFGQHTVQEFLVSFGVWIRTPAPYRPPNAPILSTLPEHTVIC

SEQ ID NO: 11632 - protein, 1301 aa, Artificial Sequence
  SARS-CoV-2/South Korea/SNU01/2020__EPI_ISL_411929 spike protein (1-1147)(T874C_S1055C) WhcAg construct
MFVFLVLLPLVSSQCVNLTTRTQLPPAYTNSFTRGVYYPDKVFRSSVLHSTQDLFLPFFSNVTWFHAIHVSGTNGTKRFDNPVLPFNDGVYFASTEKSNIIRGWIFGTTLDSKTQSLLIVNNATNVVIKVCEFQFCNDPFLGVYYHKNNKSWMESEFRVYSSANNCTFEYVSQPFLMDLEGKQGNFKNLREFVFKNIDGYFKIYSKHTPINLVRDLPQGFWALEPLVDLPIGINITRFQTLLALHRSYLTPGDSSSGWTAGAAAYYVGYLQPRTFLLKYNENGTITDAVDCALDPLSETKCTLKSFTVEKGIYQTSNFRVQPTESIVRFPNITNLCPFGEVFNATRFASVYAWNRKRISNCVADYSVLYNSASFSTFKCYGVSPTKLNDLCFTNVYADSFVIRGDEVRQIAPGQTGKIADYNYKLPDDFTGCVIAWNSNNLDSKVGGNYNYLYRLFRKSNLKPFERDISTEIYQAGSTPCNGVEGFNCYFPLQSYGFQPTNGVGYQPYRVVVLSFELLHAPATVCGPKKSTNLVKNKCVNFNFNGLTGTGVLTESNKKFLPFQQFGRDIADTTDAVRDPQTLEILDITPCSFGGVSVITPGTNTSNQVAVLYQDVNCTEVPVAIHADQLTPTWRVYSTGSNVFQTRAGCLIGAEHVNNSYECDIPIGAGICASYQTQTNSPRRARSVASQSIIAYTMSLGAENSVAYSNNSIAIPTNFTISVTTEILPVSMTKTSVDCTMYICGDSTECSNLLLQYGSFCTQLNRALTGIAVEQDKNTQEVFAQVKQIYKTPPIKDFGGFNFSQILPDPSKPSKRSFIEDLLFNKVTLADAGFIKQYGDCLGDIAARDLICAQKFNGLTVLPPLLTDEMIAQYCSALLAGTITSGWTFGAGAALQIPFAMQMAYRFNGIGVTQNVLYENQKLIANQFNSAIGKIQDSLSSTASALGKLQDVVNQNAQALNTLVKQLSSNFGAISSVLNDILSRLDKVEAEVQIDRLITGRLQSLQTYVTQQLIRAAEIRASANLAATKMSECVLGQSKRVDFCGKGYHLMSFPQCAPHGVVFLHVTYVPAQEKNFTTAPAICHDGKAHFPREGVFVSNGTHWFVTQRNFYEPQIITTDNTFVSGNCDVVIGIVNNTVYDPLQPELDSGGGGSDIDPYKEFGSSYQLLNFLPLDFFPDLNALVDTATALYEEELTGREHCSPHHTAIRQALVCWDELTKLIAWMSSNITSEQVRTIIVNHVNDTWGLKVRQSLWFHLSCLTFGQHTVQEFLVSFGVWIRTPAPYRPPNAPILSTLPEHTVIC

SEQ ID NO: 11633 - protein, 1301 aa, Artificial Sequence
  SARS-CoV-2/China/WF0004/2020__EPI_ISL_413694 spike protein (1-1147)(T874C_S1055C) WhcAg construct
MFVFLVLLPLVSSQCVNLTTRTQLPPAYTNSFTRGVYYPDKVFRSSVLHSTQDLFLPFFSNVTWFHAIHVSGTNGTKRFDNPVLPFNDGVYFASTEKSNIIRGWIFGTTLDSKTQSLLIVNNATNVVIKVCEFQFCNDPFLGVYYHKNNKSWTESEFRVYSSANNCTFEYVSQPFLMDLEGKQGNFKNLREFVFKNIDGYFKIYSKHTPINLVRDLPQGFSALEPLVDLPIGINITRFQTLLALHRSYLTPGDSSSGWTAGAAAYYVGYLQPRTFLLKYNENGTITDAVDCALDPLSETKCTLKSFTVEKGIYQTSNFRVQPTESIVRFPNITNLCPFGEVFNATRFASVYAWNRKRISNCVADYSVLYNSASFSTFKCYGVSPTKLNDLCFTNVYADSFVIRGDEVRQIAPGQTGKIADYNYKLPDDFTGCVIAWNSNNLDSKVGGNYNYLYRLFRKSNLKPFERDISTEIYQAGSTPCNGVEGFNCYFPLQSYGFQPTNGVGYQPYRVVVLSFELLHAPATVCGPKKSTNLVKNKCVNFNFNGLTGTGVLTESNKKFLPFQQFGRDIADTTDAVRDPQTLEILDITPCSFGGVSVITPGTNTSNQVAVLYQDVNCTEVPVAIHADQLTPTWRVYSTGSNVFQTRAGCLIGAEHVNNSYECDIPIGAGICASYQTQTNSPRRARSVASQSIIAYTMSLGAENSVAYSNNSIAIPTNFTISVTTEILPVSMTKTSVDCTMYICGDSTECSNLLLQYGSFCTQLNRALTGIAVEQDKNTQEVFAQVKQIYKTPPIKDFGGFNFSQILPDPSKPSKRSFIEDLLFNKVTLADAGFIKQYGDCLGDIAARDLICAQKFNGLTVLPPLLTDEMIAQYCSALLAGTITSGWTFGAGAALQIPFAMQMAYRFNGIGVTQNVLYENQKLIANQFNSAIGKIQDSLSSTASALGKLQDVVNQNAQALNTLVKQLSSNFGAISSVLNDILSRLDKVEAEVQIDRLITGRLQSLQTYVTQQLIRAAEIRASANLAATKMSECVLGQSKRFDFCGKGYHLMSFPQCAPHGVVFLHVTYVPAQEKNFTTAPAICHDGKAHFPREGVFVSNGTHWFVTQRNFYEPQIITTDNTFVSGNCDVVIGIVNNTVYDPLQPELDSGGGGSDIDPYKEFGSSYQLLNFLPLDFFPDLNALVDTATALYEEELTGREHCSPHHTAIRQALVCWDELTKLIAWMSSNITSEQVRTIIVNHVNDTWGLKVRQSLWFHLSCLTFGQHTVQEFLVSFGVWIRTPAPYRPPNAPILSTLPEHTVIC

SEQ ID NO: 11634 - protein, 1301 aa, Artificial Sequence
  SARS-CoV-2/China/WF0028/2020__EPI_ISL_413791 spike protein (1-1147)(T874C_S1055C) WhcAg construct
MFVFLVLLPLVSSQCVNLTTRTQLPPAYTNSFTRGVYYPDKVFRSSVLHSTQDLFLPFFSNVTWFHAIHVSGTNGTKRFDNPVLPFNDGVYFASTEKSNIIRGWIFGTTLDSKTQSLLIVNNATNVVIKVCEFQFCNDPFLGVYYHKNNKSWMESEFRVYSSANNCTFEYVSQPFLMDLEGKQGNFKNLREFVFKNIDGYFKIYSKHTPINLVRDLPQGFSALEPLVDLPIGINITRFQTLLALHRSYLTPGDSSSGWTAGAAAYYVGYLQPRTFLLKYNENGTITDAVDCALDPLSETKCTLKSFTVEKGIYQTSNFRVQPTESIVRFPNITNLCPFGEVFNATRFASVYAWNRKRISNCVADYSVLYNSASFSTFKCYGVSPTKLNDLCFTNVYADSFVIRGDEVRQIAPGQTGKIADYNYKLPDDFTGCVIAWNSNNLDSKVGGNYNYLYRLFRKSNLKPFERDISTEIYQAGSTPCNGVEGFNCYFPLQSYGFQPTNGVGYQPYRVVVLSFELLHAPATVCGPKKSTNLVKNKCVNFNFNGLTGTGVLTESNKKFLPFQQFGRDIADTTDAVRDPQTLEILDITPCSFGGVSVITPGTNTSNQVAVLYQDVNCTEVPVAIHADQLTPTWRVYSTGSNVFQTRAGCLIGAEHVNNSYECDIPIGAGICASYQTQTNSPRRARSVASQSIIAYTMSLGAENSVAYSNNSIAIPTNFTISVTTEILPVSMTKTSVDCTMYICGDSTECSNLLLQYGSFCTQLNRALTGIAVEQDKNTQEVFAQVKQIYKTPPIKDFGGFNFSQILPDPSKPSKRSFIEDLLFNKVTLADAGFIKQYGDCLGDIAARDLICAQKFNGLTVLPPLLTDEMIAQYCSALLAGTITSGWTFGAGAALQIPFAMQMAYRFNGIGVTQNVLYENQKLIANQFNSAIGKIQDSLSSTASALGKLQDVVNQNAQALNTLVKQLSSNFGAISSVLNDILSRLDKVEAEVQIDRLITGRLQSLQTYVTQQLIRAAEIRASANLAATKMSECVLGQSKRVDFCGKGYHLMSFPQCAPHGVVFLHVTYVPAQEKNFTTAPAICHDGKAHFPREGVFVSNGTHWFVTQRNFYEPQIITTDNTFVSGNCDVVIGIVNNTVYDPLQPELESGGGGSDIDPYKEFGSSYQLLNFLPLDFFPDLNALVDTATALYEEELTGREHCSPHHTAIRQALVCWDELTKLIAWMSSNITSEQVRTIIVNHVNDTWGLKVRQSLWFHLSCLTFGQHTVQEFLVSFGVWIRTPAPYRPPNAPILSTLPEHTVIC

SEQ ID NO: 11635 - protein, 1301 aa, Artificial Sequence
  SARS-CoV-2/2019-nCoV/USA-CruiseA-18/2020__MT159716.1 spike protein (1-1147)(T874C_S1055C) WhcAg construct
MFVFLVLLPLVSSQCVNLTTRTQLPPAYTNSFTRGVYYPDKVFRSSVLHSTQDLFLPFFSNVTWFHAIHVSGTNGTKRFDNPVLPFNDGVYFASTEKSNIIRGWIFGTTLDSKTQSLLIVNNATNVVIKVCEFQFCNDPFLGVYYHKNNKSWMESELRVYSSANNCTFEYVSQPFLMDLEGKQGNFKNLREFVFKNIDGYFKIYSKHTPINLVRDLPQGFSALEPLVDLPIGINITRFQTLLALHRSYLTPGDSSSGWTAGAAAYYVGYLQPRTFLLKYNENGTITDAVDCALDPLSETKCTLKSFTVEKGIYQTSNFRVQPTESIVRFPNITNLCPFGEVFNATRFASVYAWNRKRISNCVADYSVLYNSASFSTFKCYGVSPTKLNDLCFTNVYADSFVIRGDEVRQIAPGQTGKIADYNYKLPDDFTGCVIAWNSNNLDSKVGGNYNYLYRLFRKSNLKPFERDISTEIYQAGSTPCNGVEGFNCYFPLQSYGFQPTNGVGYQPYRVVVLSFELLHAPATVCGPKKSTNLVKNKCVNFNFNGLTGTGVLTESNKKFLPFQQFGRDIADTTDAVRDPQTLEILDITPCSFGGVSVITPGTNTSNQVAVLYQDVNCTEVPVAIHADQLTPTWRVYSTGSNVFQTRAGCLIGAEHVNNSYECDIPIGAGICASYQTQTNSPRRARSVASQSIIAYTMSLGAENSVAYSNNSIAIPTNFTISVTTEILPVSMTKTSVDCTMYICGDSTECSNLLLQYGSFCTQLNRALTGIAVEQDKNTQEVFAQVKQIYKTPPIKDFGGFNFSQILPDPSKPSKRSFIEDLLFNKVTLADAGFIKQYGDCLGDIAARDLICAQKFNGLTVLPPLLTDEMIAQYCSALLAGTITSGWTFGAGAALQIPFAMQMAYRFNGIGVTQNVLYENQKLIANQFNSAIGKIQDSLSSTASALGKLQDVVNQNAQALNTLVKQLSSNFGAISSVLNDILSRLDKVEAEVQIDRLITGRLQSLQTYVTQQLIRAAEIRASANLAATKMSECVLGQSKRVDFCGKGYHLMSFPQCAPHGVVFLHVTYVPAQEKNFTTAPAICHDGKAHFPREGVFVSNGTHWFVTQRNFYEPQIITTDNTFVSGNCDVVIGIVNNTVYDPLQPELDSGGGGSDIDPYKEFGSSYQLLNFLPLDFFPDLNALVDTATALYEEELTGREHCSPHHTAIRQALVCWDELTKLIAWMSSNITSEQVRTIIVNHVNDTWGLKVRQSLWFHLSCLTFGQHTVQEFLVSFGVWIRTPAPYRPPNAPILSTLPEHTVIC

SEQ ID NO: 11636 - protein, 1301 aa, Artificial Sequence
  SARS-CoV-2/SARS-CoV-2/Yunnan-01/human/2020/CHN__MT049951.1 spike protein (1-1147)(T874C_S1055C) WhcAg construct
MFVFLVLLPLVSSQCVNLTTRTQLPPANTNSFTRGVYYPDKVFRSSVLHSTQDLFLPFFSNVTWFHAIHVSGTNGTKRFDNPVLPFNDGVYFASTEKSNIIRGWIFGTTLDSKTQSLLIVNNATNVVIKVCEFQFCNDPFLGVYYHKNNKSWMESEFRVYSSANNCTFEYVSQPFLMDLEGKQGNFKNLREFVFKNIDGYFKIYSKHTPINLVRDLPQGFSALEPLVDLPIGINITRFQTLLALHRSYLTPGDSSSGWTAGAAAYYVGYLQPRTFLLKYNENGTITDAVDCALDPLSETKCTLKSFTVEKGIYQTSNFRVQPTESIVRFPNITNLCPFGEVFNATRFASVYAWNRKRISNCVADYSVLYNSASFSTFKCYGVSPTKLNDLCFTNVYADSFVIRGDEVRQIAPGQTGKIADYNYKLPDDFTGCVIAWNSNNLDSKVGGNYNYLYRLFRKSNLKPFERDISTEIYQAGSTPCNGVEGFNCYFPLQSYGFQPTNGVGYQPYRVVVLSFELLHAPATVCGPKKSTNLVKNKCVNFNFNGLTGTGVLTESNKKFLPFQQFGRDIADTTDAVRDPQTLEILDITPCSFGGVSVITPGTNTSNQVAVLYQDVNCTEVPVAIHADQLTPTWRVYSTGSNVFQTRAGCLIGAEHVNNSYECDIPIGAGICASYQTQTNSPRRARSVASQSIIAYTMSLGAENSVAYSNNSIAIPTNFTISVTTEILPVSMTKTSVDCTMYICGDSTECSNLLLQYGSFCTQLNRALTGIAVEQDKNTQEVFAQVKQIYKTPPIKDFGGFNFSQILPDPSKPSKRSFIEDLLFNKVTLADAGFIKQYGDCLGDIAARDLICAQKFNGLTVLPPLLTDEMIAQYCSALLAGTITSGWTFGAGAALQIPFAMQMAYRFNGIGVTQNVLYENQKLIANQFNSAIGKIQDSLSSTASALGKLQDVVNQNAQALNTLVKQLSSNFGAISSVLNDILSRLDKVEAEVQIDRLITGRLQSLQTYVTQQLIRAAEIRASANLAATKMSECVLGQSKRVDFCGKGYHLMSFPQCAPHGVVFLHVTYVPAQEKNFTTAPAICHDGKAHFPREGVFVSNGTHWFVTQRNFYEPQIITTDNTFVSGNCDVVIGIVNNTVYDPLQPELDSGGGGSDIDPYKEFGSSYQLLNFLPLDFFPDLNALVDTATALYEEELTGREHCSPHHTAIRQALVCWDELTKLIAWMSSNITSEQVRTIIVNHVNDTWGLKVRQSLWFHLSCLTFGQHTVQEFLVSFGVWIRTPAPYRPPNAPILSTLPEHTVIC

SEQ ID NO: 11637 - protein, 1301 aa, Artificial Sequence
  SARS-CoV-2/USA/WA-UW292/2020__EPI_ISL_418077 spike protein (1-1147)(T874C_S1055C) WhcAg construct
MFVFLVLLPLVSSQCVNLTTRTQLPPAYTNSFTRGVYYPDKVFRSSVLHSTQDLFLPFFSNVTWFHAIHVSGTNGTKRFDNPVLPFNDGVYFASTEKSNIIRGWIFGTTLDSKTQSLLIVNNATNVVIKVCEFQFCNDPFLGVYYHKNNKSWMESEFRVYSSANNCTFEYVSQPFLMDLEGKQGNFKNLREFVFKNIDGYFKIYSKHTPINLVRDLPQGFSALEPLVDLPIGINITRFQTLLALHRSYLTPGDSSSGWTAGAAAYYVGYLQPRTFLLKYNENGTITDAVDCALDPLSETKCTLKSFTVEKGIYQTSNFRVQPTESIVRFPNITNLCPFGEVFNATRFASVYAWNRKRISNCVADYSVLYNSASFSTFKCYGVSPTKLNDLCFTNVYADSFVIRGDEVRQIAPGQTGKIADYNYKLPDDFTGCVIAWNSNNLDSKVGGNYNYLYRLFRKSNLKPFERDISTEIYQASSTPCNGVEGFNCYFPLQSYGFQPTNGVGYQPYRVVVLSFELLHAPATVCGPKKSTNLVKNKCVNFNFNGLTGTGVLTESNKKFLPFQQFGRDIADTTDAVRDPQTLEILDITPCSFGGVSVITPGTNTSNQVAVLYQDVNCTEVPVAIHADQLTPTWRVYSTGSNVFQTRAGCLIGAEHVNNSYECDIPIGAGICASYQTQTNSPRRARSVASQSIIAYTMSLGAENSVAYSNNSIAIPTNFTISVTTEILPVSMTKTSVDCTMYICGDSTECSNLLLQYGSFCTQLNRALTGIAVEQDKNTQEVFAQVKQIYKTPPIKDFGGFNFSQILPDPSKPSKRSFIEDLLFNKVTLADAGFIKQYGDCLGDIAARDLICAQKFNGLTVLPPLLTDEMIAQYCSALLAGTITSGWTFGAGAALQIPFAMQMAYRFNGIGVTQNVLYENQKLIANQFNSAIGKIQDSLSSTASALGKLQDVVNQNAQALNTLVKQLSSNFGAISSVLNDILSRLDKVEAEVQIDRLITGRLQSLQTYVTQQLIRAAEIRASANLAATKMSECVLGQSKRVDFCGKGYHLMSFPQCAPHGVVFLHVTYVPAQEKNFTTAPAICHDGKAHFPREGVFVSNGTHWFVTQRNFYEPQIITTDNTFVSGNCDVVIGIVNNTVYDPLQPELDSGGGGSDIDPYKEFGSSYQLLNFLPLDFFPDLNALVDTATALYEEELTGREHCSPHHTAIRQALVCWDELTKLIAWMSSNITSEQVRTIIVNHVNDTWGLKVRQSLWFHLSCLTFGQHTVQEFLVSFGVWIRTPAPYRPPNAPILSTLPEHTVIC

SEQ ID NO: 11638 - protein, 1301 aa, Artificial Sequence
  SARS-CoV-2/Iceland/192/2020__EPI_ISL_417819 spike protein (1-1147)(T874C_S1055C) WhcAg construct
MFVFFVLLPLVSSQCVNLTTRTQLPPAYTNSFTRGVYYPDKVFRSSVLHSTQDLFLPFFSNVTWFHAIHVSGTNGTKRFDNPVLPFNDGVYFASTEKSNIIRGWIFGTTLDSKTQSLLIVNNATNVVIKVCEFQFCNDPFLGVYYHKNNKSWMESEFRVYSSANNCTFEYVSQPFLMDLEGKQGNFKNLREFVFKNIDGYFKIYSKHTPINLVRDLPQGFSALEPLVDLPIGINITRFQTLLALHRSYLTPGDSSSGWTAGAAAYYVGYLQPRTFLLKYNENGTITDAVDCALDPLSETKCTLKSFTVEKGIYQTSNFRVQPTESIVRFPNITNLCPFGEVFNATRFASVYAWNRKRISNCVADYSVLYNSASFSTFKCYGVSPTKLNDLCFTNVYADSFVIRGDEVRQIAPGQTGKIADYNYKLPDDFTGCVIAWNSNNLDSKVGGNYNYLYRLFRKSNLKPFERDISTEIYQAGSTPCNGVEGFNCYFPLQSYGFQPTNGVGYQPYRVVVLSFELLHAPATVCGPKKSTNLVKNKCVNFNFNGLTGTGVLTESNKKFLPFQQFGRDIADTTDAVRDPQTLEILDITPCSFGGVSVITPGTNTSNQVAVLYQGVNCTEVPVAIHADQLTPTWRVYSTGSNVFQTRAGCLIGAEHVNNSYECDIPIGAGICASYQTQTNSPRRARSVASQSIIAYTMSLGAENSVAYSNNSIAIPTNFTISVTTEILPVSMTKTSVDCTMYICGDSTECSNLLLQYGSFCTQLNRALTGIAVEQDKNTQEVFAQVKQIYKTPPIKDFGGFNFSQILPDPSKPSKRSFIEDLLFNKVTLADAGFIKQYGDCLGDIAARDLICAQKFNGLTVLPPLLTDEMIAQYCSALLAGTITSGWTFGAGAALQIPFAMQMAYRFNGIGVTQNVLYENQKLIANQFNSAIGKIQDSLSSTASALGKLQDVVNQNAQALNTLVKQLSSNFGAISSVLNDILSRLDKVEAEVQIDRLITGRLQSLQTYVTQQLIRAAEIRASANLAATKMSECVLGQSKRVDFCGKGYHLMSFPQCAPHGVVFLHVTYVPAQEKNFTTAPAICHDGKAHFPREGVFVSNGTHWFVTQRNFYEPQIITTDNTFVSGNCDVVIGIVNNTVYDPLQPELDSGGGGSDIDPYKEFGSSYQLLNFLPLDFFPDLNALVDTATALYEEELTGREHCSPHHTAIRQALVCWDELTKLIAWMSSNITSEQVRTIIVNHVNDTWGLKVRQSLWFHLSCLTFGQHTVQEFLVSFGVWIRTPAPYRPPNAPILSTLPEHTVIC

SEQ ID NO: 11639 - protein, 1301 aa, Artificial Sequence
  SARS-CoV-2/Belgium/ULG-6939/2020__EPI_ISL_417020 spike protein (1-1147)(T874C_S1055C) WhcAg construct
MFVFLVLLPLVSSQCVNLTTRTQLPPAYTNSFTRGVYYPDKVFRSSVLHSTQDLFLPFFSNVTWFHAIHVSGTNGTKRFDNPVLPFNDGVYFASTEKSNIIRGWIFGTTLDSKTQSLLIVNNATNVVIKVCEFQFCNDPFLGVYYHKNNKSWMESEFRVYSSANNCTFEYVSQPFLMDLEGKQGNFKNLREFVFKNIDGYFKIYSKHTPINLVRDLPQGFSALEPLVDLPIGINITRFQTLLALHRSYLTPGDSSSGWTAGAAAYYVGYLQPRTFLLKYNENGTITDAVDCALDPLSETKCTLKSFTVEKGIYQTSNFRVQPTESIVRFPNITNLCPFGEVFNATRFASVYAWNRKRISNCVADYSVLYNSASFSTFKCYGVSPTKLNDLCFTNVYADSFVIRGDEVRQIAPGQTGKIADYNYKLPDDFTGCVIAWNSNNLDSKVGGNYNYLYRLFRKSNLKPFERDISTEIYQAGSTPCNGVEGFNCYFPLQSYGFQPTNGVGYQPYRVVVLSFELLHAPATVCGPKKSTNLVKNKCVNFNFNGLTGTGVLTESNKKFLPFQQFGRDIADTTDAVRDPQTLEILDITPCSFGGVSVITPGTNTSNQVAVLYQGVNCTEVPVAIHADQLTPTWRVYSTGSNVFQTRAGCLIGAEHVNNSYECDIPIGAGICASYQTQTNSPRRARSVASQSIIAYTMSLGAENSVVYSNNSIAIPTNFTISVTTEILPVSMTKTSVDCTMYICGDSTECSNLLLQYGSFCTQLNRALTGIAVEQDKNTQEVFAQVKQIYKTPPIKDFGGFNFSQILPDPSKPSKRSFIEDLLFNKVTLADAGFIKQYGDCLGDIAARDLICAQKFNGLTVLPPLLTDEMIAQYCSALLAGTITSGWTFGAGAALQIPFAMQMAYRFNGIGVTQNVLYENQKLIANQFNSAIGKIQDSLSSTASALGKLQDVVNQNAQALNTLVKQLSSNFGAISSVLNDILSRLDKVEAEVQIDRLITGRLQSLQTYVTQQLIRAAEIRASANLAATKMSECVLGQSKRVDFCGKGYHLMSFPQCAPHGVVFLHVTYVPAQEKNFTTAPAICHDGKAHFPREGVFVSNGTHWFVTQRNFYEPQIITTDNTFVSGNCDVVIGIVNNTVYDPLQPELDSGGGGSDIDPYKEFGSSYQLLNFLPLDFFPDLNALVDTATALYEEELTGREHCSPHHTAIRQALVCWDELTKLIAWMSSNITSEQVRTIIVNHVNDTWGLKVRQSLWFHLSCLTFGQHTVQEFLVSFGVWIRTPAPYRPPNAPILSTLPEHTVIC

SEQ ID NO: 11640 - protein, 1301 aa, Artificial Sequence
  SARS-CoV-2/France/HF2496/2020__EPI_ISL_418231 spike protein (1-1147)(T874C_S1055C) WhcAg construct
MFVFLVLLPLVSSQCVNLTTRTQLPPAYTNSFTRGVYYPDKVFRSSVLHSTQDLFLPFFSNVTWFHAIHVSGTNGTKRFDNPVLPFNDGVYFASTEKSNIIRGWIFGTTLDSKTQSLLIVNNATNVVIKVCEFQFCNDPFLGVYYHKNNKSWMESEFRVYSSANNCTFEYVSQPFLMDLEGKQGNFKNLREFVFKNIDGYFKIYSKHTPINLVRDLPQGFSALEPLVDLPIGINITRFQTLLALHRSYLTPGDSSSGWTAGAAAYYVGYLQPRTFLLKYNENGTITDAVDCALDPLSETKCTLKSFTVEKGIYQTSNFRVQPTESIVRFPNITNLCPFGEVFNATRFASVYAWNRKRISNCVADYSVLYNSASFSTFKCYGVSPTKLNDLCFTNVYADSFVIRGDEVRQIAPGQTGKIADYNYKLPDDFTGCVIAWNSNNLDSKVGGNYNYLYRLFRKSNLKPFERDISTEIYQAGSTPCNGVEGFNCYFPLQSYGFQPTNGVGYQPYRVVVLSFELLHAPATVCGPKKSTNLVKNKCVNFNFNGLTGTGVLTESNKKFLPFQQFGRDIADTTDAVRDPQTLEILDITPCSFGGVSVITPGTNTSNQVAVLYQGVNCTEVPVAIHADQLTPTWRVYSTGSNVFQTRAGCLIGAEHVNNSYECDIPIGAGICASYQTQTNSPRRARSVASQSIIAYTMSLGAENSVAYSNNSIAIPTNFTISVTTEILPVSMTKTSVDCTMYICGDSTECSNLLLQYGSFCTQLNRALTGIAVEQDKNTQEVFAQVKQIYKTPPIKDFGGFNFSQILPDPSKPSKRSFIEDLLFNKVTLADAGFIKQYGDCLGDIVARDLICAQKFNGLTVLPPLLTDEMIAQYCSALLAGTITSGWTFGAGAALQIPFAMQMAYRFNGIGVTQNVLYENQKLIANQFNSAIGKIQDSLSSTASALGKLQDVVNQNAQALNTLVKQLSSNFGAISSVLNDILSRLDKVEAEVQIDRLITGRLQSLQTYVTQQLIRAAEIRASANLAATKMSECVLGQSKRVDFCGKGYHLMSFPQCAPHGVVFLHVTYVPAQEKNFTTAPAICHDGKAHFPREGVFVSNGTHWFVTQRNFYEPQIITTDNTFVSGNCDVVIGIVNNTVYDPLQPELDSGGGGSDIDPYKEFGSSYQLLNFLPLDFFPDLNALVDTATALYEEELTGREHCSPHHTAIRQALVCWDELTKLIAWMSSNITSEQVRTIIVNHVNDTWGLKVRQSLWFHLSCLTFGQHTVQEFLVSFGVWIRTPAPYRPPNAPILSTLPEHTVIC

SEQ ID NO: 11641 - protein, 1301 aa, Artificial Sequence
  SARS-CoV-2/USA/WA-UW291/2020__EPI_ISL_418076 spike protein (1-1147)(T874C_S1055C) WhcAg construct
MFVFLVLLPLVSSQCVNLTTRTQLPPAYTNSFTRGVYYPDKVFRSSVLHSTQDLFLPFFSNVTWFHAIHVSGTNGTKRFDNPVLPFNDGVYFASTEKSNIIRGWIFGTTLDSKTQSLLIVNNATNVVIKVCEFQFCNDPFLGVYYHKNNKSWMESEFRVYSSANNCTFEYVSQPFLMDLEGKQGNFKNLREFVFKNIDGYFKIYSKHTPINLVRDLPQGFSALEPLVDLPIGINITRFQTLLALHRSYLTPGDSSSGWTAGAAAYYVGYLQPRTFLLKYNENGTITDAVDCALDPLSETKCTLKSFTVEKGIYQTSNFRVQPTESIVRFPNITNLCPFGEVFNATRFASVYAWNRKRISNCVADYSVLYNSASFSTFKCYGVSPTKLNDLCFTNVYADSFVIRGDEVRQIAPGQTGKIADYNYKLPDDFTGCVIAWNSNNLDSKVGGNYNYLYRLFRKSNLKPFERDISTEIYQAGSTPCNGVEGFNCYFPLQSYGFQPTNGVGYQPYRVVVLSFELLHAPATVCGPKKSTNLVKNKCVNFNFNGLTGTGVLTESNKKFLPFQQFGRDIADTTDAVRDPQTLEILDITPCSFGGVSVITPGTNTSNQVAVLYQGVNCTEVPVAIHADQLTPTWRVYSTGSNVFQTRAGCLIGAEHVNNSYECDIPIGAGICASYQTQTNSPRRARSVASQSIIAYTMSLGAENSVAYSNNSIAIPTNFTISVTTEILPVSMTKTSVDCTMYICGDSTECSNLLLQYGSFCTQLNRALTGIAVEQDKNTQEVFAQVKQIYKTPPIKDFGGFNFSQILPDPSKPSKRSFIEDLLFNKVTLADAGFIKQYGDCLGDIAARDLICAQKFNGLTVLPPLLTDEMIAQYCSALLAGTITSGWTFGAGAALQIPFAMQMAYRFNGIGVTQNVLYENQKLIANQFNSAIGKIQYSLSSTASALGKLQDVVNQNAQALNTLVKQLSSNFGAISSVLNDILSRLDKVEAEVQIDRLITGRLQSLQTYVTQQLIRAAEIRASANLAATKMSECVLGQSKRVDFCGKGYHLMSFPQCAPHGVVFLHVTYVPAQEKNFTTAPAICHDGKAHFPREGVFVSNGTHWFVTQRNFYEPQIITTDNTFVSGNCDVVIGIVNNTVYDPLQPELDSGGGGSDIDPYKEFGSSYQLLNFLPLDFFPDLNALVDTATALYEEELTGREHCSPHHTAIRQALVCWDELTKLIAWMSSNITSEQVRTIIVNHVNDTWGLKVRQSLWFHLSCLTFGQHTVQEFLVSFGVWIRTPAPYRPPNAPILSTLPEHTVIC

SEQ ID NO: 11642 - protein, 1301 aa, Artificial Sequence; identical to SEQ ID NO: 11605
  SARS-CoV-2/Portugal/PT0034/2020__EPI_ISL_418019 spike protein (1-1147)(T874C_S1055C) WhcAg construct

SEQ ID NO: 11643 - protein, 1301 aa, Artificial Sequence; identical to SEQ ID NO: 11597
  SARS-CoV-2/Iceland/202/2020__EPI_ISL_417750 spike protein (1-1147)(T874C_S1055C) WhcAg construct

SEQ ID NO: 11644 - protein, 1301 aa, Artificial Sequence
  SARS-CoV-2/USA/WA-UW261/2020__EPI_ISL_418046 spike protein (1-1147)(T874C_S1055C) WhcAg construct
MFVFLVLLPLVSSQCVNLTTRTQLPPAYTNSFTRGVYYPDKVFRSSVLHSTQDLFLPFFSNVTWFHAIHVSGTNGTKRFDNPVLPFNDGVYFASTEKSNIIRGWIFGTTLDSKTQSLLIVNNATNVVIKVCEFQFCNDPFLGVYYHKNNKSWMESEFRVYSSANNCTFEYVSQPFLMDLEGKQGNFKNLREFVFKNIDGYFKIYSKHTPINLVRDLPQGFSALEPLVDLPIGINITRFQTLLALHRSYLTPGDSSSGWTAGAAAYYVGYLQPRTFLLKYNENGTITDAVDCALDPLSETKCTLKSFTVEKGIYQTSNFRVQPTESIVRFPNITNLCPFGEVFNATRFTSVYAWNRKRISNCVADYSVLYNSASFSTFKCYGVSPTKLNDLCFTNVYADSFVIRGDEVRQIAPGQTGKIADYNYKLPDDFTGCVIAWNSNNLDSKVGGNYNYLYRLFRKSNLKPFERDISTEIYQAGSTPCNGVEGFNCYFPLQSYGFQPTNGVGYQPYRVVVLSFELLHAPATVCGPKKSTNLVKNKCVNFNFNGLTGTGVLTESNKKFLPFQQFGRDIADTTDAVRDPQTLEILDITPCSFGGVSVITPGTNTSNQVAVLYQDVNCTEVPVAIHADQLTPTWRVYSTGSNVFQTRAGCLIGAEHVNNSYECDIPIGAGICASYQTQTNSPRRARSVASQSIIAYTMSLGAENSVAYSNNSIAIPTNFTISVTTEILPVSMTKTSVDCTMYICGDSTECSNLLLQYGSFCTQLNRALTGIAVEQDKNTQEVFAQVKQIYKTPPIKDFGGFNFSQILPDPSKPSKRSFIEDLLFNKVTLADAGFIKQYGDCLGDIAARDLICAQKFNGLTVLPPLLTDEMIAQYCSALLAGTITSGWTFGAGAALQIPFAMQMAYRFNGIGVTQNVLYENQKLIANQFNSAIGKIQDSLSSTASALGKLQDVVNQNAQALNTLVKQLSSNFGAISSVLNDILSRLDKVEAEVQIDRLITGRLQSLQTYVTQQLIRAAEIRASANLAATKMSECVLGQSKRVDFCGKGYHLMSFPQCAPHGVVFLHVTYVPAQEKNFTTAPAICHDGKAHFPREGVFVSNGTHWFVTQRNFYEPQIITTDNTFVSGNCDVVIGIVNNTVYDPLQPELDSGGGGSDIDPYKEFGSSYQLLNFLPLDFFPDLNALVDTATALYEEELTGREHCSPHHTAIRQALVCWDELTKLIAWMSSNITSEQVRTIIVNHVNDTWGLKVRQSLWFHLSCLTFGQHTVQEFLVSFGVWIRTPAPYRPPNAPILSTLPEHTVIC

SEQ ID NO: 11645 - protein, 1301 aa, Artificial Sequence
  SARS-CoV-2/Portugal/PT0035/2020__EPI_ISL_418020 spike protein (1-1147)(T874C_S1055C) WhcAg construct
MFVFLVLLPLVSSQCVNLTTRTQLPPAYTNSFTRGVYYPDKVFRSSVLHSTQDLFLPFFSNVTWFHAIHVSGTNGTKRFDNPVLPFNDGVYFASTEKSNIIRGWIFGTTLDSKTQSLLIVNNATNVVIKVCEFQFCNDPFLGVYYHKNNKSWMESEFRVYSSANNCTFEYVSQPFLMDLEGKQGNFKNLREFVFKNIDGYFKIYSKHTPINLVRDLPQGFSALEPLVDLPIGINITRFQTLLALHRSYLTPGDSSSGWTAGAAAYYVGYLQPRTFLLKYNENGTITDAVDCALDPLSETKCTLKSFTVEKGIYQTSNFRVQPTESIVRFPNITNLCPFGEVFNATRFASVYAWNRKRISNCVADYSVLYNSASFSTFKCYGVSPTKLNDLCFTNVYADSFVIRGDEVRQIAPGQTGKIADYNYKLPDDFTGCVIAWNSNNLDSKVGGNYNYLYRLFRKSNLKPFERDISTEIYQAGSTPCNGVEGFNCYFPLQSYGFQPTNGVGYQPYRVVVLSFELLHAPATVCGPKKSTNLVKNKCVNFNFNGLTGTGVLTESNKKFLPFQQFGRDIADTTDAVRDPQTLEILDITPCSFGGVSVITPGTNTSNQVAVLYQDVNCTEVPVAIHADQLTPTWRVYSTGSNVFQTRAGCLIGAEHVNNSYECDIPIGAGICASYQTQTNSPRRARSVASQSIIAYTMSLGAENSVAYSNNSIAIPTNFTISVTTEILPVSMTKTSVDCTMYICGDSTECSNLLLQYGSFCTQLNRALTGIAVEQDKNTQEVFAQVKQIYKTPPIKDFGGFNFSQILPDPSKPSKRSFIEDLLFNKVTLADAGFIKQYGDCLGDISARDLICAQKFNGLTVLPPLLTDEMIAQYCSALLAGTITSGWTFGAGAALQIPFAMQMAYRFNGIGVTQNVLYENQKLIANQFNSAIGKIQDSLSSTASALGKLQDVVNQNAQALNTLVKQLSSNFGAISSVLNDILSRLDKVEAEVQIDRLITGRLQSLQTYVTQQLIRAAEIRASANLAATKMSECVLGQSKRVDFCGKGYHLMSFPQCAPHGVVFLHVTYVPAQEKNFTTAPAICHDGKAHFPREGVFVSNGTHWFVTQRNFYEPQIITTDNTFVSGNCDVVIGIVNNTVYDPLQPELDSGGGGSDIDPYKEFGSSYQLLNFLPLDFFPDLNALVDTATALYEEELTGREHCSPHHTAIRQALVCWDELTKLIAWMSSNITSEQVRTIIVNHVNDTWGLKVRQSLWFHLSCLTFGQHTVQEFLVSFGVWIRTPAPYRPPNAPILSTLPEHTVIC

SEQ ID NO: 11646 - protein, 1301 aa, Artificial Sequence
  SARS-CoV-2/USA/NY-NYUMC7/2020__EPI_ISL_418192 spike protein (1-1147)(T874C_S1055C) WhcAg construct
MFVFLVLLPLVSSQCVNLTTRTQLPPAYTNSFTRGVYYPDKVFRSSVLHSTQDLFLPFFSNVTWFHAIHVSGTNGTKRFDNPVLPFNDGVYFASTEKSNIIRGWIFGTTLDSKTQSLLIVNNATNVVIKVCEFQFCNDPFLGVYHHKNNKSWMESEFRVYSSANNCTFEYVSQPFLMDLEGKQGNFKNLREFVFKNIDGYFKIYSKHTPINLVRDLPQGFSALEPLVDLPIGINITRFQTLLALHRSYLTPGDSSSGWTAGAAAYYVGYLQPRTFLLKYNENGTITDAVDCALDPLSETKCTLKSFTVEKGIYQTSNFRVQPTESIVRFPNITNLCPFGEVFNATRFASVYAWNRKRISNCVADYSVLYNSASFSTFKCYGVSPTKLNDLCFTNVYADSFVIRGDEVRQIAPGQTGKIADYNYKLPDDFTGCVIAWNSNNLDSKVGGNYNYLYRLFRKSNLKPFERDISTEIYQAGSTPCNGVEGFNCYFPLQSYGFQPTNGVGYQPYRVVVLSFELLHAPATVCGPKKSTNLVKNKCVNFNFNGLTGTGVLTESNKKFLPFQQFGRDIADTTDAVRDPQTLEILDITPCSFGGVSVITPGTNTSNQVAVLYQGVNCTEVPVAIHADQLTPTWRVYSTGSNVFQTRAGCLIGAEHVNNSYECDIPIGAGICASYQTQTNSPRRARSVASQSIIAYTMSLGAENSVAYSNNSIAIPTNFTISVTTEILPVSMTKTSVDCTMYICGDSTECSNLLLQYGSFCTQLNRALTGIAVEQDKNTQEVFAQVKQIYKTPPIKDFGGFNFSQILPDPSKPSKRSFIEDLLFNKVTLADAGFIKQYGDCLGDIAARDLICAQKFNGLTVLPPLLTDEMIAQYCSALLAGTITSGWTFGAGAALQIPFAMQMAYRFNGIGVTQNVLYENQKLIANQFNSAIGKIQDSLSSTASALGKLQDVVNQNAQALNTLVKQLSSNFGAISSVLNDILSRLDKVEAEVQIDRLITGRLQSLQTYVTQQLIRAAEIRASANLAATKMSECVLGQSKRVDFCGKGYHLMSFPQCAPHGVVFLHVTYVPAQEKNFTTAPAICHDGKAHFPREGVFVSNGTHWFVTQRNFYEPQIITTDNTFVSGNCDVVIGIVNNTVYDPLQPELDSGGGGSDIDPYKEFGSSYQLLNFLPLDFFPDLNALVDTATALYEEELTGREHCSPHHTAIRQALVCWDELTKLIAWMSSNITSEQVRTIIVNHVNDTWGLKVRQSLWFHLSCLTFGQHTVQEFLVSFGVWIRTPAPYRPPNAPILSTLPEHTVIC

SEQ ID NO: 11647 - protein, 1301 aa, Artificial Sequence
  SARS-CoV-2/Iceland/189/2020__EPI_ISL_417709 spike protein (1-1147)(T874C_S1055C) WhcAg construct
MFVFLVLLPLVSSQCVNLTTRTQLPPAYTNSFTRGVYYPDKVFRSSVLHSTQDLFLPFFSNVTWFHAIHVSGTNGTKRFDNPVLPFNDGVYFASTEKSNIIRGWIFGTTLDSKTQSLLIVNNATNVVIKVCEFQFCNDPFLGVYYHKNNKSWMESEFRVYSSANNCTFEYVSQPFLMDLEGKQGNFKNLREFVFKNIDGYFKIYSKHTPINLVRDLPQGFSALEPLVDLPIGINITRFQTLLALHRSYLTPGDSSSGWTAGAAAYYVGYLQPRTFLLKYNENGTITDAVDCALDPLSETKCTLKSFTVEKGIYQTSNFRVQPTESIVRFPNITNLCPFGEVFNATRFASVYAWNRKRISNCVADYSVLYNSASFSTFKCYGVSPTKLNDLCFTNVYADSFVIRGDEVRQIAPGQTGKIADYNYKLPDDFTGCVIAWNSNNLDSKVGGNYNYLYRLFRKSNLKPFERDISTEIYQAGSTPCNGVEGFNCYFPLQSYGFQPTNGVGYQPYRVVVLSFELLHAPATVCGPKKSTNLVKNKCVNFNFNGLTGTGVLTESNKKFLPFQQFGRDIADTTDAVRDPQTLEILDITPCSFGGVSVITPGTNTSNQVAVLYQGVNCTEVPVAIHADQLTPTWRVYSTGSNVFQTRAGCLIGAEHVNNSYECDIPIGAGICASYQTQTNSPRRARSVASQSIIAYTMSLGAENSVAYSNNSIAIPTNFTISVTTEILPVSMTKTSVDCTMYICGDSTECSNLLLQYGSFCTQLNRALTGIAVEQDKNTQEVFAQVKQIYKTPPIKDFGGFNFSQILPDPSKPSKRSFIEDLLFNKVTLADAGFTKQYGDCLGDIAARDLICAQKFNGLTVLPPLLTDEMIAQYCSALLAGTITSGWTFGAGAALQIPFAMQMAYRFNGIGVTQNVLYENQKLIANQFNSAIGKIQDSLSSTASALGKLQDVVNQNAQALNTLVKQLSSNFGAISSVLNDILSRLDKVEAEVQIDRLITGRLQSLQTYVTQQLIRAAEIRASANLAATKMSECVLGQSKRVDFCGKGYHLMSFPQCAPHGVVFLHVTYVPAQEKNFTTAPAICHDGKAHFPREGVFVSNGTHWFVTQRNFYEPQIITTDNTFVSGNCDVVIGIVNNTVYDPLQPELDSGGGGSDIDPYKEFGSSYQLLNFLPLDFFPDLNALVDTATALYEEELTGREHCSPHHTAIRQALVCWDELTKLIAWMSSNITSEQVRTIIVNHVNDTWGLKVRQSLWFHLSCLTFGQHTVQEFLVSFGVWIRTPAPYRPPNAPILSTLPEHTVIC

SEQ ID NO: 11648 - protein, 1301 aa, Artificial Sequence
  SARS-CoV-2/Australia/NSW56/2020__EPI_ISL_417408 spike protein (1-1147)(T874C_S1055C) WhcAg construct
MFVFLVLLPLVSSQCVNLTTRTQLPPAYTNSFTRGVYYPDKVFRSSVLHSTQDLFLPFFSNVTWFHAIHVSGTNGTKRFDNPVLPFNDGVYFASTEKSNIIRGWIFGTTLDSKTQSLLIVNNATNVVIKVCEFQFCNDPFLGVYYHKNNKSWMESEFRVYSSANNCTFEYVSQPFLMDLEGKQGNFKNLREFVFKNIDGYFKIYSKHTPINLVRDLPQGFSALEPLVDLPIGINITRFQTLLALHRSYLTPGDSSSGWTAGAAAYYVGYLQPRTFLLKYNENGTITDAVDCALDPLSETKCTLKSFTVEKGIYQTSNFRVQPTESIVRFPNITNLCPFGEVFNATRFASVYAWNRKRISNCVADYSVLYNSASFSTFKCYGVSPTKLNDLCFTNVYADSFVIRGDEVRQIAPGQTGKIADYNYKLPDDFTGCVIAWNSNNLDSKVGGNYNYLYRLFRKSNLKPFERDISTEIYQAGSTPCNGVEGFNCYFPLQSYGFQPTNGVGYQPYRVVVLSFELLHAPATVCGPKKSTNLVKNKCVNFNFNGLTGTGVLTESNKKFLPFQQFGRDIADTTDAVRDPQTLEILDITPCSFGGVSVITPGTNTSNQVAVLYQDVNCTEVPVAIHADQLTPTWRVYSTGSNVFQTRAGCLIGAEHVNNSYECDIPIGAGICASYQTQTNSPRRARSVASQSIIAYTMSLGAENSVAYSNNSIAIPTNFTISVTTEILPVSMTKTSVDCTMYICGDSTECSNLLLQYGSFCTQLNRALTGIAVEQDKNTQEVFAQVKQIYKTPPIKDFGGFNFSQILPDSSKPSKRSFIEDLLFNKVTLADAGFIKQYGDCLGDIAARDLICAQKFNGLTVLPPLLTDEMIAQYCSALLAGTITSGWTFGAGAALQIPFAMQMAYRFNGIGVTQNVLYENQKLIANQFNSAIGKIQDSLSSTASALGKLQDVVNQNAQALNTLVKQLSSNFGAISSVLNDILSRLDKVEAEVQIDRLITGRLQSLQTYVTQQLIRAAEIRASANLAATKMSECVLGQSKRVDFCGKGYHLMSFPQCAPHGVVFLHVTYVPAQEKNFTTAPAICHDGKAHFPREGVFVSNGTHWFVTQRNFYEPQIITTDNTFVSGNCDVVIGIVNNTVYDPLQPELDSGGGGSDIDPYKEFGSSYQLLNFLPLDFFPDLNALVDTATALYEEELTGREHCSPHHTAIRQALVCWDELTKLIAWMSSNITSEQVRTIIVNHVNDTWGLKVRQSLWFHLSCLTFGQHTVQEFLVSFGVWIRTPAPYRPPNAPILSTLPEHTVIC

SEQ ID NO: 11649 - protein, 1301 aa, Artificial Sequence
  SARS-CoV-2/Iceland/280/2020__EPI_ISL_417608 spike protein (1-1147)(T874C_S1055C) WhcAg construct
MFVFLVLLPLVSSQCVNLTTRTQLPPAYTNSFTRGVYYPDKVFRSSVLHSTQDLFLPFFSNVTWFHAIHVSGTNGTKRFDNPVLPFNDGVYFASTEKSNIIRGWIFGTTLDSKTQSLLIVNNATNVVIKVCEFQFCNDPFLGVYYHKNNKSWMESEFRVYSSANNCTFEYVSQPFLMDLEGKQGNFKNLREFVFKNIDGYFKIYSKHTPINLVRDLPQGFSALEPLVDLPIGINITRFQTLLALHRSYLTPGDSSSGWTAGAAAYYVGYLQPRTFLLKYNENGTITDAVDCALDPLSETKCTLKSFTVEKGIYQTSNFRVQPTESIVRFPNITNLCPFGEVFNATRFASVYAWNRKRISNCVADYSVLYNSASFSTFKCYGVSPTKLNDLCFTNVYADSFVIRGDEVRQIAPGQTGKIADYNYKLPDDFTGCVIAWNSNNLDSKVGGNYNYLYRLFRKSNLKPFERDISTEIYQAGSTPCNGVEGFNCYFPLQSYGFQPTNGVGYQPYRVVVLSFELLHAPATVCGPKKSTNLVKNKCVNFNFNGLTGTGVLTESNKKFLPFQQFGRDIADTTDAVRDPQTLEILDITPCSFGGVSVITPGTNTSNQVAVLYQGVNCTEVPVAIHADQLTPTWRVYSTGSNVFQTRAGCLIGAEHVNNSYECDIPIGAGICASYHTQTNSPRRARSVASQSIIAYTMSLGAENSVAYSNNSIAIPTNFTISVTTEILPVSMTKTSVDCTMYICGDSTECSNLLLQYGSFCTQLNRALTGIAVEQDKNTQEVFAQVKQIYKTPPIKDFGGFNFSQILPDPSKPSKRSFIEDLLFNKVTLADAGFIKQYGDCLGDIAARDLICAQKFNGLTVLPPLLTDEMIAQYCSALLAGTITSGWTFGAGAALQIPFAMQMAYRFNGIGVTQNVLYENQKLIANQFNSAIGKIQDSLSSTASALGKLQDVVNQNAQALNTLVKQLSSNFGAISSVLNDILSRLDKVEAEVQIDRLITGRLQSLQTYVTQQLIRAAEIRASANLAATKMSECVLGQSKRVDFCGKGYHLMSFPQCAPHGVVFLHVTYVPAQEKNFTTAPAICHDGKAHFPREGVFVSNGTHWFVTQRNFYEPQIITTDNTFVSGNCDVVIGIVNNTVYDPLQPELDSGGGGSDIDPYKEFGSSYQLLNFLPLDFFPDLNALVDTATALYEEELTGREHCSPHHTAIRQALVCWDELTKLIAWMSSNITSEQVRTIIVNHVNDTWGLKVRQSLWFHLSCLTFGQHTVQEFLVSFGVWIRTPAPYRPPNAPILSTLPEHTVIC

SEQ ID NO: 11650 - protein, 1301 aa, Artificial Sequence; identical to SEQ ID NO: 11605
  SARS-CoV-2/Iceland/247/2020__EPI_ISL_417575 spike protein (1-1147)(T874C_S1055C) WhcAg construct

SEQ ID NO: 11651 - protein, 1301 aa, Artificial Sequence
  SARS-CoV-2/Iceland/238/2020__EPI_ISL_417566 spike protein (1-1147)(T874C_S1055C) WhcAg construct
MFVFLVLLPLVSSQCVNLTTRTQLPPAYTNSFTRGVYYPDKVFRSSVLHSTQDLFLPFFSNVTWFHAIHVSGTNGTKRFDNPVLPFNDGVYFASTEKSNIIRGWIFGTTLDSKTQSLLIVNNATNVVIKVCEFQFCNDPFLGVYYHKNNKSWMESEFRVYSSANNCTFEYVSQPFLMDLEGKQGNFKNLREFVFKNIDGYFKIYSKHTPINLVRDLPQGFSALEPLVDLPIGINITRFQTLLALHRSYLTPGDSSSGWTAGAAAYYVGYLQPRTFLLKYNENGTITDAVDCALDPLSETKCTLKSFTVEKGIYQTSNFRVQPTESIVRFPNITNLCPFGEVFNATRFASVYAWNRKRISNCVADYSVLYNSASFSTFKCYGVSPTKLNDLCFTNVYADSFVIRGDEVRQIAPGQTGKIADYNYKLPDDFTGCVIAWNSNNLDSKVGGNYNYLYRLFRKSNLKPFERDISTEIYQAGSTPCNGVEGFNCYFPLQSYGFQPTNGVGYQPYRVVVLSFELLHAPATVCGPKKSTNLVKNKCVNFNFNGLTGTGVLTESNKKFLPFQQFGRDIADTTDAVRDPQTLEILDITPCSFGGVSVITPGTNTSNQVAVLYQGVNCTEVPVAIHADQLTPTWRVYSTGSNVFQTRAGCLIGAEHVNNSYECDIPIGAGICASYQTQTNSPRRARSVASQSIIAYTMSLGAENSVAYSNNSIAIPTNFTISVTTEILPVSMTKTSVDCTMYICGDSTECSNLLLQYGSFCTQLNRALTGIAVEQDKNTQEVFAQVKQIYKTPPIKDFGGFNFSQILPDPSKPSKRSFIEDLLFNKVTLADVGFIKQYGDCLGDIAARDLICAQKFNGLTVLPPLLTDEMIAQYCSALLAGTITSGWTFGAGAALQIPFAMQMAYRFNGIGVTQNVLYENQKLIANQFNSAIGKIQDSLSSTASALGKLQDVVNQNAQALNTLVKQLSSNFGAISSVLNDILSRLDKVEAEVQIDRLITGRLQSLQTYVTQQLIRAAEIRASANLAATKMSECVLGQSKRVDFCGKGYHLMSFPQCAPHGVVFLHVTYVPAQEKNFTTAPAICHDGKAHFPREGVFVSNGTHWFVTQRNFYEPQIITTDNTFVSGNCDVVIGIVNNTVYDPLQPELDSGGGGSDIDPYKEFGSSYQLLNFLPLDFFPDLNALVDTATALYEEELTGREHCSPHHTAIRQALVCWDELTKLIAWMSSNITSEQVRTIIVNHVNDTWGLKVRQSLWFHLSCLTFGQHTVQEFLVSFGVWIRTPAPYRPPNAPILSTLPEHTVIC

SEQ ID NO: 11652 - protein, 1301 aa, Artificial Sequence
  SARS-CoV-2/Greece/16/2020__EPI_ISL_418265 spike protein (1-1147)(T874C_S1055C) WhcAg construct
MFVFLVLLPLVSSQCVNLTTRTQLPPAYTNSFTRGVYYPDKVFRSSVLHSTQDLFLPFFSNVTWFHAIHVSGTNGTKRFDNPVLPFNDGVYFASTEKSNIIRGWIFGTTLDSKTQSLLIVNNATNVVIKVCEFQFCNDPFLGVYYHKNNKSWMESEFRVYSSANNCTFEYVSQPFLMDLEGKQGNFKNLREFVFKNVDGYFKIYSKHTPINLVRDLPQGFSALEPLVDLPIGINITRFQTLLALHRSYLTPGDSSSGWTAGAAAYYVGYLQPRTFLLKYNENGTITDAVDCALDPLSETKCTLKSFTVEKGIYQTSNFRVQPTESIVRFPNITNLCPFGEVFNATRFASVYAWNRKRISNCVADYSVLYNSASFSTFKCYGVSPTKLNDLCFTNVYADSFVIRGDEVRQIAPGQTGKIADYNYKLPDDFTGCVIAWNSNNLDSKVGGNYNYLYRLFRKSNLKPFERDISTEIYQAGSTPCNGVEGFNCYFPLQSYGFQPTNGVGYQPYRVVVLSFELLHAPATVCGPKKSTNLVKNKCVNFNFNGLTGTGVLTESNKKFLPFQQFGRDIADTTDAVRDPQTLEILDITPCSFGGVSVITPGTNTSNQVAVLYQDVNCTEVPVAIHADQLTPTWRVYSTGSNVFQTRAGCLIGAEHVNNSYECDIPIGAGICASYQTQTNSPRRARSVASQSIIAYTMSLGAENSVAYSNNSIAIPTNFTISVTTEILPVSMTKTSVDCTMYICGDSTECSNLLLQYGSFCTQLNRALTGIAVEQDKNTQEVFAQVKQIYKTPPIKDFGGFNFSQILPDPSKPSKRSFIEDLLFNKVTLADAGFIKQYGDCLGDIAARDLICAQKFNGLTVLPPLLTDEMIAQYCSALLAGTITSGWTFGAGAALQIPFAMQMAYRFNGIGVTQNVLYENQKLIANQFNSAIGKIQDSLSSTASALGKLQDVVNQNAQALNTLVKQLSSNFGAISSVLNDILSRLDKVEAEVQIDRLITGRLQSLQTYVTQQLIRAAEIRASANLAATKMSECVLGQSKRVDFCGKGYHLMSFPQCAPHGVVFLHVTYVPAQEKNFTTAPAICHDGKAHFPREGVFVSNGTHWFVTQRNFYEPQIITTDNTFVSGNCDVVIGIVNNTVYDPLQPELDSGGGGSDIDPYKEFGSSYQLLNFLPLDFFPDLNALVDTATALYEEELTGREHCSPHHTAIRQALVCWDELTKLIAWMSSNITSEQVRTIIVNHVNDTWGLKVRQSLWFHLSCLTFGQHTVQEFLVSFGVWIRTPAPYRPPNAPILSTLPEHTVIC

SEQ ID NO: 11653 - protein, 1301 aa, Artificial Sequence
  SARS-CoV-2/Iceland/319/2020__EPI_ISL_417648 spike protein (1-1147)(T874C_S1055C) WhcAg construct
MFVFLVLLPLVSSQCVNLTTRTQLPPAYTNSFTRGVYYPDKVFRSSVLHSTQDLFLPFFSNVTWFHAIHVSGTNGTKRFDNPVLPFNDGVYFASTEKSNIIRGWIFGTTLDSKTQSLLIVNNATNVVIKVCEFQFCNDPFLGVYYHKNNKSWMESEFRVYSSANNCTFEYVSQPFLIDLEGKQGNFKNLREFVFKNIDGYFKIYSKHTPINLVRDLPQGFSALEPLVDLPIGINITRFQTLLALHRSYLTPGDSSSGWTAGAAAYYVGYLQPRTFLLKYNENGTITDAVDCALDPLSETKCTLKSFTVEKGIYQTSNFRVQPTESIVRFPNITNLCPFGEVFNATRFASVYAWNRKRISNCVADYSVLYNSASFSTFKCYGVSPTKLNDLCFTNVYADSFVIRGDEVRQIAPGQTGKIADYNYKLPDDFTGCVIAWNSNNLDSKVGGNYNYLYRLFRKSNLKPFERDISTEIYQAGSTPCNGVEGFNCYFPLQSYGFQPTNGVGYQPYRVVVLSFELLHAPATVCGPKKSTNLVKNKCVNFNFNGLTGTGVLTESNKKFLPFQQFGRDIADTTDAVRDPQTLEILDITPCSFGGVSVITPGTNTSNQVAVLYQGVNCTEVPVAIHADQLTPTWRVYSTGSNVFQTRAGCLIGAEHVNNSYECDIPIGAGICASYQTQTNSPRRARSVASQSIIAYTMSLGAENSVAYSNNSIAIPTNFTISVTTEILPVSMTKTSVDCTMYICGDSTECSNLLLQYGSFCTQLNRALTGIAVEQDKNTQEVFAQVKQIYKTPPIKDFGGFNFSQILPDPSKPSKRSFIEDLLFNKVTLADAGFIKQYGDCLGDIAARDLICAQKFNGLTVLPPLLTDEMIAQYCSALLAGTITSGWTFGAGAALQIPFAMQMAYRFNGIGVTQNVLYENQKLIANQFNSAIGKIQDSLSSTASALGKLQDVVNQNAQALNTLVKQLSSNFGAISSVLNDILSRLDKVEAEVQIDRLITGRLQSLQTYVTQQLIRAAEIRASANLAATKMSECVLGQSKRVDFCGKGYHLMSFPQCAPHGVVFLHVTYVPAQEKNFTTAPAICHDGKAHFPREGVFVSNGTHWFVTQRNFYEPQIITTDNTFVSGNCDVVIGIVNNTVYDPLQPELDSGGGGSDIDPYKEFGSSYQLLNFLPLDFFPDLNALVDTATALYEEELTGREHCSPHHTAIRQALVCWDELTKLIAWMSSNITSEQVRTIIVNHVNDTWGLKVRQSLWFHLSCLTFGQHTVQEFLVSFGVWIRTPAPYRPPNAPILSTLPEHTVIC

SEQ ID NO: 11654 - protein, 1301 aa, Artificial Sequence
  SARS-CoV-2/Congo/94/2020__EPI_ISL_417947 spike protein (1-1147)(T874C_S1055C) WhcAg construct
MFVFLVLLPLVSSQCVNLTTRTQLPPAYTNSFTRGVYYPDKVFRSSVLHSTQDLFLPFFSNVTWFHAIHVSGTNGTKRFDNPVLPFNDGVYFASTEKSNIIRGWIFGTTLDSKTQSLLIVNNATNVVIKVCEFQFCNDPFLGVYYHKNNKSWMESEFRVYSSANNCTFEYVSQPFLMDLEGKQGNFKNLREFVFKNIDGYFKIYSKHTPINLVRDLPQGFSALEPLVDLPIGINITRFQTLLALHRSYLTPGDSSSGWTAGAAAYYVGYLQPRTFLLKYNENGTITDAVDCALDPLSETKCTLKSFTVEKGIYQTSNFRVQPTESIVRFPNITNLCPFGEVFNATRFASVYAWNRKRISNCVADYSVLYNSASFSTFKCYGVSPTKLNDLCFTNVYADSFVIRGDEVRQIAPGQTGKIADYNYKLPDDFTGCVIAWNSNNLDSKVGGNYNYLYRLFRKSNLKPFERDISTEIYQAGSTPCNGVEGFNCYFPLQSYGFQPTNGVGYQPYRVVVLSFELLHAPATVCGPKKSTNLVKNKCVNFNFNGLTGTGVLTESNKKFLPFQQFGRDIADTTDAVRDPQTLEILDITPCSFGGVSVITPGTNTSNQVAVLYQGVNCTEVPVAIHADQLTPTWRVYSTGSNVFQTRAGCLIGAEHVNNSYECDIPIGAGICASYQTQTNSPRRARSVASQSIIAYTMSLGAENSVAYSNNSIAIPTNFTISVTTEILPVSMTKTSVDCTMYICGDSTECSNLLLQYGSFCTQLNRALTGIAVEQDKNTQEVFAQVKQIYKTPPIKDFGGFNFSQILPDPSKPSKRSFIEDILFNKVTLADAGFIKQYGDCLGDIAARDLICAQKFNGLTVLPPLLTDEMIAQYCSALLAGTITSGWTFGAGAALQIPFAMQMAYRFNGIGVTQNVLYENQKLIANQFNSAIGKIQDSLSSTASALGKLQDVVNQNAQALNTLVKQLSSNFGAISSVLNDILSRLDKVEAEVQIDRLITGRLQSLQTYVTQQLIRAAEIRASANLAATKMSECVLGQSKRVDFCGKGYHLMSFPQCAPHGVVFLHVTYVPAQEKNFTTAPAICHDGKAHFPREGVFVSNGTHWFVTQRNFYEPQIITTDNTFVSGNCDVVIGIVNNTVYDPLQPELDSGGGGSDIDPYKEFGSSYQLLNFLPLDFFPDLNALVDTATALYEEELTGREHCSPHHTAIRQALVCWDELTKLIAWMSSNITSEQVRTIIVNHVNDTWGLKVRQSLWFHLSCLTFGQHTVQEFLVSFGVWIRTPAPYRPPNAPILSTLPEHTVIC

SEQ ID NO: 11655 - protein, 1301 aa, Artificial Sequence
  SARS-CoV-2/Congo/158/2020__EPI_ISL_417950 spike protein (1-1147)(T874C_S1055C) WhcAg construct
MFVFLVLLPLVSSQCVNLTTRTQLPPAYTNSFTRGVYYPDKVFRSSVLHSTQDLFLPFFSNVTWFHAIHVSGTNGTKRFDNPVLPFNDGVYFASTEKSNIIRGWIFGTTLDSKTQSLLIVNNATNVVIKVCEFQFCNDPFLGVYYHKNNKSWMESEFRVYSSANNCTFEYVSQPFLMDLEGKQGNFKNLREFVFKNIDGYFKIYSKHTPINLVRDLPQGFSALEPLVDLPIGINITRFQTLLALHRSYLTPGDSSSGWTAGAAAYYVGYLQPRTFLLKYNENGTITDAVDCALDPLSETKCTLKSFTVEKGIYQTSNFRVQPTESIVRFPNITNLCPFGEVFNATRFASVYAWNRKRISNCVADYSVLYNSASFSTFKCYGVSPTKLNDLCFTNVYADSFVIRGDEVRQIAPGQTGKIADYNYKLPDDFTGCVIAWNSNNLDSKVGGNYNYLYRLFRKSNLKPFERDISTEIYQAGSTPCNGVEGFNCYFPLQSYGFQPTNGVGYQPYRVVVLSFELLHAPATVCGPKKSTNLVKNKCVNFNFNGLTGTGVLTESNKKFLPFQQFGRDIADTTDAVRDPQTLEILDITPCSFGGVSVITPGTNTSNQVAVLYQDVNCTEVPVAIHADQLTPTWRVYSTGSNVFQTRAGCLIGAEHVNNSYECDIPIGAGICASYQTQTNSPRRARSVASQSIIAYTMSLGAENSVAYSNNSIAIPTNFTISVTTEILPVSMTKTSVDCTMYICGDSTECSNLLLQYGSFCTQLNRALTGIAVEQDKNTQEVFAQVKQIYKTPPIKDFGGFNFSQILPDPSKPSKRSFIEDLLFNKVTLADAGFIKQYGDCLGDIAARDLICAQKFNGLTVLPPLLTDEMIAQYCSALLAGTITSGWTFGAGAALQIPFAMQMAYRFNGIGVTQNVLYENQKLIANQFNSAIGKIQDSLSSTASALGKLQDVVNQNAQALNTLVKQLSSNFGAISSVLNDILSRLDKVEAEVQIDRLITGRLQSLQTYVTQQLIRAAEIRASANLAATKMSECVLGQSKRVDFCGKGYHLMSFPQCAPHGVVFLHVTYVPAQEKNFTTAPAICHDGKAHFPREGVFVSNGTHWFVTQRNFYEPQIITTDNTFLSGNCDVVIGIVNNTVYDPLQPELDSGGGGSDIDPYKEFGSSYQLLNFLPLDFFPDLNALVDTATALYEEELTGREHCSPHHTAIRQALVCWDELTKLIAWMSSNITSEQVRTIIVNHVNDTWGLKVRQSLWFHLSCLTFGQHTVQEFLVSFGVWIRTPAPYRPPNAPILSTLPEHTVIC

SEQ ID NO: 11656 - protein, 1301 aa, Artificial Sequence
  SARS-CoV-2/USA/UT-00034/2020__EPI_ISL_417977 spike protein (1-1147)(T874C_S1055C) WhcAg construct
MFVFLVLLPLVSSQCVNLTTRTQLPPAYTNSFTRGVYYPDKVFRSSVLHSTQDLFLPFFSNVTWFHAIHVSGTNGTKRFDNPVLPFNDGVYFASTEKSNIIRGWIFGTTLDSKTQSLLIVNNATNVVIKVCEFQFCNDPFLGVYYYKNNKSWMESEFRVYSSANNCTFEYVSQPFLMDLEGKQGNFKNLREFVFKNIDGYFKIYSKHTPINLVRDLPQGFSALEPLVDLPIGINITRFQTLLALHRSYLTPGDSSSGWTAGAAAYYVGYLQPRTFLLKYNENGTITDAVDCALDPLSETKCTLKSFTVEKGIYQTSNFRVQPTESIVRFPNITNLCPFGEVFNATRFASVYAWNRKRISNCVADYSVLYNSASFSTFKCYGVSPTKLNDLCFTNVYADSFVIRGDEVRQIAPGQTGKIADYNYKLPDDFTGCVIAWNSNNLDSKVGGNYNYLYRLFRKSNLKPFERDISTEIYQAGSTPCNGVEGFNCYFPLQSYGFQPTNGVGYQPYRVVVLSFELLHAPATVCGPKKSTNLVKNKCVNFNFNGLTGTGVLTESNKKFLPFQQFGRDIADTTDAVRDPQTLEILDITPCSFGGVSVITPGTNTSNQVAVLYQGVNCTEVPVAIHADQLTPTWRVYSTGSNVFQTRAGCLIGAEHVNNSYECDIPIGAGICASYQTQTNSPRRARSVASQSIIAYTMSLGAENSVAYSNNSIAIPTNFTISVTTEILPVSMTKTSVDCTMYICGDSTECSNLLLQYGSFCTQLNRALTGIAVEQDKNTQEVFAQVKQIYKTPPIKDFGGFNFSQILPDPSKPSKRSFIEDLLFNKVTLADAGFIKQYGDCLGDIAARDLICAQKFNGLTVLPPLLTDEMIAQYCSALLAGTITSGWTFGAGAALQIPFAMQMAYRFNGIGVTQNVLYENQKLIANQFNSAIGKIQDSLSSTASALGKLQDVVNQNAQALNTLVKQLSSNFGAISSVLNDILSRLDKVEAEVQIDRLITGRLQSLQTYVTQQLIRAAEIRASANLAATKMSECVLGQSKRVDFCGKGYHLMSFPQCAPHGVVFLHVTYVPAQEKNFTTAPAICHDGKAHFPREGVFVSNGTHWFVTQRNFYEPQIITTDNTFVSGNCDVVIGIVNNTVYDPLQPELDSGGGGSDIDPYKEFGSSYQLLNFLPLDFFPDLNALVDTATALYEEELTGREHCSPHHTAIRQALVCWDELTKLIAWMSSNITSEQVRTIIVNHVNDTWGLKVRQSLWFHLSCLTFGQHTVQEFLVSFGVWIRTPAPYRPPNAPILSTLPEHTVIC

SEQ ID NO: 11657 - protein, 1301 aa, Artificial Sequence
  SARS-CoV-2/USA/UT-00033/2020__EPI_ISL_417976 spike protein (1-1147)(T874C_S1055C) WhcAg construct
MFVFLVLLPLVSSQCVNLTTRTQLPPAYTNSFTRGVYYPDKVFRSSVLHSTQDLFLPFFSNVTWFHAIHVSGTNGTKRFDNPVLPFNDGVYFASTEKSNIIRGWIFGTTLDSKTQSLLIVNNATNVVIKVCEFQFCNDPFLGVYYHKNNKSWMESEFRVYSSANNCTFEYVSQPFLMDLEGKQGNFKNLREFVFKNIDGYFKIYSKHTPINLVRDLPQGFSALEPLVDLPIGINITRFQTLLALHRSYLTPGDSSSGLTAGAAAYYVGYLQPRTFLLKYNENGTITDAVDCALDPLSETKCTLKSFTVEKGIYQTSNFRVQPTESIVRFPNITNLCPFGEVFNATRFASVYAWNRKRISNCVADYSVLYNSASFSTFKCYGVSPTKLNDLCFTNVYADSFVIRGDEVRQIAPGQTGKIADYNYKLPDDFTGCVIAWNSNNLDSKVGGNYNYLYRLFRKSNLKPFERDISTEIYQAGSTPCNGVEGFNCYFPLQSYGFQPTNGVGYQPYRVVVLSFELLHAPATVCGPKKSTNLVKNKCVNFNFNGLTGTGVLTESNKKFLPFQQFGRDIADTTDAVRDPQTLEILDITPCSFGGVSVITPGTNTSNQVAVLYQGVNCTEVPVAIHADQLTPTWRVYSTGSNVFQTRAGCLIGAEHVNNSYECDIPIGAGICASYQTQTNSPRRARSVASQSIIAYTMSLGAENSVAYSNNSIAIPTNFTISVTTEILPVSMTKTSVDCTMYICGDSTECSNLLLQYGSFCTQLNRALTGIAVEQDKNTQEVFAQVKQIYKTPPIKDFGGFNFSQILPDPSKPSKRSFIEDLLFNKVTLADAGFIKQYGDCLGDIAARDLICAQKFNGLTVLPPLLTDEMIAQYCSALLAGTITSGWTFGAGAALQIPFAMQMAYRFNGIGVTQNVLYENQKLIANQFNSAIGKIQDSLSSTASALGKLQDVVNQNAQALNTLVKQLSSNFGAISSVLNDILSRLDKVEAEVQIDRLITGRLQSLQTYVTQQLIRAAEIRASANLAATKMSECVLGQSKRVDFCGKGYHLMSFPQCAPHGVVFLHVTYVPAQEKNFTTAPAICHDGKAHFPREGVFVSNGTHWFVTQRNFYEPQIITTDNTFVSGNCDVVIGIVNNTVYDPLQPELDSGGGGSDIDPYKEFGSSYQLLNFLPLDFFPDLNALVDTATALYEEELTGREHCSPHHTAIRQALVCWDELTKLIAWMSSNITSEQVRTIIVNHVNDTWGLKVRQSLWFHLSCLTFGQHTVQEFLVSFGVWIRTPAPYRPPNAPILSTLPEHTVIC

SEQ ID NO: 11658 - protein, 1301 aa, Artificial Sequence
  SARS-CoV-2/USA/WI-13/2020__EPI_ISL_417516 spike protein (1-1147)(T874C_S1055C) WhcAg construct
MFVFLVLLPLVSSQCVNLTTRTQLPPAYTNSFTRGVYYPDKVFRSSVLHSTQDLFLPFFSNVTWFHAIHVSGTNGTKRFDNPVLPFNDGVYFASTEKSNIIRGWIFGTTLDSKTQSLLIVNNATNVVIKVCEFQFCNDPFLGVYYHKNNKSWMESEFRVYSSANNCTFEYVSQPFLMDLEGKQGNFKNLREFVFKNIDGYFKIYSKHTPINLVRDLPQGFSALEPLVDLPIGINITRFQTLLALHRSYLTPGDSSSGWTAGAAAYYVGYLQPRTFLLKYNENGTITDAVDCALDPLSETKCTLKSFTVEKGIYQTSNFRVLPTESIVRFPNITNLCPFGEVFNATRFASVYAWNRKRISNCVADYSVLYNSASFSTFKCYGVSPTKLNDLCFTNVYADSFVIRGDEVRQIAPGQTGKIADYNYKLPDDFTGCVIAWNSNNLDSKVGGNYNYLYRLFRKSNLKPFERDISTEIYQAGSTPCNGVEGFNCYFPLQSYGFQPTNGVGYQPYRVVVLSFELLHAPATVCGPKKSTNLVKNKCVNFNFNGLTGTGVLTESNKKFLPFQQFGRDIADTTDAVRDPQTLEILDITPCSFGGVSVITPGTNTSNQVAVLYQGVNCTEVPVAIHADQLTPTWRVYSTGSNVFQTRAGCLIGAEHVNNSYECDIPIGAGICASYQTQTNSPRRARSVASQSIIAYTMSLGAENSVAYSNNSIAIPTNFTISVTTEILPVSMTKTSVDCTMYICGDSTECSNLLLQYGSFCTQLNRALTGIAVEQDKNTQEVFAQVKQIYKTPPIKDFGGFNFSQILPDPSKPSKRSFIEDLLFNKVTLADAGFIKQYGDCLGDIAARDLICAQKFNGLTVLPPLLTDEMIAQYCSALLAGTITSGWTFGAGAALQIPFAMQMAYRFNGIGVTQNVLYENQKLIANQFNSAIGKIQDSLSSTASALGKLQDVVNQNAQALNTLVKQLSSNFGAISSVLNDILSRLDKVEAEVQIDRLITGRLQSLQTYVTQQLIRAAEIRASANLAATKMSECVLGQSKRVDFCGKGYHLMSFPQCAPHGVVFLHVTYVPAQEKNFTTAPAICHDGKAHFPREGVFVSNGTHWFVTQRNFYEPQIITTDNTFVSGNCDVVIGIVNNTVYDPLQPELDSGGGGSDIDPYKEFGSSYQLLNFLPLDFFPDLNALVDTATALYEEELTGREHCSPHHTAIRQALVCWDELTKLIAWMSSNITSEQVRTIIVNHVNDTWGLKVRQSLWFHLSCLTFGQHTVQEFLVSFGVWIRTPAPYRPPNAPILSTLPEHTVIC

SEQ ID NO: 11659 - protein, 1300 aa, Artificial Sequence
  SARS-CoV-2/India/1-27/2020__EPI_ISL_413522 spike protein (1-1146)(T873C_S1054C) WhcAg construct
MFVFLVLLPLVSSQCVNLTTRTQLPPAYTNSFTRGVYYPDKVFRSSVLHSTQDLFLPFFSNVTWFHAIHVSGTNGTKRFDNPVLPFNDGVYFASTEKSNIIRGWIFGTTLDSKTQSLLIVNNATNVVIKVCEFQFCNDPFLGVYHKNNKSWMESEFRVYSSANNCTFEYVSQPFLMDLEGKQGNFKNLREFVFKNIDGYFKIYSKHTPINLVRDLPQGFSALEPLVDLPIGINITRFQTLLALHRSYLTPGDSSSGWTAGAAAYYVGYLQPRTFLLKYNENGTITDAVDCALDPLSETKCTLKSFTVEKGIYQTSNFRVQPTESIVRFPNITNLCPFGEVFNATRFASVYAWNRKRISNCVADYSVLYNSASFSTFKCYGVSPTKLNDLCFTNVYADSFVIRGDEVIQIAPGQTGKIADYNYKLPDDFTGCVIAWNSNNLDSKVGGNYNYLYRLFRKSNLKPFERDISTEIYQAGSTPCNGVEGFNCYFPLQSYGFQPTNGVGYQPYRVVVLSFELLHAPATVCGPKKSTNLVKNKCVNFNFNGLTGTGVLTESNKKFLPFQQFGRDIADTTDAVRDPQTLEILDITPCSFGGVSVITPGTNTSNQVAVLYQDVNCTEVPVAIHADQLTPTWRVYSTGSNVFQTRAGCLIGAEHVNNSYECDIPIGAGICASYQTQTNSPRRARSVASQSIIAYTMSLGAENSVAYSNNSIAIPTNFTISVTTEILPVSMTKTSVDCTMYICGDSTECSNLLLQYGSFCTQLNRALTGIAVEQDKNTQEVFAQVKQIYKTPPIKDFGGFNFSQILPDPSKPSKRSFIEDLLFNKVTLADAGFIKQYGDCLGDIAARDLICAQKFNGLTVLPPLLTDEMIAQYCSALLAGTITSGWTFGAGAALQIPFAMQMAYRFNGIGVTQNVLYENQKLIANQFNSAIGKIQDSLSSTASALGKLQDVVNQNAQALNTLVKQLSSNFGAISSVLNDILSRLDKVEAEVQIDRLITGRLQSLQTYVTQQLIRAAEIRASANLAATKMSECVLGQSKRVDFCGKGYHLMSFPQCAPHGVVFLHVTYVPAQEKNFTTAPAICHDGKAHFPREGVFVSNGTHWFVTQRNFYEPQIITTDNTFVSGNCDVVIGIVNNTVYDPLQPELDSGGGGSDIDPYKEFGSSYQLLNFLPLDFFPDLNALVDTATALYEEELTGREHCSPHHTAIRQALVCWDELTKLIAWMSSNITSEQVRTIIVNHVNDTWGLKVRQSLWFHLSCLTFGQHTVQEFLVSFGVWIRTPAPYRPPNAPILSTLPEHTVIC

SEQ ID NO: 11660 - protein, 1295 aa, Artificial Sequence
  SARS-CoV-2/pangolin/Guangxi/P4L/2017__EPI_ISL_410538 spike protein (1-1141)(T868C_S1049C) WhcAg construct
MFVFLFVLPLVSSQCVNLTTRTGIPPGYTNSSTRGVYYPDKVFRSSILHLTQDLFLPFFSNVTWFNTINYQGGFKKFDNPVLPFNDGVYFASTEKSNIIRGWIFGTTLDARTQSLLIVNNATNVVIKVCEFQFCTDPFLGVYYHNNNKTWVENEFRVYSSANNCTFEYISQPFLMDLEGKQGNFKNLREFVFKNVDGYFKIYSKHTPIDLVRDLPRGFAALEPLVDLPIGINITRFQTLLALHRSYLTPGNLESGWTTGAAAYYVGYLQQRTFLLSYNQNGTITDAVDCSLDPLSETKCTLKSLTVEKGIYQTSNFRVQPTISIVRFPNITNLCPFGEVFNASKFASVYAWNRKRISNCVADYSVLYNSTSFSTFKCYGVSPTKLNDLCFTNVYADSFVVKGDEVRQIAPGQTGVIADYNYKLPDDFTGCVIAWNSVKQDALTGGNYGYLYRLFRKSKLKPFERDISTEIYQAGSTPCNGQVGLNCYYPLERYGFHPTTGVNYQPFRVVVLSFELLNGPATVCGPKLSTTLVKDKCVNFNFNGLTGTGVLTTSKKQFLPFQQFGRDISDTTDAVRDPQTLEILDITPCSFGGVSVITPGTNTSNQVAVLYQDVNCTEVPMAIHAEQLTPAWRVYSAGANVFQTRAGCLVGAEHVNNSYECDIPVGAGICASYHSMSSLRSVNQRSIIAYTMSLGAENSVAYSNNSIAIPTNFTISVTTEILPVSMTKTSVDCTMYICGDSIECSNLLLQYGSFCTQLNRALTGIAVEQDKNTQEVFAQVKQIYKTPPIKDFGGFNFSQILPDPSKPSKRSFIEDLLFNKVTLADAGFIKQYGDCLGDIAARDLICAQKFNGLTVLPPLLTDEMIAQYCSALLAGTITSGWTFGAGAALQIPFAMQMAYRFNGIGVTQNVLYENQKLIANQFNSAIGKIQDSLSSTASALGKLQDVVNQNAQALNTLVKQLSSNFGAISSVLNDILSRLDKVEAEVQIDRLITGRLQSLQTYVTQQLIRAAEIRASANLAATKMSECVLGQSKRVDFCGKGYHLMSFPQCAPHGVVFLHVTYVPAQEKNFTTAPAICHEGKAHFPREGVFVSNGTHWFITQRNFYEPQIITTDNTFVSGSCDVVIGIVNNTVYDPLQPELDSGGGGSDIDPYKEFGSSYQLLNFLPLDFFPDLNALVDTATALYEEELTGREHCSPHHTAIRQALVCWDELTKLIAWMSSNITSEQVRTIIVNHVNDTWGLKVRQSLWFHLSCLTFGQHTVQEFLVSFGVWIRTPAPYRPPNAPILSTLPEHTVIC

SEQ ID NO: 11661 - protein, 1295 aa, Artificial Sequence
  SARS-CoV-2/pangolin/Guangxi/P5L/2017__EPI_ISL_410540 spike protein (1-1141)(T868C_S1049C) WhcAg construct
MFVFLFVLPLVSSQCVNLTTRTGIPPGYTNSSTRGVYYPDKVFRSSILHLTQDLFLPFFSNVTWFNTINYQGGFKKFDNPVLPFNDGVYFASTEKSNIIRGWIFGTTLDARTQSLLIVNNATNVVIKVCEFQFCTDPFLGVYYHNNNKTWVENEFRVYSSANNCTFEYISQPFLMDLEGKQGNFKNLREFVFKNVDGYFKIYSKHTPIDLVRDLPRGFAALEPLVDLPIGINITRFQTLLALHRSYLTPGKLESGWTTGAAAYYVGYLQQRTFLLSYNQNGTITDAVDCSLDPLSETKCTLKSLTVEKGIYQTSNFRVQPTISIVRFPNITNLCPFGEVFNASKFASVYAWNRKRISNCVADYSVLYNSTSFSTFKCYGVSPTKLNDLCFTNVYADSFVVKGDEVRQIAPGQTGVIADYNYKLPDDFTGCVIAWNSVKQDALTGGNYGYLYRLFRKSKLKPFERDISTEIYQAGSTPCNGQVGLNCYYPLERYGFHPTTGVNYQPFRVVVLSFELLNGPATVCGPKLSTTLVKDKCVNFNFNGLTGTGVLTTSKKQFLPFQQFGRDISDTTDAVRDPQTLEILDITPCSFGGVSVITPGTNTSNQVAVLYQDVNCTEVPMAIHAEQLTPAWRVYSAGANVFQTRAGCLVGAEHVNNSYECDIPVGAGICASYHSMSSFRSVNQRSIIAYTMSLGAENSVAYSNNSIAIPTNFTISVTTEILPVSMTKTSVDCTMYICGDSIECSNLLLQYGSFCTQLNRALTGIAVEQDKNTQEVFAQVKQIYKTPPIKDFGGFNFSQILPDPSKPSKRSFIEDLLFNKVTLADAGFIKQYGDCLGDIAARDLICAQKFNGLTVLPPLLTDEMIAQYCSALLAGTITSGWTFGAGAALQIPFAMQMAYRFNGIGVTQNVLYENQKLIANQFNSAIGKIQDSLSSTASALGKLQDVVNQNAQALNTLVKQLSSNFGAISSVLNDILSRLDKVEAEVQIDRLITGRLQSLQTYVTQQLIRAAEIRASANLAATKMSECVLGQSKRVDFCGKGYHLMSFPQCAPHGVVFLHVTYVPAQEKNFTTAPAICHEGKAHFPREGVFVSNGTHWFITQRNFYEPQIITTDNTFVSGSCDVVIGIVNNTVYDPLQPELDSGGGGSDIDPYKEFGSSYQLLNFLPLDFFPDLNALVDTATALYEEELTGREHCSPHHTAIRQALVCWDELTKLIAWMSSNITSEQVRTIIVNHVNDTWGLKVRQSLWFHLSCLTFGQHTVQEFLVSFGVWIRTPAPYRPPNAPILSTLPEHTVIC

SEQ ID NO: 11662 - protein, 1295 aa, Artificial Sequence
  SARS-CoV-2/pangolin/Guangxi/P5E/2017__EPI_ISL_410541 spike protein (1-1141)(T868C_S1049C) WhcAg construct
MFVFLFVLPLVSSQCVNLTTRTGIPPGYTNSSTRGVYYPDKVFRSSILHLTQDLFLPFFSNVTWFNTITYQGGSKKFDNPVLPFNDGVYFASTEKSNIIRGWIFGTTLDARTQSLLIVNNATNVVIKVCEFQFCTDPFLGVYYHNNNKTWVENEFRVYSSANNCTFEYISQPFLMDLEGKQGNFKNLREFVFKNVDGYFKIYSKHTPIDLVRDLPRGFAALEPLVDLPIGINITRFQTLLALHRSYLTPGKLESGWTTGAAAYYVGYLQQRTFLLSYNQNGTITDAVDCSLDPLSETKCTLKSLTVEKGIYQTSNFRVQPTISIVRFPNITNLCPFGEVFNASKFASVYAWNRKRISNCVADYSVLYNSTSFSTFKCYGVSPTKLNDLCFTNVYADSFVVKGDEVRQIAPGQTGVIADYNYKLPDDFTGCVIAWNSVKQDALTGDNYGYLYRLFRKSKLKPFERDISTEIYQAGSTPCNGQVGLNCYYPLERYGFHPTTGVNYQPFRVVVLSFELLNGPATVCGPKLSTTLVKDKCVNFNFNGLTGTGVLTTSKKQFLPFQQFGRDISDTTDAVRDPQTLEILDITPCSFGGVSVITPGTNTSNQVAVLYQDVNCTEVPMAIHAEQLTPAWRVYSAGANVFQTRAGCLVGAEHVNNSYECDIPVGAGICASYHSMSSFRSVNQRSIIAYTMSLGAENSVAYSNNSIAIPTNFTISVTTEILPVSMTKTSVDCTMYICGDSIECSNLLLQYGSFCTQLNRALTGIAVEQDKNTQEVFAQVKQIYKTPPIKDFGGFNFSQILPDPSKPSKRSFIEDLLFNKVTLADAGFIKQYGDCLGDIAARDLICAQKFNGLTVLPPLLTDEMIAQYCSALLAGTITSGWTFGAGAALQIPFAMQMAYRFNGIGVTQNVLYENQKLIANQFNSAIGKIQDSLSSTASALGKLQDVVNQNAQALNTLVKQLSSNFGAISSVLNDILSRLDKVEAEVQIDRLITGRLQSLQTYVTQQLIRAAEIRASANLAATKMSECVLGQSKRVDFCGKGYHLMSFPQCAPHGVVFLHVTYVPAQEKNFTTAPAICHEGKAHFPREGVFVSNGTHWFITQRNFYEPQIITTDNTFVSGSCDVVIGIVNNTVYDPLQPELDSGGGGSDIDPYKEFGSSYQLLNFLPLDFFPDLNALVDTATALYEEELTGREHCSPHHTAIRQALVCWDELTKLIAWMSSNITSEQVRTIIVNHVNDTWGLKVRQSLWFHLSCLTFGQHTVQEFLVSFGVWIRTPAPYRPPNAPILSTLPEHTVIC

SEQ ID NO: 11663 - protein, 1293 aa, Artificial Sequence
  SARS-CoV-2/pangolin/Guangxi/P1E/2017__EPI_ISL_410539 spike protein (1-1139)(T866C_S1047C) WhcAg construct
MFVFLFVLPLVSSQCVNLTTRTGIQPGYTNSSTRGVYYPDKVFRSSILHLTQDLFLPFFSNVTWFNTINYQGGFKKFDNPVLPFNDGVYFASTEKSNIIRGWIFGTTLDARTQSLLIVNNATNVVIKVCEFQFCTDPFLGVYYHNNNKTWVENEFRVYSSANNCTFEYISQPFLMDLEGKQGNFKNLREFVFKNVDGYFKIYSKHTPIDLVRDLPRGFAALEPLVDLPIGINITRFQTLLALHRSYLTPGKLESGWTTGAAAYYVGYLQQRTFLLSYNQNGTITDAVDCSLDPLSETKCTLKSLTVEKGIYQTSNFRVQPTISIVRFPNITNLCPFGEVFNASKFASVYAWNRKRISNCVADYSVLYNSTSFSTFKCYGVSPTKLNDLCFTNVYADSFVVKGDEVRQIAPGQTGVIADYNYKLPDDFTGCVIAWNSVKQDALTGGNYLYRLFRKSKLKPFERDISTEIYQAGSTPCNGQVGLNCYYPLERYGFHPTTGVNYQPFRVVVLSFELLNGPATVCGPKLSTTLVKDKCVNFNFNGLTGTGVLTTSKKQFLPFQQFGRDISDTTDAVRDPQTLEILDITPCSFGGVSVITPGTNTSNQVAVLYQDVNCTEVPMAIHAEQLTPAWRVYSAGANVFQTRAGCLVGAEHVNNSYECDIPVGAGICASYHSMSSLRSVNQRSIIAYTMSLGAENSVAYSNNSIAIPTNFTISVTTEILPVSMTKTSVDCTMYICGDSIECSNLLLQYGSFCTQLNRALTGIAVEQDKNTQEVFAQVKQIYKTPPIKDFGGFNFSQILPDPSKPSKRSFIEDLLFNKVTLADAGFIKQYGDCLGDIAARDLICAQKFNGLTVLPPLLTDEMIAQYCSALLAGTITSGWTFGAGAALQIPFAMQMAYRFNGIGVTQNVLYENQKLIANQFNSAIGKIQDSLSSTASALGKLQDVVNQNAQALNTLVKQLSSNFGAISSVLNDILSRLDKVEAEVQIDRLITGRLQSLQTYVTQQLIRAAEIRASANLAATKMSECVLGQSKRVDFCGKGYHLMSFPQCAPHGVVFLHVTYVPAQEKNFTTAPAICHEGKAHFPREGVFVSNGTHWFITQRNFYEPQIITTDNTFVSGSCDVVIGIVNNTVYDPLQPELDSGGGGSDIDPYKEFGSSYQLLNFLPLDFFPDLNALVDTATALYEEELTGREHCSPHHTAIRQALVCWDELTKLIAWMSSNITSEQVRTIIVNHVNDTWGLKVRQSLWFHLSCLTFGQHTVQEFLVSFGVWIRTPAPYRPPNAPILSTLPEHTVIC

SEQ ID NO: 11664 - RNA, 3822 nt, Artificial Sequence; identical to SEQ ID NO: 116
  SARS-CoV-2/Wuhan/WIV05/2019__EPI_ISL_402128 spike protein CDS wt (1-1273)

SEQ ID NO: 11665 - RNA, 3810 nt, Artificial Sequence; identical to SEQ ID NO: 118
  SARS-CoV-2/bat/Yunnan/RaTG13/2013__EPI_ISL_402131 spike protein CDS wt (1-1269)

SEQ ID NO: 11666 - RNA, 3822 nt, Artificial Sequence; identical to SEQ ID NO: 119
  SARS-CoV-2/Wuhan/HBCDC-HB-01/2019__EPI_ISL_402132 spike protein CDS wt (1-1273)

SEQ ID NO: 11667 - RNA, 3822 nt, Artificial Sequence; identical to SEQ ID NO: 121
  SARS-CoV-2/Guangdong/20SF028/2020__EPI_ISL_403936 spike protein CDS wt (1-1273)

SEQ ID NO: 11668 - RNA, 3822 nt, Artificial Sequence; identical to SEQ ID NO: 126
  SARS-CoV-2/Shenzhen/SZTH-001/2020__EPI_ISL_406592 spike protein CDS wt (1-1273)

SEQ ID NO: 11669 - RNA, 3822 nt, Artificial Sequence; identical to SEQ ID NO: 127
  SARS-CoV-2/Shenzhen/SZTH-004/2020__EPI_ISL_406595 spike protein CDS wt (1-1273)

SEQ ID NO: 11670 - RNA, 3822 nt, Artificial Sequence; identical to SEQ ID NO: 128
  SARS-CoV-2/France/IDF0372/2020__EPI_ISL_406596 spike protein CDS wt (1-1273)

SEQ ID NO: 11671 - RNA, 3822 nt, Artificial Sequence; identical to SEQ ID NO: 130
  SARS-CoV-2/Australia/VIC01/2020__EPI_ISL_406844 spike protein CDS wt (1-1273)

SEQ ID NO: 11672 - RNA, 3822 nt, Artificial Sequence; identical to SEQ ID NO: 131
  SARS-CoV-2/Germany/BavPat1/2020__EPI_ISL_406862 spike protein CDS wt (1-1273)

SEQ ID NO: 11673 - RNA, 3822 nt, Artificial Sequence
  SARS-CoV-2/Wuhan/HBCDC-HB-02/2020__EPI_ISL_412978 spike protein CDS wt (1-1273)
auguuuguuuuucuuguuuuauugccacuagucucuagucaguguguuaaucuuacaaccagaacucaauuacccccugcauacacuaauucuuucacacgugguguuuauuacccugacaaaguuuucagauccucaguuuuacauucaacucaggacuuguucuuaccuuucuuuuccaauguuacuugguuccaugcuauacaugucucugggaccaaugguacuaagagguuugauaacccuguccuaccauuuaaugaugguguuuauuuugcuuccacugagaagucuaacauaauaagaggcuggauuuuugguacuacuuuagauucgaagacccagucccuacuuauuguuaauaacgcuacuaauguuguuauuaaagucugugaauuucaauuuuguaaugauccauuuuuggguguuuauuaccacaaaaacaacaaaaguuggauggaaagugaguucagaguuuauucuagugcgaauaauugcacuuuugaauaugucucucagccuuuucuuauggaccuugaaggaaaacaggguaauuucaaaaaucuuagggaauuuguguuuaagaauauugaugguuauuuuaaaauauauucuaagcacacgccuauuaauuuagugcgugaucucccucaggguuuuucggcuuuagaaccauugguagauuugccaauagguauuaacaucacuagguuucaaacuuuacuugcuuuacauagaaguuauuugacuccuggugauucuucuucagguuggacagcuggugcugcagcuuauuauguggguuaucuucaaccuaggacuuuucuauuaaaauauaaugaaaauggaaccauuacagaugcuguagacugugcacuugacccucucucagaaacaaaguguacguugaaauccuucacuguagaaaaaggaaucuaucaaacuucuaacuuuagaguccaaccaacagaaucuauuguuagauuuccuaauauuacaaacuugugcccuuuuggugaaguuuuuaacgccaccagauuugcaucuguuuaugcuuggaacaggaagagaaucagcaacuguguugcugauuauucuguccuauauaauuccgcaucauuuuccacuuuuaaguguuauggagugucuccuacuaaauuaaaugaucucugcuuuacuaaugucuaugcagauucauuuguaauuagaggugaugaagucagacaaaucgcuccagggcaaacuggaaagauugcugauuauaauuauaaauuaccagaugauuuuacaggcugcguuauagcuuggaauucuaacaaucuugauucuaagguuggugguaauuauaauuaccuguauagauuguuuaggaagucuaaucucaaaccuuuugagagagauauuucaacugaaaucuaucaggccgguagcacaccuuguaaugguguugaagguuuuaauuguuacuuuccuuuacaaucauaugguuuccaacccacuaaugguguugguuaccaaccauacagaguaguaguacuuucuuuugaacuucuacaugcaccagcaacuguuuguggaccuaaaaagucuacuaauuugguuaaaaacaaaugugucaauuucaacuucaaugguuuaacaggcacagguguucuuacugagucuaacaaaaaguuucugccuuuccaacaauuuggcagagacauugcugacacuacugaugcuguccgugauccacagacacuugagauucuugacauuacaccauguucuuuugguggugucaguguuauaacaccaggaacaaauacuucuaaccagguugcuguucuuuaucaggauguuaacugcacagaagucccuguugcuauucaugcagaucaacuuacuccuacuuggcguguuuauucuacagguucuaauguuuuucaaacacgugcaggcuguuuaauaggggcugaacaugucaacaacucauaugagugugacauacccauuggugcagguauaugcgcuaguuaucagacucagacuaauucuccucggcgggcacguaguguagcuagucaauccaucauugccuacacuaugucacuuggugcagaaaauucaguugcuuacucuaauaacucuauugccauacccacaaauuuuacuauuaguguuaccacagaaauucuaccagugucuaugaccaagacaucaguagauuguacaauguacauuuguggugauucaacugaaugcagcaauuuuuuguugcaauauggcaguuuuuguacacaauuaaaccgugcuuuaacuggaauagcuguugaacaagacaaaaacacccaagaaguuuuugcacaagucaaacaaauuuacaaaacaccaccaauuaaagauuuuggugguuuuaauuuuucacaaauauuaccagauccaucaaaaccaagcaagaggucauuuauugaagaucuacuuuucaacaaagugacacuugcagaugcuggcuucaucaaacaauauggugauugccuuggugauauugcugcuagagaccucauuugugcacaaaaguuuaacggccuuacuguuuugccaccuuugcucacagaugaaaugauugcucaauacacuucugcacuguuagcggguacaaucacuucugguuggaccuuuggugcaggugcugcauuacaaauaccauuugcuaugcaaauggcuuauagguuuaaugguauuggaguuacacagaauguucucuaugagaaccaaaaauugauugccaaccaauuuaauagugcuauuggcaaaauucaagacucacuuucuuccacagcaagugcacuuggaaaacuucaagauguggucaaccaaaaugcacaagcuuuaaacacgcuuguuaaacaacuuagcuccaauuuuggugcaauuucaaguguuuuaaaugauauccuuucacgucuugacaaaguugaggcugaagugcaaauugauagguugaucacaggcagacuucaaaguuugcagacauaugugacucaacaauuaauuagagcugcagaaaucagagcuucugcuaaucuugcugcuacuaaaaugucagaguguguacuuggacaaucaaaaagaguugauuuuuguggaaagggcuaucaucuuauguccuucccucagucagcaccucaugguguagucuucuugcaugugacuuaugucccugcacaagaaaagaacuucacaacugcuccugccauuugucaugauggaaaagcacacuuuccucgugaaggugucuuuguuucaaauggcacacacugguuuguaacacaaaggaauuuuuaugaaccacaaaucauuacuacagacaacacauuugugucugguaacugugauguuguaauaggaauugucaacaacacaguuuaugauccuuugcaaccugaauuagacucauucaaggaggaguuagauaaauauuuuaagaaucauacaucaccagauguugauuuaggugacaucucuggcauuaaugcuucaguuguaaacauucaaaaagaaauugaccgccucaaugagguugccaagaauuuaaaugaaucucucaucgaucuccaagaacuuggaaaguaugagcaguauauaaaauggccaugguacauuuggcuagguuuuauagcuggcuugauugccauaguaauggugacaauuaugcuuugcuguaugaccaguugcuguaguugucucaagggcuguuguucuuguggauccugcugcaaauuugaugaagacgacucugagccagugcucaaaggagucaaauuacauuacacauaa

SEQ ID NO: 11674 - RNA, 3822 nt, Artificial Sequence
  SARS-CoV-2/Australia/QLD02/2020__EPI_ISL_407896 spike protein CDS wt (1-1273)
auguuuguuuuucuuguuuuauugccacuagucucuagucaguguguuaaucuuacaaccagaacucaauuacccccugcauacacuaauucuuucacacgugguguuuauuacccugacaaaguuuucagauccucaguuuuacauucaacucaggacuuguucuuaccuuucuuuuccaauguuacuugguuccaugcuauacaugucucugggaccaaugguacuaagagguuugauaacccuguccuaccauuuaaugaugguguuuauuuugcuuccacugagaagucuaacauaauaagaggcuggauuuuugguacuacuuuagauucgaagacccagucccuacuuauuguuaauaacgcuacuaauguuguuauuaaagucugugaauuucaauuuuguaaugauccauuuuuggguguuuauuaccacaaaaacaacaaaaguuggauggaaagugaguucagaguuuauucuagugcgaauaauugcacuuuugaauaugucucucagccuuuucuuauggaccuugaaggaaaacaggguaauuucaaaaaucuuagggaauuuguguuuaagaauauugaugguuauuuuaaaauauauucuaagcacacgccuauuaauuuagugcgugaucucccucaggguuuuucggcuuuagaaccauugguagauuugccaauagguauuaacaucacuagguuucaaacuuuacuugcuuuacauagaaguuauuugacuccuggugauucuucuucagguuggacagcuggugcugcagcuuauuauguggguuaucuucaaccuaggacuuuucuauuaaaauauaaugaaaauggaaccauuacagaugcuguagacugugcacuugacccucucucagaaacaaaguguacguugaaauccuucacuguagaaaaaggaaucuaucaaacuucuaacuuuagaguccaaccaacagaaucuauuguuagauuuccuaauauuacaaacuugugcccuuuuggugaaguuuuuaacgccaccagauuugcaucuguuuaugcuuggaacaggaagagaaucagcaacuguguugcugauuauucuguccuauauaauuccgcaucauuuuccacuuuuaaguguuauggagugucuccuacuaaauuaaaugaucucugcuuuacuaaugucuaugcagauucauuuguaauuagaggugaugaagucagacaaaucgcuccagggcaaacuggaaagauugcugauuauaauuauaaauuaccagaugauuuuacaggcugcguuauagcuuggaauucuaacaaucuugauucuaagguuggugguaauuauaauuaccuguauagauuguuuaggaagucuaaucucaaaccuuuugagagagauauuucaacugaaaucuaucaggccgguagcacaccuuguaaugguguugaagguuuuaauuguuacuuuccuuuacaaucauaugguuuccaacccacuaaugguguugguuaccaaccauacagaguaguaguacuuucuuuugaacuucuacaugcaccagcaacuguuuguggaccuaaaaagucuacuaauuugguuaaaaacaaaugugucaauuucaacuucaaugguuuaacaggcacagguguucuuacugagucuaacaaaaaguuucugccuuuccaacaauuuggcagagacauugcugacacuacugaugcuguccgugauccacagacacuugagauucuugacauuacaccauguucuuuugguggugucaguguuauaacaccaggaacaaauacuucuaaccagguugcuguucuuuaucaggauguuaacugcacagaagucccuguugcuauucaugcagaucaacuuacuccuacuuggcguguuuauucuacagguucuaauguuuuucaaacacgugcaggcuguuuaauaggggcugaacaugucaacaacucauaugagugugacauacccauuggugcagguauaugcgcuaguuaucagacucagacuaauucuccucggcgggcacguaguguagcuagucaauccaucauugccuacacuaugucacuuggugcagaaaauucaguugcuuacucuaauaacucuauugccauacccacaaauuuuacuauuaguguuaccacagaaauucuaccagugucuaugaccaagacaucaguagauuguacaauguacauuuguggugauucaacugaaugcagcaaucuuuuguugcaauauggcaguuuuuguacacaauuaaaccgugcuuuaacuggaauagcuguugaacaagacaaaaacacccaagaaguuuuugcacaagucaaacaaauuuacaaaacaccaccaauuaaagauuuuggugguuuuaauuuuucacaaauauuaccagauccaucaaaaccaagcaagaggucauuuauugaagaucuacuuuucaacaaagugacacuugcagaugcuggcuucaucaaacaauauggugauugccuuggugauauugcugcuagagaccucauuugugcacaaaaguuuaacggccuuacuguuuugccaccuuugcucacagaugaaaugauugcucaauacacuucugcacuguuagcggguacaaucacuucugguuggaccuuuggugcaggugcugcauuacaaauaccauuugcuaugcaaauggcuuauagguuuaaugguauuggaguuacacagaauguucucuaugagaaccaaaaauugauugccaaccaauuuaauagugcuauuggcaaaauucaagacucacuuucuuccacagcaagugcacuuggaaaacuucaagauguggucaaccaaaaugcacaagcuuuaaacacgcuuguuaaacaacuuagcuccaauuuuggugcaauuucaaguguuuuaaaugauauccuuucacgucuugacaaaguugaggcugaagugcaaauugauagguugaucacaggcagacuucaaaguuugcagacauaugugacucaacaauuaauuagagcugcagaaaucagagcuucugcuaaucuugcugcuacuaaaaugucagaguguguacuuggacaaucaaaaagaguugauuuuuguggaaagggcuaucaucuuauguccuucccucagucagcaccucaugguguagucuucuugcaugugacuuaugucccugcacaagaaaagaacuucacaacugcuccugccauuugucaugauggaaaagcacacuuuccucgugaaggugucuuuguuucaaauggcacacacugguuuguaacacaaaggaauuuuuaugaaccacaaaucauuacuacagacaacacauuugugucugguaacugugauguuguaauaggaauugucaacaacacaguuuaugauccuuugcaacuugaauuagacucauucaaggaggaguuagauaaauauuuuaagaaucauacaucaccagauguugauuuaggugacaucucuggcauuaaugcuucaguuguaaacauucaaaaagaaauugaccgccucaaugagguugccaagaauuuaaaugaaucucucaucgaucuccaagaacuuggaaaguaugagcaguauauaaaauggccaugguacauuuggcuagguuuuauagcuggcuugauugccauaguaauggugacaauuaugcuuugcuguaugaccaguugcuguaguugucucaagggcuguuguucuuguggauccugcugcaaauuugaugaagacgacucugagccagugcucaaaggagucaaauuacauuacacauaa

SEQ ID NO: 11675 - RNA, 3822 nt, Artificial Sequence
  SARS-CoV-2/India/1-31/2020__EPI_ISL_413523 spike protein CDS wt (1-1273)
auguuuguuuuucuuguuuuauugccacuagucucuagucaguguguuaaucuuacaaccagaacucaauuacccccugcauacacuaauucuuucacacgugguguuuauuacccugacaaaguuuucagauccucaguuuuacauucaacucaggacuuguucuuaccuuucuuuuccaauguuacuugguuccaugcuauacaugucucugggaccaaugguacuaagagguuugauaacccuguccuaccauuuaaugaugguguuuauuuugcuuccacugagaagucuaacauaauaagaggcuggauuuuugguacuacuuuagauucgaagacccagucccuacuuauuguuaauaacgcuacuaauguuguuauuaaagucugugaauuucaauuuuguaaugauccauuuuuggguguuuauuaccacaaaaacaacaaaaguuggauggaaagugaguucagaguuuauucuagugcgaauaauugcacuuuugaauaugucucucagccuuuucuuauggaccuugaaggaaaacaggguaauuucaaaaaucuuagggaauuuguguuuaagaauauugaugguuauuuuaaaauauauucuaagcacacgccuauuaauuuagugcgugaucucccucaggguuuuucggcuuuagaaccauugguagauuugccaauagguauuaacaucacuagguuucaaacuuuacuugcuuuacauagaaguuauuugacuccuggugauucuucuucagguuggacagcuggugcugcagcuuauuauguggguuaucuucaaccuaggacuuuucuauuaaaauauaaugaaaauggaaccauuacagaugcuguagacugugcacuugacccucucucagaaacaaaguguacguugaaauccuucacuguagaaaaaggaaucuaucaaacuucuaacuuuagaguccaaccaacagaaucuauuguuagauuuccuaauauuacaaacuugugcccuuuuggugaaguuuuuaacgccaccagauuugcaucuguuuaugcuuggaacaggaagagaaucagcaacuguguugcugauuauucuguccuauauaauuccgcaucauuuuccacuuuuaaguguuauggagugucuccuacuaaauuaaaugaucucugcuuuacuaaugucuaugcagauucauuuguaauuagaggugaugaagucagacaaaucgcuccagggcaaacuggaaagauugcugauuauaauuauaaauuaccagaugauuuuacaggcugcguuauagcuuggaauucuaacaaucuugauucuaagguuggugguaauuauaauuaccuguauagauuguuuaggaagucuaaucucaaaccuuuugagagagauauuucaacugaaaucuaucaggccgguagcacaccuuguaaugguguugaagguuuuaauuguuacuuuccuuuacaaucauaugguuuccaacccacuaaugguguugguuaccaaccauacagaguaguaguacuuucuuuugaacuucuacaugcaccagcaacuguuuguggaccuaaaaagucuacuaauuugguuaaaaacaaaugugucaauuucaacuucaaugguuuaacaggcacagguguucuuacugagucuaacaaaaaguuucugccuuuccaacaauuuggcagagacauugcugacacuacugaugcuguccgugauccacagacacuugagauucuugacauuacaccauguucuuuugguggugucaguguuauaacaccaggaacaaauacuucuaaccagguugcuguucuuuaucaggauguuaacugcacagaagucccuguugcuauucaugcagaucaacuuacuccuacuuggcguguuuauucuacagguucuaauguuuuucaaacacgugcaggcuguuuaauaggggcugaacaugucaacaacucauaugagugugacauacccauuggugcagguauaugcgcuaguuaucagacucagacuaauucuccucggcgggcacguaguguagcuagucaauccaucauugccuacacuaugucacuuggugcagaaaauucaguugcuuacucuaauaacucuauugccauacccacaaauuuuacuauuaguguuaccacagaaauucuaccagugucuaugaccaagacaucaguagauuguacaauguacauuuguggugauucaacugaaugcagcaaucuuuuguugcaauauggcaguuuuuguacacaauuaaaccgugcuuuaacuggaauagcuguugaacaagacaaaaacacccaagaaguuuuugcacaagucaaacaaauuuacaaaacaccaccaauuaaagauuuuggugguuuuaauuuuucacaaauauuaccagauccaucaaaaccaagcaagaggucauuuauugaagaucuacuuuucaacaaagugacacuugcagaugcuggcuucaucaaacaauauggugauugccuuggugauauugcugcuagagaccucauuugugcacaaaaguuuaacggccuuacuguuuugccaccuuugcucacagaugaaaugauugcucaauacacuucugcacuguuagcggguacaaucacuucugguuggaccuuuggugcaggugcugcauuacaaauaccauuugcuaugcaaauggcuuauagguuuaaugguauuggaguuacacagaauguucucuaugagaaccaaaaauugauugccaaccaauuuaauaguguuauuggcaaaauucaagacucacuuucuuccacagcaagugcacuuggaaaacuucaagauguggucaaccaaaaugcacaagcuuuaaacacgcuuguuaaacaacuuagcuccaauuuuggugcaauuucaaguguuuuaaaugauauccuuucacgucuugacaaaguugaggcugaagugcaaauugauagguugaucacaggcagacuucaaaguuugcagacauaugugacucaacaauuaauuagagcugcagaaaucagagcuucugcuaaucuugcugcuacuaaaaugucagaguguguacuuggacaaucaaaaagaguugauuuuuguggaaagggcuaucaucuuauguccuucccucagucagcaccucaugguguagucuucuugcaugugacuuaugucccugcacaagaaaagaacuucacaacugcuccugccauuugucaugauggaaaagcacacuuuccucgugaaggugucuuuguuucaaauggcacacacugguuuguaacacaaaggaauuuuuaugaaccacaaaucauuacuacagacaacacauuugugucugguaacugugauguuguaauaggaauugucaacaacacaguuuaugauccuuugcaaccugaauuagacucauucaaggaggaguuagauaaauauuuuaagaaucauacaucaccagauguugauuuaggugacaucucuggcauuaaugcuucaguuguaaacauucaaaaagaaauugaccgccucaaugagguugccaagaauuuaaaugaaucucucaucgaucuccaagaacuuggaaaguaugagcaguauauaaaauggccaugguacauuuggcuagguuuuauagcuggcuugauugccauaguaauggugacaauuaugcuuugcuguaugaccaguugcuguaguugucucaagggcuguuguucuuguggauccugcugcaaauuugaugaagacgacucugagccagugcucaaaggagucaaauuacauuacacauaa

SEQ ID NO: 11676 - RNA, 3822 nt, Artificial Sequence
  SARS-CoV-2/Guangdong/GD2020087-P0008/2020__EPI_ISL_413863 spike protein CDS wt (1-1273)
auguuuguuuuucuuguuuuauugccacuagucucuagucaguguguuaaucuuacaaccagaacucaauuacccccugcauacacuaauucuuucacacgugguguuuauuacccugacaaaguuuucagauccucaguuuuacauucaacucaggacuuguucuuaccuuucuuuuccaauguuacuugguuccaugcuauacaugucucugggaccaaugguacuaagagguuugauaacccuguccuaccauuuaaugaugguguuuauuuugcuuccacugagaagucuaacauaauaagaggcuggauuuuugguacuacuuuagauucgaagacccagucccuacuuauuguuaauaacgcuacuaauguuguuauuaaagucugugaauuucaauuuuguaaugauccauuuuuggguguuuauuaccacaaaaacaacaaaaguuggauggaaagugaguucagaguuuauucuagugcgaauaauugcacuuuugaauaugucucucagccuuuucuuauggaccuugaaggaaaacaggguaauuucaaaaaucuuagggaauuuguguuuaagaauauugaugguuauuuuaaaauauauucuaagcacacgccuauuaauuuagugcgugaucucccucaggguuuuucggcuuuagaaccauugguagauuugccaauagguauuaacaucacuagguuucaaacuuuacuugcuuuacauagaaguuauuugacuccuggugauucuucuucagguuggacagcuggugcugcagcuuauuauguggguuaucuucaaccuaggacuuuucuauuaaaauauaaugaaaauggaaccauuacagaugcuguagacugugcacuugacccucucucagaaacaaaguguacguugaaauccuucacuguagaaaaaggaaucuaucaaacuucuaacuuuagaguccaaccaacagaaucuauuguuagauuuccuaauauuacaaacuugugcccuuuuggugaaguuuuuaacgccaccagauuugcaucuguuuaugcuuggaacaggaagagaaucagcaacuguguugcugauuauucuguccuauauaauuccgcaucauuuuccacuuuuaaguguuauggagugucuccuacuaaauuaaaugaucucugcuuuacuaaugucuaugcagauucauuuguaauuagaggugaugaagucagagaaaucgcuccagggcaaacuggaaagauugcugauuauaauuauaaauuaccagaugauuuuacaggcugcguuauagcuuggaauucuaacaaucuugauucuaagguuggugguaauuauaauuaccuguauagauuguuuaggaagucuaaucucaaaccuuuugagagagauauuucaacugaaaucuaucaggccgguagcacaccuuguaaugguguugaagguuuuaauuguuacuuuccuuuacaaucauaugguuuccaacccacuaaugguguugguuaccaaccauacagaguaguaguacuuucuuuugaacuucuacaugcaccagcaacuguuuguggaccuaaaaagucuacuaauuugguuaaaaacaaaugugucaauuucaacuucaaugguuuaacaggcacagguguucuuacugagucuaacaaaaaguuucugccuuuccaacaauuuggcagagacauugcugacacuacugaugcuguccgugauccacagacacuugagauucuugacauuacaccauguucuuuugguggugucaguguuauaacaccaggaacaaauacuucuaaccagguugcuguucuuuaucaggauguuaacugcacagaagucccuguugcuauucaugcagaucaacuuacuccuacuuggcguguuuauucuacagguucuaauguuuuucaaacacgugcaggcuguuuaauaggggcugaacaugucaacaacucauaugagugugacauacccauuggugcagguauaugcgcuaguuaucagacucagacuaauucuccucggcgggcacguaguguagcuagucaauccaucauugccuacacuaugucacuuggugcagaaaauucaguugcuuacucuaauaacucuauugccauacccacaaauuuuacuauuaguguuaccacagaaauucuaccagugucuaugaccaagacaucaguagauuguacaauguacauuuguggugauucaacugaaugcagcaaucuuuuguugcaauauggcaguuuuuguacacaauuaaaccgugcuuuaacuggaauagcuguugaacaagacaaaaacacccaagaaguuuuugcacaagucaaacaaauuuacaaaacaccaccaauuaaagauuuuggugguuuuaauuuuucacaaauauuaccagauccaucaaaaccaagcaagaggucauuuauugaagaucuacuuuucaacaaagugacacuugcagaugcuggcuucaucaaacaauauggugauugccuuggugauauugcugcuagagaccucauuugugcacaaaaguuuaacggccuuacuguuuugccaccuuugcucacagaugaaaugauugcucaauacacuucugcacuguuagcggguacaaucacuucugguuggaccuuuggugcaggugcugcauuacaaauaccauuugcuaugcaaauggcuuauagguuuaaugguauuggaguuacacagaauguucucuaugagaaccaaaaauugauugccaaccaauuuaauagugcuauuggcaaaauucaagacucacuuucuuccacagcaagugcacuuggaaaacuucaagauguggucaaccaaaaugcacaagcuuuaaacacgcuuguuaaacaacuuagcuccaauuuuggugcaauuucaaguguuuuaaaugauauccuuucacgucuugacaaaguugaggcugaagugcaaauugauagguugaucacaggcagacuucaaaguuugcagacauaugugacucaacaauuaauuagagcugcagaaaucagagcuucugcuaaucuugcugcuacuaaaaugucagaguguguacuuggacaaucaaaaagaguugauuuuuguggaaagggcuaucaucuuauguccuucccucagucagcaccucaugguguagucuucuugcaugugacuuaugucccugcacaagaaaagaacuucacaacugcuccugccauuugucaugauggaaaagcacacuuuccucgugaaggugucuuuguuucaaauggcacacacugguuuguaacacaaaggaauuuuuaugaaccacaaaucauuacuacagacaacacauuugugucugguaacugugauguuguaauaggaauugucaacaacacaguuuaugauccuuugcaaccugaauuagacucauucaaggaggaguuagauaaauauuuuaagaaucauacaucaccagauguugauuuaggugacaucucuggcauuaaugcuucaguuguaaacauucaaaaagaaauugaccgccucaaugagguugccaagaauuuaaaugaaucucucaucgaucuccaagaacuuggaaaguaugagcaguauauaaaauggccaugguacauuuggcuagguuuuauagcuggcuugauugccauaguaauggugacaauuaugcuuugcuguaugaccaguugcuguaguugucucaagggcuguuguucuuguggauccugcugcaaauuugaugaagacgacucugagccagugcucaaaggagucaaauuacauuacacauaa

SEQ ID NO: 11677 - RNA, 3822 nt, Artificial Sequence
  SARS-CoV-2/Sweden/01/2020__EPI_ISL_411951 spike protein CDS wt (1-1273)
auguuuguuuuucuuguuuuauugccacuagucucuagucaguguguuaaucuuacaaccagaacucaauuacccccugcauacacuaauucuuucacacgugguguuuauuacccugacaaaguuuucagauccucaguuuuacauucaacucaggacuuguucuuaccuuucuuuuccaauguuacuugguuccaugcuauacaugucucugggaccaaugguacuaagagguuugauaacccuguccuaccauuuaaugaugguguuuauuuugcuuccacugagaagucuaacauaauaagaggcuggauuuuugguacuacuuuagauucgaagacccagucccuacuuauuguuaauaacgcuacuaauguuguuauuaaagucugugaauuucaauuuuguaaugauccauuuuuggguguuuauuaccacaaaaacaacaaaaguuggauggaaagugaguucagaguuuauucuagugcgaauaauugcacuuuugaauaugucucucagccuuuucuuauggaccuugaaggaaaacaggguaauuucaaaaaucuuagggaauuuguguuuaagaauauugaugguuauuuuaaaauauauucuaagcacacgccuauuaauuuagugcgugaucucccucaggguuuuucggcuuuagaaccauugguagauuugccaauagguauuaacaucacuagguuucaaacuuuacuugcuuuacauagaaguuauuugacuccuggugauucuucuucagguuggacagcuggugcugcagcuuauuauguggguuaucuucaaccuaggacuuuucuauuaaaauauaaugaaaauggaaccauuacagaugcuguagacugugcacuugacccucucucagaaacaaaguguacguugaaauccuucacuguagaaaaaggaaucuaucaaacuucuaacuuuagaguccaaccaacagaaucuauuguuagauuuccuaauauuacaaacuugugcccuuuuggugaaguuuuuaacgccaccagauuugcaucuguuuaugcuuggaacaggaagagaaucagcaacuguguugcugauuauucuguccuauauaauuccgcaucauuuuccacuuuuaaguguuauggagugucuccuacuaaauuaaaugaucucugcuuuacuaaugucuaugcagauucauuuguaauuagaggugaugaagucagacaaaucgcuccagggcaaacuggaaagauugcugauuauaauuauaaauuaccagaugauuuuacaggcugcguuauagcuuggaauucuaacaaucuugauucuaagguuggugguaauuauaauuaccuguauagauuguuuaggaagucuaaucucaaaccuuuugagagagauauuucaacugaaaucuaucaggccgguagcacaccuuguaaugguguugaagguuuuaauuguuacuuuccuuuacaaucauaugguuuccaacccacuaaugguguugguuaccaaccauacagaguaguaguacuuucuuuugaacuucuacaugcaccagcaacuguuuguggaccuaaaaagucuacuaauuugguuaaaaacaaaugugucaauuucaacuucaaugguuuaacaggcacagguguucuuacugagucuaacaaaaaguuucugccuuuccaacaauuuggcagagacauugcugacacuacugaugcuguccgugauccacagacacuugagauucuugacauuacaccauguucuuuugguggugucaguguuauaacaccaggaacaaauacuucuaaccagguugcuguucuuuaucaggauguuaacugcacagaagucccuguugcuauucaugcagaucaacuuacuccuacuuggcguguuuauucuacagguucuaauguuuuucaaacacgugcaggcuguuuaauaggggcugaacaugucaacaacucauaugagugugacauacccauuggugcagguauaugcgcuaguuaucagacucagacuaauucuccucggcgggcacguaguguagcuagucaauccaucauugccuacacuaugucacuuggugcagaaaauucaguugcuuacucuaauaacucuauugccauacccacaaauuuuacuauuaguguuaccacagaaauucuaccagugucuaugaccaagacaucaguagauuguacaauguacauuuguggugauucaacugaaugcagcaaucuuuuguugcaauauggcaguuuuuguacacaauuaaaccgugcuuuaacuggaauagcuguugaacaagacaaaaacacccaagaaguuuuugcacaagucaaacaaauuuacaaaacaccaccaauuaaagauuguggugguuuuaauuuuucacaaauauuaccagauccaucaaaaccaagcaagaggucauuuauugaagaucuacuuuucaacaaagugacacuugcagaugcuggcuucaucaaacaauauggugauugccuuggugauauugcugcuagagaccucauuugugcacaaaaguuuaacggccuuacuguuuugccaccuuugcucacagaugaaaugauugcucaauacacuucugcacuguuagcggguacaaucacuucugguuggaccuuuggugcaggugcugcauuacaaauaccauuugcuaugcaaauggcuuauagguuuaaugguauuggaguuacacagaauguucucuaugagaaccaaaaauugauugccaaccaauuuaauagugcuauuggcaaaauucaagacucacuuucuuccacagcaagugcacuuggaaaacuucaagauguggucaaccaaaaugcacaagcuuuaaacacgcuuguuaaacaacuuagcuccaauuuuggugcaauuucaaguguuuuaaaugauauccuuucacgucuugacaaaguugaggcugaagugcaaauugauagguugaucacaggcagacuucaaaguuugcagacauaugugacucaacaauuaauuagagcugcagaaaucagagcuucugcuaaucuugcugcuacuaaaaugucagaguguguacuuggacaaucaaaaagaguugauuuuuguggaaagggcuaucaucuuauguccuucccucagucagcaccucaugguguagucuucuugcaugugacuuaugucccugcacaagaaaagaacuucacaacugcuccugccauuugucaugauggaaaagcacacuuuccucgugaaggugucuuuguuucaaauggcacacacugguuuguaacacaaaggaauuuuuaugaaccacaaaucauuacuacagacaacacauuugugucugguaacugugauguuguaauaggaauugucaacaacacaguuuaugauccuuugcaaccugaauuagacucauucaaggaggaguuagauaaauauuuuaagaaucauacaucaccagauguugauuuaggugacaucucuggcauuaaugcuucaguuguaaacauucaaaaagaaauugaccgccucaaugagguugccaagaauuuaaaugaaucucucaucgaucuccaagaacuuggaaaguaugagcaguauauaaaauggccaugguacauuuggcuagguuuuauagcuggcuugauugccauaguaauggugacaauuaugcuuugcuguaugaccaguugcuguaguugucucaagggcuguuguucuuguggauccugcugcaaauuugaugaagacgacucugagccagugcucaaaggagucaaauuacauuacacauaa

SEQ ID NO: 11678 - RNA, 3822 nt, Artificial Sequence
  SARS-CoV-2/Tianmen/HBCDC-HB-07/2020__EPI_ISL_412983 spike protein CDS wt (1-1273)
auguuuguuuuucuuguuuuauugccacuagucucuagucaguguguuaaucuuacaaccagaacucaauuacccccugcauacacuaauucuuucacacgugguguuuauuacccugacaaaguuuucagauccucaguuuuacauucaacucaggacuuguucuuaccuuucuuuuccaauguuacuugguuccaugcuauacaugucucugggaccaaugguacuaagagguuugauaacccuguccuaccauuuaaugaugguguuuauuuugcuuccacugagaagucuaacauaauaagaggcuggauuuuugguacuacuuuagauucgaagacccagucccuacuuauuguuaauaacgcuacuaauguuguuauuaaagucugugaauuucaauuuuguaaugauccauuuuuggguguuuauuaccacaaaaacaacaaaaguuggauggaaagugaguucagaguuuauucuagugcgaauaauugcacuuuugaauaugucucucagccuuuucuuauggaccuugaaggaaaacaggguaauuucaaaaaucuuagggaauuuguguuuaagaauauugaugguuauuuuaaaauauauucuaagcacacgccuauuaauuuagugcgugaucucccucaggguuuuucggcuuuagaaccauugguagauuugccaauagguauuaacaucacuagguuucaaacuuuacuugcuuuacauagaaguuauuugacuccuggugauucuucuucagguuggacagcuggugcugcagcuuauuauguggguuaucuucaaccuaggacuuuucuauuaaaauauaaugaaaauggaaccauuacagaugcuguagacugugcacuugacccucucucagaaacaaaguguacguugaaauccuucacuguagaaaaaggaaucuaucaaacuucuaacuuuagaguccaaccaacagaaucuauuguuagauuuccuaauauuacaaacuugugcccuuuuggugaaguuuuuaacgccaccagauuugcaucuguuuaugcuuggaacaggaagagaaucagcaacuguguugcugauuauucuguccuauauaauuccgcaucauuuuccacuuuuaaguguuauggagugucuccuacuaaauuaaaugaucucugcuuuacuaaugucuaugcagauucauuuguaauuagaggugaugaagucagacaaaucgcuccagggcaaacuggaaagauugcugauuauaauuauaaauuaccagaugauuuuacaggcugcguuauagcuuggaauucuaacaaucuugauucuaagguuggugguaauuauaauuaccuguauagauuguuuaggaagucuaaucucaaaccuuuugagagagauauuucaacugaaaucuaucaggccgguagcacaccuuguaaugguguugaagguuuuaauuguuacuuuccuuuacaaucauaugguuuccaacccacuaaugguguugguuaccaaccauacagaguaguaguacuuucuuuugaacuucuacaugcaccagcaacuguuuguggaccuaaaaagucuacuaauuugguuaaaaacaaaugugucaauuucaacuucaaugguuuaacaggcacagguguucuuacugagucuaacaaaaaguuucugccuuuccaacaauuuggcagagacauugcugacacuacugaugcuguccgugauccacagacacuugagauucuugacauuacaccauguucuuuugguggugucaguguuauaacaccaggaacaaauacuucuaaccagguugcuguucuuuaucaggaucuuaacugcacagaagucccuguugcuauucaugcagaucaacuuacuccuacuuggcguguuuauucuacagguucuaauguuuuucaaacacgugcaggcuguuuaauaggggcugaacaugucaacaacucauaugagugugacauacccauuggugcagguauaugcgcuaguuaucagacucagacuaauucuccucggcgggcacguaguguagcuagucaauccaucauugccuacacuaugucacuuggugcagaaaauucaguugcuuacucuaauaacucuauugccauacccacaaauuuuacuauuaguguuaccacagaaauucuaccagugucuaugaccaagacaucaguagauuguacaauguacauuuguggugauucaacugaaugcagcaaucuuuuguugcaauauggcaguuuuuguacacaauuaaaccgugcuuuaacuggaauagcuguugaacaagacaaaaacacccaagaaguuuuugcacaagucaaacaaauuuacaaaacaccaccaauuaaagauuuuggugguuuuaauuuuucacaaauauuaccagauccaucaaaaccaagcaagaggucauuuauugaagaucuacuuuucaacaaagugacacuugcagaugcuggcuucaucaaacaauauggugauugccuuggugauauugcugcuagagaccucauuugugcacaaaaguuuaacggccuuacuguuuugccaccuuugcucacagaugaaaugauugcucaauacacuucugcacuguuagcggguacaaucacuucugguuggaccuuuggugcaggugcugcauuacaaauaccauuugcuaugcaaauggcuuauagguuuaaugguauuggaguuacacagaauguucucuaugagaaccaaaaauugauugccaaccaauuuaauagugcuauuggcaaaauucaagacucacuuucuuccacagcaagugcacuuggaaaacuucaagauguggucaaccaaaaugcacaagcuuuaaacacgcuuguuaaacaacuuagcuccaauuuuggugcaauuucaaguguuuuaaaugauauccuuucacgucuugacaaaguugaggcugaagugcaaauugauagguugaucacaggcagacuucaaaguuugcagacauaugugacucaacaauuaauuagagcugcagaaaucagagcuucugcuaaucuugcugcuacuaaaaugucagaguguguacuuggacaaucaaaaagaguugauuuuuguggaaagggcuaucaucuuauguccuucccucagucagcaccucaugguguagucuucuugcaugugacuuaugucccugcacaagaaaagaacuucacaacugcuccugccauuugucaugauggaaaagcacacuuuccucgugaaggugucuuuguuucaaauggcacacacugguuuguaacacaaaggaauuuuuaugaaccacaaaucauuacuacagacaacacauuugugucugguaacugugauguuguaauaggaauugucaacaacacaguuuaugauccuuugcaaccugaauuagacucauucaaggaggaguuagauaaauauuuuaagaaucauacaucaccagauguugauuuaggugacaucucuggcauuaaugcuucaguuguaaacauucaaaaagaaauugaccgccucaaugagguugccaagaauuuaaaugaaucucucaucgaucuccaagaacuuggaaaguaugagcaguauauaaaauggccaugguacauuuggcuagguuuuauagcuggcuugauugccauaguaauggugacaauuaugcuuugcuguaugaccaguugcuguaguugucucaagggcuguuguucuuguggauccugcugcaaauuugaugaagacgacucugagccagugcucaaaggagucaaauuacauuacacauaa

SEQ ID NO: 11679 - RNA, 3822 nt, Artificial Sequence
  SARS-CoV-2/Hong Kong/case42_VM20002493/2020__EPI_ISL_414527 spike protein CDS wt (1-1273)
auguuuguuuuucuuguuuuauugccacuagucucuagucaguguguuaaucuuacaaccagaacucaauuacccccugcauacacuaauucuuucacacgugguguuuauuacccugacaaaguuuucagauccucaguuuuacauucaacucaggacuuguucuuaccuuucuuuuccaauguuacuugguuccaugcuauacaugucucugggaccaaugguacuaagagguuugauaacccuguccuaccauuuaaugaugguguuuauuuugcuuccacugagaagucuaacauaauaagaggcuggauuuuugguacuacuuuagauucgaagacccagucccuacuuauuguuaauaacgcuacuaauguuguuauuaaagucugugaauuucaauuuuguaaugauccauuuuuggguguuuauuaccacaaaaacaacaaaaguuggauggaaagugaguucagaguuuauucuagugcgaauaauugcacuuuugaauaugucucucagccuuuucuuauggaccuugaaggaaaacaggguaauuucaaaaaucuuagggaauuuguguuuaagaauauugaugguuauuuuaaaauauauucuaagcacacgccuauuaauuuagugcgugaucucccucaggguuuuucggcuuuagaaccauugguagauuugccaauagguauuaacaucacuagguuucaaacuuuacuugcuuuacauagaaguuauuugacuccuggugauucuucuucagguuggacagcuggugcugcagcuuauuauguggguuaucuucaaccuaggacuuuucuauuaaaauauaaugaaaauggaaccauuacagaugcuguagacugugcacuugacccucucucagaaacaaaguguacguugaaauccuucacuguagaaaaaggaaucuaucaaacuucuaacuuuagaguccaaccaacagaaucuauuguuagauuuccuaauauuacaaacuugugcccuuuuggugaaguuuuuaacgccaccagauuugcaucuguuuaugcuuggaacaggaagagaaucagcaacuguguugcugauuauucuguccuauauaauuccgcaucauuuuccacuuuuaaguguuauggagugucuccuacuaaauuaaaugaucucugcuuuacuaaugucuaugcagauucauuuguaauuagaggugaugaagucagacaaaucgcuccagggcaaacuggaaagauugcugauuauaauuauaaauuaccagaugauuuuacaggcugcguuauagcuuggaauucuaacaaucuugauucuaagguuggugguaauuauaauuaccuguauagauuguuuaggaagucuaaucucaaaccuuuugagagagauauuucaacugaaaucuaucaggccgguagcacaccuuguaaugguguugaagguuuuaauuguuacuuuccuuuacaaucauaugguuuccaacccacuaaugguguugguuaccaaccauacagaguaguaguacuuucuuuugaacuucuacaugcaccagcaacuguuuguggaccuaaaaagucuacuaauuugguuaaaaacaaaugugucaauuucaacuucaaugguuuaacaggcacagguguucuuacugagucuaacaaaaaguuucugccuuuccaacaauuuggcagagacauugcugacacuacugaugcuguccgugauccacagacacuugagauucuugacauuacaccauguucuuuugguggugucaguguuauaacaccaggaacaaauacuucuaaccagguugcuguucuuuaucaggauguuaacugcacagaagucccuguugcuauucaugcagaucaacuuacuccuacuuggcguguuuauucuacagguucuaauguuuuucaaacacgugcaggcuguuuaauaggggcugaacaugucaacaacucauaugagugugacauacccauuggugcagguauaugcgcuaguuaucagacucagacuaauucuccucggcgggcacguaguguagcuagucaauccaucauugccuacacuaugucacuuggugcagaaaauucaguugcuuacucuaauaacucuauugccauacccacaaauuuugcuauuaguguuaccacagaaauucuaccagugucuaugaccaagacaucaguagauuguacaauguacauuuguggugauucaacugaaugcagcaaucuuuuguugcaauauggcaguuuuuguacacaauuaaaccgugcuuuaacuggaauagcuguugaacaagacaaaaacacccaagaaguuuuugcacaagucaaacaaauuuacaaaacaccaccaauuaaagauuuuggugguuuuaauuuuucacaaauauuaccagauccaucaaaaccaagcaagaggucauuuauugaagaucuacuuuucaacaaagugacacuugcagaugcuggcuucaucaaacaauauggugauugccuuggugauauugcugcuagagaccucauuugugcacaaaaguuuaacggccuuacuguuuugccaccuuugcucacagaugaaaugauugcucaauacacuucugcacuguuagcggguacaaucacuucugguuggaccuuuggugcaggugcugcauuacaaauaccauuugcuaugcaaauggcuuauagguuuaaugguauuggaguuacacagaauguucucuaugagaaccaaaaauugauugccaaccaauuuaauagugcuauuggcaaaauucaagacucacuuucuuccacagcaagugcacuuggaaaacuucaagauguggucaaccaaaaugcacaagcuuuaaacacgcuuguuaaacaacuuagcuccaauuuuggugcaauuucaaguguuuuaaaugauauccuuucacgucuugacaaaguugaggcugaagugcaaauugauagguugaucacaggcagacuucaaaguuugcagacauaugugacucaacaauuaauuagagcugcagaaaucagagcuucugcuaaucuugcugcuacuaaaaugucagaguguguacuuggacaaucaaaaagaguugauuuuuguggaaagggcuaucaucuuauguccuucccucagucagcaccucaugguguagucuucuugcaugugacuuaugucccugcacaagaaaagaacuucacaacugcuccugccauuugucaugauggaaaagcacacuuuccucgugaaggugucuuuguuucaaauggcacacacugguuuguaacacaaaggaauuuuuaugaaccacaaaucauuacuacagacaacacauuugugucugguaacugugauguuguaauaggaauugucaacaacacaguuuaugauccuuugcaaccugaauuagacucauucaaggaggaguuagauaaauauuuuaagaaucauacaucaccagauguugauuuaggugacaucucuggcauuaaugcuucaguuguaaacauucaaaaagaaauugaccgccucaaugagguugccaagaauuuaaaugaaucucucaucgaucuccaagaacuuggaaaguaugagcaguauauaaaauggccaugguacauuuggcuagguuuuauagcuggcuugauugccauaguaauggugacaauuaugcuuugcuguaugaccaguugcuguaguugucucaagggcuguuguucuuguggauccugcugcaaauuugaugaagacgacucugagccagugcucaaaggagucaaauuacauuacacauaa

SEQ ID NO: 11680 - RNA, 3822 nt, Artificial Sequence
  SARS-CoV-2/USA/CruiseA-23/2020__EPI_ISL_414482 spike protein CDS wt (1-1273)
auguuuguuuuucuuguuuuauugccacuagucucuagucaguguguuaaucuuacaaccagaacucaauuacccccugcauacacuaauucuuucacacgugguguuuauuacccugacaaaguuuucagauccucaguuuuacauucaacucaggacuuguucuuaccuuucuuuuccaauguuacuugguuccaugcuauacaugucucugggaccaaugguacuaagagguuugauaacccuguccuaccauuuaaugaugguguuuauuuugcuuccacugagaagucuaacauaauaagaggcuggauuuuugguacuacuuuagauucgaagacccagucccuacuuauuguuaauaacgcuacuaauguuguuauuaaagucugugaauuucaauuuuguaaugauccauuuuuggguguuuauuaccacaaaaacaacaaaaguuggauggaaagugaguucagaguuuauucuagugcgaauaauugcacuuuugaauaugucucucagccuuuucuuauggaccuugaaguaaaacaggguaauuucaaaaaucuuagggaauuuguguuuaagaauauugaugguuauuuuaaaauauauucuaagcacacgccuauuaauuuagugcgugaucucccucaggguuuuucggcuuuagaaccauugguagauuugccaauagguauuaacaucacuagguuucaaacuuuacuugcuuuacauagaaguuauuugacuccuggugauucuucuucagguuggacagcuggugcugcagcuuauuauguggguuaucuucaaccuaggacuuuucuauuaaaauauaaugaaaauggaaccauuacagaugcuguagacugugcacuugacccucucucagaaacaaaguguacguugaaauccuucacuguagaaaaaggaaucuaucaaacuucuaacuuuagaguccaaccaacagaaucuauuguuagauuuccuaauauuacaaacuugugcccuuuuggugaaguuuuuaacgccaccagauuugcaucuguuuaugcuuggaacaggaagagaaucagcaacuguguugcugauuauucuguccuauauaauuccgcaucauuuuccacuuuuaaguguuauggagugucuccuacuaaauuaaaugaucucugcuuuacuaaugucuaugcagauucauuuguaauuagaggugaugaagucagacaaaucgcuccagggcaaacuggaaagauugcugauuauaauuauaaauuaccagaugauuuuacaggcugcguuauagcuuggaauucuaacaaucuugauucuaagguuggugguaauuauaauuaccuguauagauuguuuaggaagucuaaucucaaaccuuuugagagagauauuucaacugaaaucuaucaggccgguagcacaccuuguaaugguguugaagguuuuaauuguuacuuuccuuuacaaucauaugguuuccaacccacuaaugguguugguuaccaaccauacagaguaguaguacuuucuuuugaacuucuacaugcaccagcaacuguuuguggaccuaaaaagucuacuaauuugguuaaaaacaaaugugucaauuucaacuucaaugguuuaacaggcacagguguucuuacugagucuaacaaaaaguuucugccuuuccaacaauuuggcagagacauugcugacacuacugaugcuguccgugauccacagacacuugagauucuugacauuacaccauguucuuuugguggugucaguguuauaacaccaggaacaaauacuucuaaccagguugcuguucuuuaucaggauguuaacugcacagaagucccuguugcuauucaugcagaucaacuuacuccuacuuggcguguuuauucuacagguucuaauguuuuucaaacacgugcaggcuguuuaauaggggcugaacaugucaacaacucauaugagugugacauacccauuggugcagguauaugcgcuaguuaucagacucagacuaauucuccucggcgggcacguaguguagcuagucaauccaucauugccuacacuaugucacuuggugcagaaaauucaguugcuuacucuaauaacucuauugccauacccacaaauuuuacuauuaguguuaccacagaaauucuaccagugucuaugaccaagacaucaguagauuguacaauguacauuuguggugauucaacugaaugcagcaaucuuuuguugcaauauggcaguuuuuguacacaauuaaaccgugcuuuaacuggaauagcuguugaacaagacaaaaacacccaagaaguuuuugcacaagucaaacaaauuuacaaaacaccaccaauuaaagauuuuggugguuuuaauuuuucacaaauauuaccagauccaucaaaaccaagcaagaggucauuuauugaagaucuacuuuucaacaaagugacacuugcagaugcuggcuucaucaaacaauauggugauugccuuggugauauugcugcuagagaccucauuugugcacaaaaguuuaacggccuuacuguuuugccaccuuugcucacagaugaaaugauugcucaauacacuucugcacuguuagcggguacaaucacuucugguuggaccuuuggugcaggugcugcauuacaaauaccauuugcuaugcaaauggcuuauagguuuaaugguauuggaguuacacagaauguucucuaugagaaccaaaaauugauugccaaccaauuuaauagugcuauuggcaaaauucaagacucacuuucuuccacagcaagugcacuuggaaaacuucaagauguggucaaccaaaaugcacaagcuuuaaacacgcuuguuaaacaacuuagcuccaauuuuggugcaauuucaaguguuuuaaaugauauccuuucacgucuugacaaaguugaggcugaagugcaaauugauagguugaucacaggcagacuucaaaguuugcagacauaugugacucaacaauuaauuagagcugcagaaaucagagcuucugcuaaucuugcugcuacuaaaaugucagaguguguacuuggacaaucaaaaagaguugauuuuuguggaaagggcuaucaucuuauguccuucccucagucagcaccucaugguguagucuucuugcaugugacuuaugucccugcacaagaaaagaacuucacaacugcuccugccauuugucaugauggaaaagcacacuuuccucgugaaggugucuuuguuucaaauggcacacacugguuuguaacacaaaggaauuuuuaugaaccacaaaucauuacuacagacaacacauuugugucugguaacugugauguuguaauaggaauugucaacaacacaguuuaugauccuuugcaaccugaauuagacucauucaaggaggaguuagauaaauauuuuaagaaucauacaucaccagauguugauuuaggugacaucucuggcauuaaugcuucaguuguaaacauucaaaaagaaauugaccgccucaaugagguugccaagaauuuaaaugaaucucucaucgaucuccaagaacuuggaaaguaugagcaguauauaaaauggccaugguacauuuggcuagguuuuauagcuggcuugauugccauaguaauggugacaauuaugcuuugcuguaugaccaguugcuguaguugucucaagggcuguuguucuuguggauccugcugcaaauuugaugaagacgacucugagccagugcucaaaggagucaaauuacauuacacauaa

SEQ ID NO: 11681 - RNA, 3822 nt, Artificial Sequence
  SARS-CoV-2/Hong Kong/case85_VM20002868/2020__EPI_ISL_414519 spike protein CDS wt (1-1273)
auguuuguuuuucuuguuuuagugccacuagucucuagucaguguguuaaucuuacaaccagaacucaauuacccccugcauacacuaauucuuucacacgugguguuuauuacccugacaaaguuuucagauccucaguuuuacauucaacucaggacuuguucuuaccuuucuuuuccaauguuacuugguuccaugcuauacaugucucugggaccaaugguacuaagagguuugauaacccuguccuaccauuuaaugaugguguuuauuuugcuuccacugagaagucuaacauaauaagaggcuggauuuuugguacuacuuuagauucgaagacccagucccuacuuauuguuaauaacgcuacuaauguuguuauuaaagucugugaauuucaauuuuguaaugauccauuuuuggguguuuauuaccacaaaaacaacaaaaguuggauggaaagugaguucagaguuuauucuagugcgaauaauugcacuuuugaauaugucucucagccuuuucuuauggaccuugaaggaaaacaggguaauuucaaaaaucuuagggaauuuguguuuaagaauauugaugguuauuuuaaaauauauucuaagcacacgccuauuaauuuagugcgugaucucccucaggguuuuucggcuuuagaaccauugguagauuugccaauagguauuaacaucacuagguuucaaacuuuacuugcuuuacauagaaguuauuugacuccuggugauucuucuucagguuggacagcuggugcugcagcuuauuauguggguuaucuucaaccuaggacuuuucuauuaaaauauaaugaaaauggaaccauuacagaugcuguagacugugcacuugacccucucucagaaacaaaguguacguugaaauccuucacuguagaaaaaggaaucuaucaaacuucuaacuuuagaguccaaccaacagaaucuauuguuagauuuccuaauauuacaaacuugugcccuuuuggugaaguuuuuaacgccaccagauuugcaucuguuuaugcuuggaacaggaagagaaucagcaacuguguugcugauuauucuguccuauauaauuccgcaucauuuuccacuuuuaaguguuauggagugucuccuacuaaauuaaaugaucucugcuuuacuaaugucuaugcagauucauuuguaauuagaggugaugaagucagacaaaucgcuccagggcaaacuggaaagauugcugauuauaauuauaaauuaccagaugauuuuacaggcugcguuauagcuuggaauucuaacaaucuugauucuaagguuggugguaauuauaauuaccuguauagauuguuuaggaagucuaaucucaaaccuuuugagagagauauuucaacugaaaucuaucaggccgguagcacaccuuguaaugguguugaagguuuuaauuguuacuuuccuuuacaaucauaugguuuccaacccacuaaugguguugguuaccaaccauacagaguaguaguacuuucuuuugaacuucuacaugcaccagcaacuguuuguggaccuaaaaagucuacuaauuugguuaaaaacaaaugugucaauuucaacuucaaugguuuaacaggcacagguguucuuacugagucuaacaaaaaguuucugccuuuccaacaauuuggcagagacauugcugacacuacugaugcuguccgugauccacagacacuugagauucuugacauuacaccauguucuuuugguggugucaguguuauaacaccaggaacaaauacuucuaaccagguugcuguucuuuaucaggauguuaacugcacagaagucccuguugcuauucaugcagaucaacuuacuccuacuuggcguguuuauucuacagguucuaauguuuuucaaacacgugcaggcuguuuaauaggggcugaacaugucaacaacucauaugagugugacauacccauuggugcagguauaugcgcuaguuaucagacucagacuaauucuccucggcgggcacguaguguagcuagucaauccaucauugccuacacuaugucacuuggugcagaaaauucaguugcuuacucuaauaacucuauugccauacccacaaauuuuacuauuaguguuaccacagaaauucuaccagugucuaugaccaagacaucaguagauuguacaauguacauuuguggugauucaacugaaugcagcaaucuuuuguugcaauauggcaguuuuuguacacaauuaaaccgugcuuuaacuggaauagcuguugaacaagacaaaaacacccaagaaguuuuugcacaagucaaacaaauuuacaaaacaccaccaauuaaagauuuuggugguuuuaauuuuucacaaauauuaccagauccaucaaaaccaagcaagaggucauuuauugaagaucuacuuuucaacaaagugacacuugcagaugcuggcuucaucaaacaauauggugauugccuuggugauauugcugcuagagaccucauuugugcacaaaaguuuaacggccuuacuguuuugccaccuuugcucacagaugaaaugauugcucaauacacuucugcacuguuagcggguacaaucacuucugguuggaccuuuggugcaggugcugcauuacaaauaccauuugcuaugcaaauggcuuauagguuuaaugguauuggaguuacacagaauguucucuaugagaaccaaaaauugauugccaaccaauuuaauagugcuauuggcaaaauucaagacucacuuucuuccacagcaagugcacuuggaaaacuucaagauguggucaaccaaaaugcacaagcuuuaaacacgcuuguuaaacaacuuagcuccaauuuuggugcaauuucaaguguuuuaaaugauauccuuucacgucuugacaaaguugaggcugaagugcaaauugauagguugaucacaggcagacuucaaaguuugcagacauaugugacucaacaauuaauuagagcugcagaaaucagagcuucugcuaaucuugcugcuacuaaaaugucagaguguguacuuggacaaucaaaaagaguugauuuuuguggaaagggcuaucaucuuauguccuucccucagucagcaccucaugguguagucuucuugcaugugacuuaugucccugcacaagaaaagaacuucacaacugcuccugccauuugucaugauggaaaagcacacuuuccucgugaaggugucuuuguuucaaauggcacacacugguuuguaacacaaaggaauuuuuaugaaccacaaaucauuacuacagacaacacauuugugucugguaacugugauguuguaauaggaauugucaacaacacaguuuaugauccuuugcaaccugaauuagacucauucaaggaggaguuagauaaauauuuuaagaaucauacaucaccagauguugauuuaggugacaucucuggcauuaaugcuucaguuguaaacauucaaaaagaaauugaccgccucaaugagguugccaagaauuuaaaugaaucucucaucgaucuccaagaacuuggaaaguaugagcaguauauaaaauggccaugguacauuuggcuagguuuuauagcuggcuugauugccauaguaauggugacaauuaugcuuugcuguaugaccaguugcuguaguugucucaagggcuguuguucuuguggauccugcugcaaauuugaugaagacgacucugagccagugcucaaaggagucaaauuacauuacacauaa

SEQ ID NO: 11682 - RNA, 3822 nt, Artificial Sequence
  SARS-CoV-2/England/200990660/2020__EPI_ISL_414523 spike protein CDS wt (1-1273)
auguuuguuuuucuuguuuuauugccacuagucucuagucaguguguuaaucuuacaaccagaacucaauuacccccugcauacacuaauucuuucacacgugguguuuauuacccugacaaaguuuucagauccucaguuuuacauucaacucaggacuuguucuuaccuuucuuuuccaauguuacuugguuccaugcuauacaugucucugggaccaaugguacuaagagguuugauaacccuguccuaccauuuaaugaugguguuuauuuugcuuccacugagaagucuaacauaauaagaggcuggauuuuugguacuacuuuagauucgaagacccagucccuacuuauuguuaauaacgcuacuaauguuguuauuaaagucugugaauuucaauuuuguaaugauccauuuuuggguguuuauuaccacaaaaacaacaaaaguuggauggaaagugaguucagaguuuauucuagugcgaauaauugcacuuuugaauaugucucucagccuuuucuuauggaccuugaaggaaaacaggguaauuucaaaaaucuuagggaauuuguguuuaagaauauugaugguuauuuuaaaauauauucuaagcacacgccuauuaauuuagugcgugaucucccucaggguuuuucggcuuuagaaccauugguagauuugccaauagguauuaacaucacuagguuucaaacuuuacuugcuuuacauagaaguuauuugacuccuggugauucuucuucagguuggacagcuggugcugcagcuuauuauguggguuaucuucaaccuaggacuuuucuauuaaaauauaaugaaaauggaaccauuacagaugcuguagacugugcacuugacccucucucagaaacaaaguguacguugaaauccuucacuguagaaaaaggaaucuaucaaacuucuaacuuuagaguccaaccaacagaaucuauuguuagauuuccuaauauuacaaacuugugcccuuuuggugaaguuuuuaacgccaccagauuugcaucuguuuaugcuuggaacaggaagagaaucagcaacuguguugcugauuauucuguccuauauaauuccgcaucauuuuccacuuuuaaguguuauggagugucuccuacuaaauuaaaugaucucugcuuuacuaaugucuaugcagauucauuuguaauuagaggugaugaagucagacaaaucgcuccagggcaaacuggaaagauugcugauuauaauuauaaauuaccagaugauuuuacaggcugcguuauagcuuggaauucuaacaaucuugauucuaagguuggugguaauuauaauuaccuguauagauuguuuaggaagucuaaucucaaaccuuuugagagagauauuucaacugaaaucuaucaggccgguagcacaccuuguaaugguguugaagguuuuaauuguuacuuuccuuuacaaucauaugguuuccaacccacuaaugguguugguuaccaaccauacagaguaguaguacuuucuuuugaacuucuacaugcaccagcaacuguuuguggaccuaaaaagucuacuaauuugguuaaaaacaaaugugucaauuucaacuucaaugguuuaacaggcacagguguucuuacugagucuaacaaaaaguuucugccuuuccaacaauuuggcagagacauugcugacacuacugaugcuguccgugauccacagacacuugagauucuugacauuacaccauguucuuuugguggugucaguguuauaacaccaggaacaaauacuucuaaccagguugcuguucuuuaucaggguguuaacugcacagaagucccuguugcuauucaugcagaucaacuuacuccuacuuggcguguuuauucuacagguucuaauguuuuucaaacacgugcaggcuguuuaauaggggcugaacaugucaacaacucauaugagugugacauacccauuggugcagguauaugcgcuaguuaucagacucagacuaauucuccucggcgggcacguaguguagcuagucaauccaucauugccuacacuaugucacuuggugcagaaaauucaguugcuuacucuaauaacucuauugccauacccacaaauuuuacuauuaguguuaccacagaaauucuaccagugucuaugaccaagacaucaguagauuguacaauguacauuuguggugauucaacugaaugcagcaaucuuuuguugcaauauggcaguuuuuguacacaauuaaaccgugcuuuaacuggaauagcuguugaacaagacaaaaacacccaagaaguuuuugcacaagucaaacaaauuuacaaaacaccaccaauuaaagauuuuggugguuuuaauuuuucacaaauauuaccagauccaucaaaaccaagcaagaggucauuuauugaagaucuacuuuucaacaaagugacacuugcagaugcuggcuucaucaaacaauauggugauugccuuggugauauugcugcuagagaccucauuugugcacaaaaguuuaacggccuuacuguuuugccaccuuugcucacagaugaaaugauugcucaauacacuucugcacuguuagcggguacaaucacuucugguuggaccuuuggugcaggugcugcauuacaaauaccauuugcuaugcaaauggcuuauagguuuaaugguauuggaguuacacagaauguucucuaugagaaccaaaaauugauugccaaccaauuuaauagugcuauuggcaaaauucaagacucacuuucuuccacagcaagugcacuuggaaaacuucaagauguggucaaccaaaaugcacaagcuuuaaacacgcuuguuaaacaacuuagcuccaauuuuggugcaauuucaaguguuuuaaaugauauccuuucacgucuugacaaaguugaggcugaagugcaaauugauagguugaucacaggcagacuucaaaguuugcagacauaugugacucaacaauuaauuagagcugcagaaaucagagcuucugcuaaucuugcugcuacuaaaaugucagaguguguacuuggacaaucaaaaagaguugauuuuuguggaaagggcuaucaucuuauguccuucccucagucagcaccucaugguguagucuucuugcaugugacuuaugucccugcacaagaaaagaacuucacaacugcuccugccauuugucaugauggaaaagcacacuuuccucgugaaggugucuuuguuucaaauggcacacacugguuuguaacacaaaggaauuuuuaugaaccacaaaucauuacuacagacaacacauuugugucugguaacugugauguuguaauaggaauugucaacaacacaguuuaugauccuuugcaaccugaauuagacucauucaaggaggaguuagauaaauauuuuaagaaucauacaucaccagauguugauuuaggugacaucucuggcauuaaugcuucaguuguaaacauucaaaaagaaauugaccgccucaaugagguugccaagaauuuaaaugaaucucucaucgaucuccaagaacuuggaaaguaugagcaguauauaaaauggccaugguacauuuggcuagguuuuauagcuggcuugauugccauaguaauggugacaauuaugcuuugcuguaugaccaguugcuguaguugucucaagggcuguuguucuuguggauccugcugcaaauuugaugaagacgacucugagcuagugcucaaaggagucaaauuacauuacacauaa

SEQ ID NO: 11683 - RNA, 3822 nt, Artificial Sequence
  SARS-CoV-2/Australia/NSW09/2020__EPI_ISL_413595 spike protein CDS wt (1-1273)
auguuuguuuuucuuguuuuauugccacuagucucuagucaguguguuaaucuuacaaccagaacucaauuacccccugcauacacuaauucuuucacacgugguguuuauuacccugacaaaguuuucagauccucaguuuuacauucaacucaggacuuguucuuaccuuucuuuuccaauguuacuugguuccaugcuauacaugucucugggaccaaugguacuaagagguuugauaacccuguccuaccauuuaaugaugguguuuauuuugcuuccacugagaagucuaacauaauaagaggcuggauuuuugguacuacuuuagauucgaagacccagucccuacuuauuguuaauaacgcuacuaauguuguuauuaaagucugugaauuucaauuuuguaaugauccauuuuuggguguuuauuaccacaaaaacaacaaaaguuggauggaaagugaguucagaguuuauucuagugcgaauaauugcacuuuugaauaugucucucagccuuuucuuauggaccuugaaggaaaacaggguaauuucaaaaaucuuagggaauuuguguuuaagaauauugaugguuauuuuaaaauauauucuaagcacacgccuauuaauuuagugcgugaucucccucaggguuuuucggcuuuagaaccauugguagauuugccaauagguauuaacaucacuagguuucaaacuuuacuugcuuuacauagaaguuauuugacuccuggugauucuucuucagguuggacagcuggugcugcagcuuauuauguggguuaucuucaaccuaggacuuuucuauuaaaauauaaugaaaauggaaccauuacagaugcuguagacugugcacuugacccucucucagaaacaaaguguacguugaaauccuucacuguagaaaaaggaaucuaucaaacuucuaacuuuagaguccaaccaacagaaucuauuguuagauuuccuaauauuacaaacuugugcccuuuuggugaaguuuuuaacgccaccagauuugcaucuguuuaugcuuggaacaggaagagaaucagcaacuguguugcugauuauucuguccuauauaauuccgcaucauuuuccacuuuuaaguguuauggagugucuccuacuaaauuaaaugaucucugcuuuacuaaugucuaugcagauucauuuguaauuagaggugaugaagucagacaaaucgcuccagggcaaacuggaaagauugcugauuauaauuauaaauuaccagaugauuuuacaggcugcguuauagcuuggaauucuaacaaucuugauucuaagguuggugguaauuauaauuaccuguauagauuguuuaggaagucuaaucucaaaccuuuugagagagauauuucaacugaaaucuaucaggccgguagcacaccuuguaaugguguugaagguuuuaauuguuacuuuccuuuacaaucauaugguuuccaacccacuaaugguguugguuaccaaccauacagaguaguaguacuuucuuuugaacuucuacaugcaccagcaacuguuuguggaccuaaaaagucuacuaauuugguuaaaaacaaaugugucaauuucaacuucaaugguuuaacaggcacagguguucuuacugagucuaacaaaaaguuucugccuuuccaacaauuuggcagagacauugcugacacuacugaugcuguccgugauccacagacacuugagauucuugacauuacaccauguucuuuugguggugucaguguuauaacaccaggaacaaauacuucuaaccagguugcuguucuuuaucaggauguuaacugcacagaagucccuguugcuauucaugcagaucaacuuacuccuacuuggcguguuuauucuacagguucuaauguuuuucaaacacgugcaggcuguuuaauaggggcugaacaugucaacaacucauaugagugugacauacccauuggugcagguauaugcgcuaguuaucagacucagacuaauucuccucggcgggcacguaguguagcuagucaauccaucauugccuacacuaugucacuuggugcagaaaauucaguugcuuacucuaauaacucuauugccauacccacaaauuuuacuauuaguguuaccacagaaauucuaccagugucuaugaccaagacaucaguagauuguacaauguacauuuguggugauucaacugaaugcagcaaucuuuuguugcaauauggcaguuuuuguacacaauuaaaccgugcuuuaacuggaauagcuguugaacaagacaaaaacacccaagaaguuuuugcacaagucaaacaaauuuacaaaacaccaccaauuaaagauuuuggugguuuuaauuuuucacaaauauuaccagauccaucaaaaccaagcaagaggucauuuauugaagaucuacuuuucaacaaagugacacuugcagaugcuggcuucaucaaacaauauggugauugccuuggugauauugcugcuagagaccucauuugugcacaaaaguuuaacggccuuacuguuuugccaccuuugcucacagaugaaaugauugcucaauacacuucugcacuguuagcggguacaaucacuucugguuggaccuuuggugcaggugcugcauuacaaauaccauuugcuaugcaaauggcuuauagguuuaaugguauuggaguuacacagaauguucucuaugagaaccaaaaauugauugccaaccaauuuaauagugcuauuggcaaaauucaagacucacuuucuuucacagcaagugcacuuggaaaacuucaagauguggucaaccaaaaugcacaagcuuuaaacacgcuuguuaaacaacuuagcuccaauuuuggugcaauuucaaguguuuuaaaugauauccuuucacgucuugacaaaguugaggcugaagugcaaauugauagguugaucacaggcagacuucaaaguuugcagacauaugugacucaacaauuaauuagagcugcagaaaucagagcuucugcuaaucuugcugcuacuaaaaugucagaguguguacuuggacaaucaaaaagaguugauuuuuguggaaagggcuaucaucuuauguccuucccucagucagcaccucaugguguagucuucuugcaugugacuuaugucccugcacaagaaaagaacuucacaacugcuccugccauuugucaugauggaaaagcacacuuuccucgugaaggugucuuuguuucaaauggcacacacugguuuguaacacaaaggaauuuuuaugaaccacaaaucauuacuacagacaacacauuugugucugguaacugugauguuguaauaggaauugucaacaacacaguuuaugauccuuugcaaccugaauuagacucauucaaggaggaguuagauaaauauuuuaagaaucauacaucaccagauguugauuuaggugacaucucuggcauuaaugcuucaguuguaaacauucaaaaagaaauugaccgccucaaugagguugccaagaauuuaaaugaaucucucaucgaucuccaagaacuuggaaaguaugagcaguauauaaaauggccaugguacauuuggcuagguuuuauagcuggcuugauugccauaguaauggugacaauuaugcuuugcuguaugaccaguugcuguaguugucucaagggcuguuguucuuguggauccugcugcaaauuugaugaagacgacucugagccagugcucaaaggagucaaauuacauuacacauaa

SEQ ID NO: 11684 - RNA, 3822 nt, Artificial Sequence
  SARS-CoV-2/Australia/NSW10/2020__EPI_ISL_413596 spike protein CDS wt (1-1273)
auguuuguuuuucuuguuuuauugccacuagucucuagucaguguguuaaucuuacaaccagaacucaauuacccccugcauacacuaauucuuucacacgugguguuuauuacccugacaaaguuuucagauccucaguuuuacauucaacucaggacuuguucuuaccuuucuuuuccaauguuacuugguuccaugcuauacaugucucugggaccaaugguacuaagagguuugauaacccuguccuaccauuuaaugaugguguuuauuuugcuuccacugagaagucuaacauaauaagaggcuggauuuuugguacuacuuuagauucgaagacccagucccuacuuauuguuaauaacgcuacuaauguuguuauuaaagucugugaauuucaauuuuguaaugauccauuuuuggguguuuauuaccacaaaaacaacaaaaguuggauggaaagugaguucagaguuuauucuagugcgaauaauugcacuuuugaauaugucucucagccuuuucuuauggaccuugaaggaaaacaggguaauuucaaaaaucuuagggaauuuguguuuaagaauauugaugguuauuuuaaaauauauucuaagcacacgccuauuaauuuagugcgugaucucccucaggguuuuucggcuuuagaaccauugguagauuugccaauagguauuaacaucacuagguuucaaacuuuacuugcuuuacauagaaguuauuugacuccuggugauucuucuucagguuggacagcuggugcugcagcuuauuauguggguuaucuucaaccuaggacuuuucuauuaaaauauaaugaaaauggaaccauuacagaugcuguagacugugcacuugacccucucucagaaacaaaguguacguugaaauccuucacuguagaaaaaggaaucuaucaaacuucuaacuuuagaguccaaccaacagaaucuauuguuagauuuccuaauauuacaaacuugugcccuuuuggugaaguuuuuaacgccaccagauuugcaucuguuuaugcuuggaacaggaagagaaucagcaacuguguugcugauuauucuguccuauauaauuccgcaucauuuuccacuuuuaaguguuauggagugucuccuacuaaauuaaaugaucucugcuuuacuaaugucuaugcagauucauuuguaauuagaggugaugaagucagacaaaucgcuccagggcaaacuggaaagauugcugauuauaauuauaaauuaccagaugauuuuacaggcugcguuauagcuuggaauucuaacaaucuugauucuaagguuggugguaauuauaauuaccuguauagauuguuuaggaagucuaaucucaaaccuuuugagagagauauuucaacugaaaucuaucaggccgguagcacaccuuguaaugguguugaagguuuuaauuguuacuuuccuuuacaaucauaugguuuccaacccacuaaugguguugguuaccaaccauacagaguaguaguacuuucuuuugaacuucuacaugcaccagcaacuguuuguggaccuaaaaagucuacuaauuugguuaaaaacaaaugugucaauuucaacuucaaugguuuaacaggcacagguguucuuacugagucuaacaaaaaguuucugccuuuccaacaauuuggcagagacauugcugacacuacugaugcuguccgugauccacagacacuugagauucuugacauuacaccauguucuuuugguggugucaguguuauaacaccaggaacaaauacuucuaaccagguugcuguucuuuaucaggauguuaacugcacagaagucccuguugcuauucaugcagaucaacuuacuccuacuuggcguguuuauucuacagguucuaauguuuuucaaacacgugcaggcuguuuaauaggggcugaacaugucaacaacucauaugagugugacauacccauuggugcagguauaugcgcuaguuaucagacucagacuaauucuccucggcgggcacguaguguagcuagucaauccaucauugccuacacuaugucacuuggugcagaaaauucaguugcuuacucuaauaacucuauugccauacccacaaauuuuacuauuaguguuaccacagaaauucuaccagugucuaugaccaagacaucaguagauuguacaauguacauuuguggugauucaacugaaugcagcaaucuuuuguugcaauauggcaguuuuuguacacaauuaaaccgugcuuuaacuggaauagcuguugaacaagacaaaaacacccaagaaguuuuugcacaagucaaacaaauuuacaaaacaccaccaauuaaagauuuuggugguuuuaauuuuucacaaauauuaccagauccaucaaaaccaagcaagaggucauuuauugaagaucuacuuuucaacaaagugacacuugcagaugcuggcuucaucaaacaauauggugauugccuuggugauauugcugcuagagaccucauuugugcacaaaaguuuaacggccuuacuguuuugccaccuuugcucacagaugaaaugauugcucaauacacuucugcacuguuagcggguacaaucacuucugguuggaccuuuggugcaggugcugcauuacaaauaccauuugcuaugcaaauggcuuauagguuuaaugguauuggaguuacacagaauguucucuaugagaaccaaaaauugauugccaaccaauuuaauagugcuauuggcaaaauucaagacucacuuucuuccacagcaagugcacuuggaaaacuucaagauguggucaaccaaaaugcacaagcuuuaaacacgcuuguuaaacaacuuagcuccaauuuuggugcaauuucaaguguuuuaaaugauauccuuucacgucuugacaaaguugaggcugaagugcaaauugauagguugaucacaggcagacuucaaaguuugcagacauaugugacucaacaauuaauuagagcugcagaaaucagagcuucugcuaaucuugcugcuacuaaaaugucagaguguguacuuggacaaucaaaaagaguugauuuuuguggaaagggcuaucaucuuauguccuucccucagucagcaccucaugguguagucuucuugcaugugacuuaugucccugcacaagaaaagaacuucacaacugcuccugccauuugucaugauggaaaagcacacuuuccucgugaaggugucuuuguuucaaauggcacacacugguuuguaacacaaaggaauuuuuaugaaccacaaaucauuacuacagacaacacauuugugucugguaacugugauguuguaauaggaauugucaacaacacaguuuaugauccuuugcaaccugaauuagacucauucaaggaggaguuagauaaauauuuuaagaaucauacaucaccagauguugauuuaggugacaucucuggcauuaaugcuucaguuguaaacauucaaaaagaaauugaccgccucaaugagguugccaagaauuuaaaugaaucucucaucgaucuccaagaacuuggaaaguaugagcaguauauaaaauggccaugguacauuuggcuagguuuuauagcuggcuugauugccauaguaauggugacaauuaugcuuugcuguaugaccaguugcuguaguugucucaagggcuguuguucuuguggauccugcuucaaauuugaugaagacgacucugagccagugcucaaaggagucaaauuacauuacacauaa

SEQ ID NO: 11685 - RNA, 3822 nt, Artificial Sequence
  SARS-CoV-2/Switzerland/1000477797/2020__EPI_ISL_413023 spike protein CDS wt (1-1273)
auguuuguuuuucuuguuuuauugccacuagucucuagucaguguguuaaucuuacaaccagaacucaauuacccccugcauacacuaauucuuucacacgugguguuuauuacccugacaaaguuuucagauccucaguuuuacauucaacucaggacuuguucuuaccuuucuuuuccaauguuacuugguuccaugcuauacaugucucugggaccaaugguacuaagagguuugauaacccuguccuaccauuuaaugaugguguuuauuuugcuuccacugagaagucuaacauaauaagaggcuggauuuuugguacuacuuuagauucgaagacccagucccuacuuauuguuaauaacgcuacuaauguuguuauuaaagucugugaauuucaauuuuguaaugauccauuuuuggguguuuauuaccacaaaaacaacaaaaguuggauggaaagugaguucagaguuuauucuagugcgaauaauugcacuuuugaauaugucucucagccuuuucuuauggaccuugaaggaaaacaggguaauuucaaaaaucuuagggaauuuguguuuaagaauauugaugguuauuuuaacauauauucuaagcacacgccuauuaauuuagugcgugaucucccucaggguuuuucggcuuuagaaccauugguagauuugccaauagguauuaacaucacuagguuucaaacuuuacuugcuuuacauagaaguuauuugacuccuggugauucuucuucagguuggacagcuggugcugcagcuuauuauguggguuaucuucaaccuaggacuuuucuauuaaaauauaaugaaaauggaaccauuacagaugcuguagacugugcacuugacccucucucagaaacaaaguguacguugaaauccuucacuguagaaaaaggaaucuaucaaacuucuaacuuuagaguccaaccaacagaaucuauuguuagauuuccuaauauuacaaacuugugcccuuuuggugaaguuuuuaacgccaccagauuugcaucuguuuaugcuuggaacaggaagagaaucagcaacuguguugcugauuauucuguccuauauaauuccgcaucauuuuccacuuuuaaguguuauggagugucuccuacuaaauuaaaugaucucugcuuuacuaaugucuaugcagauucauuuguaauuagaggugaugaagucagacaaaucgcuccagggcaaacuggaaagauugcugauuauaauuauaaauuaccagaugauuuuacaggcugcguuauagcuuggaauucuaacaaucuugauucuaagguuggugguaauuauaauuaccuguauagauuguuuaggaagucuaaucucaaaccuuuugagagagauauuucaacugaaaucuaucaggccgguagcacaccuuguaaugguguugaagguuuuaauuguuacuuuccuuuacaaucauaugguuuccaacccacuaaugguguugguuaccaaccauacagaguaguaguacuuucuuuugaacuucuacaugcaccagcaacuguuuguggaccuaaaaagucuacuaauuugguuaaaaacaaaugugucaauuucaacuucaaugguuuaacaggcacagguguucuuacugagucuaacaaaaaguuucugccuuuccaacaauuuggcagagacauugcugacacuacugaugcuguccgugauccacagacacuugagauucuugacauuacaccauguucuuuugguggugucaguguuauaacaccaggaacaaauacuucuaaccagguugcuguucuuuaucaggguguuaacugcacagaagucccuguugcuauucaugcagaucaacuuacuccuacuuggcguguuuauucuacagguucuaauguuuuucaaacacgugcaggcuguuuaauaggggcugaacaugucaacaacucauaugagugugacauacccauuggugcagguauaugcgcuaguuaucagacucagacuaauucuccucggcgggcacguaguguagcuagucaauccaucauugccuacacuaugucacuuggugcagaaaauucaguugcuuacucuaauaacucuauugccauacccacaaauuuuacuauuaguguuaccacagaaauucuaccagugucuaugaccaagacaucaguagauuguacaauguacauuuguggugauucaacugaaugcagcaaucuuuuguugcaauauggcaguuuuuguacacaauuaaaccgugcuuuaacuggaauagcuguugaacaagacaaaaacacccaagaaguuuuugcacaagucaaacaaauuuacaaaacaccaccaauuaaagauuuuggugguuuuaauuuuucacaaauauuaccagauccaucaaaaccaagcaagaggucauuuauugaagaucuacuuuucaacaaagugacacuugcagaugcuggcuucaucaaacaauauggugauugccuuggugauauugcugcuagagaccucauuugugcacaaaaguuuaacggccuuacuguuuugccaccuuugcucacagaugaaaugauugcucaauacacuucugcacuguuagcggguacaaucacuucugguuggaccuuuggugcaggugcugcauuacaaauaccauuugcuaugcaaauggcuuauagguuuaaugguauuggaguuacacagaauguucucuaugagaaccaaaaauugauugccaaccaauuuaauagugcuauuggcaaaauucaagacucacuuucuuccacagcaagugcacuuggaaaacuucaagauguggucaaccaaaaugcacaagcuuuaaacacgcuuguuaaacaacuuagcuccaauuuuggugcaauuucaaguguuuuaaaugauauccuuucacgucuugacaaaguugaggcugaagugcaaauugauagguugaucacaggcagacuucaaaguuugcagacauaugugacucaacaauuaauuagagcugcagaaaucagagcuucugcuaaucuugcugcuacuaaaaugucagaguguguacuuggacaaucaaaaagaguugauuuuuguggaaagggcuaucaucuuauguccuucccucagucagcaccucaugguguagucuucuugcaugugacuuaugucccugcacaagaaaagaacuucacaacugcuccugccauuugucaugauggaaaagcacacuuuccucgugaaggugucuuuguuucaaauggcacacacugguuuguaacacaaaggaauuuuuaugaaccacaaaucauuacuacagacaacacauuugugucugguaacugugauguuguaauaggaauugucaacaacacaguuuaugauccuuugcaaccugaauuagacucauucaaggaggaguuagauaaauauuuuaagaaucauacaucaccagauguugauuuaggugacaucucuggcauuaaugcuucaguuguaaacauucaaaaagaaauugaccgccucaaugagguugccaagaauuuaaaugaaucucucaucgaucuccaagaacuuggaaaguaugagcaguauauaaaauggccaugguacauuuggcuagguuuuauagcuggcuugauugccauaguaauggugacaauuaugcuuugcuguaugaccaguugcuguaguugucucaagggcuguuguucuuguggauccugcugcaaauuugaugaagacgacucugagccagugcucaaaggagucaaauuacauuacacauaa

SEQ ID NO: 11686 - RNA, 3822 nt, Artificial Sequence
  SARS-CoV-2/Belgium/BA-02291/2020__EPI_ISL_415159 spike protein CDS wt (1-1273)
auguuuguuuuucuuguuuuauugccacuagucucuagucaguguguuaaucuuacaaccagaacucaauuacccccugcauacacuaauucuuucacacgugguguuuauuacccugacaaaguuuucagauccucaguuuuacauucaacucaggacuuguucuuaccuuucuuuuccaauguuacuugguuccaugcuauacaugucucugggaccaaugguacuaagagguuugauaacccuguccuaccauuuaaugaugguguuuauuuugcuuccacugagaagucuaacauaauaagaggcuggauuuuugguacuacuuuagauucgaagacccagucccuacuuauuguuaauaacgcuacuaauguuguuauuaaagucugugaauuucaauuuuguaaugauccauuuuuggguguuuauuaccacaaaaacaacaaaaguuggauggaaagugaguucagaguuuauucuagugcgaauaauugcacuuuugaauaugucucucagccuuuucuuauggaccuugaaggaaaacaggguaauuucaaaaaucuuagggaauuuguguuuaagaauauugaugguuauuuuaaaauauauucuaagcacacgccuauuaauuuagugcgugaucucccucaggguuuuucggcuuuagaaccauugguagauuugccaauagguauuaacaucacuagguuucaaacuuuacuugcuuuacauagaaguuauuugacuccuggugauucuucuucagguuggacagcuggugcugcagcuuauuauguggguuaucuucaaccuaggacuuuucuauuaaaauauaaugaaaauggaaccauuacagaugcuguagacugugcacuugacccucucucagaaacaaaguguacguugaaauccuucacuguagaaaaaggaaucuaucaaacuucuaacuuuagaguccaaccaacagaaucuauuguuagauuuccuaauauuacaaacuugugcccuuuuggugaaguuuuuaacgccaccagauuugcaucuguuuaugcuuggaacaggaagagaaucagcaacuguguugcugauuauucuguccuauauaauuccgcaucauuuuccacuuuuaaguguuauggagugucuccuacuaaauuaaaugaucucugcuuuacuaaugucuaugcagauucauuuguaauuagaggugaugaagucagacaaaucgcuccagggcaaacuggaaagauugcugauuauaauuauaaauuaccagaugauuuuacaggcugcguuauagcuuggaauucuaacaaucuugauucuaagguuggugguaauuauaauuaccuguauagauuguuuaggaggucuaaucucaaaccuuuugagagagauauuucaacugaaaucuaucaggccgguagcacaccuuguaaugguguugaagguuuuaauuguuacuuuccuuuacaaucauaugguuuccaacccacuaaugguguugguuaccaaccauacagaguaguaguacuuucuuuugaacuucuaccugcaccagcaacuguuuguggaccuaaaaagucuacuaauuugguuaaaaacaaaugugucaauuucaacuucaaugguuuaacaggcacagguguucuuacugagucuaacaaaaaguuucugccuuuccaacaauuuggcagagacauugcugacacuacugaugcuguccgugauccacagacacuugagauucuugacauuacaccauguucuuuugguggugucaguguuauaacaccaggaacaaauacuucuaaccagguugcuguucuuuaucaggguguuaacugcacagaagucccuguugcuauucaugcagaucaacuuacuccuacuuggcguguuuauucuacagguucuaauguuuuucaaacacgugcaggcuguuuaauaggggcugaacaugucaacaacucauaugagugugacauacccauuggugcagguauaugcgcuaguuaucagacucagacuaauucuccucggcgggcacguaguguagcuagucaauccaucauugccuacacuaugucacuuggugcagaaaauucaguugcuuacucuaauaacucuauugccauacccacaaauuuuacuauuaguguuaccacagaaauucuaccagugucuaugaccaagacaucaguagauuguacaauguacauuuguggugauucaacugaaugcagcaaucuuuuguugcaauauggcaguuuuuguacacaauuaaaccgugcuuuaacuggaauagcuguugaacaagacaaaaacacccaagaaguuuuugcacaagucaaacaaauuuacaaaacaccaccaauuaaagauuuuggugguuuuaauuuuucacaaauauuaccagauccaucaaaaccaagcaagaggucauuuauugaagaucuacuuuucaacaaagugacacuugcagaugcuggcuucaucaaacaauauggugauugccuuggugauauugcugcuagagaccucauuugugcacaaaaguuuaacggccuuacuguuuugccaccuuugcucacagaugaaaugauugcucaauacacuucugcacuguuagcggguacaaucacuucugguuggaccuuuggugcaggugcugcauuacaaauaccauuugcuaugcaaauggcuuauagguuuaaugguauuggaguuacacagaauguucucuaugagaaccaaaaauugauugccaaccaauuuaauagugcuauuggcaaaauucaagacucacuuucuucugcagcaccugcacuuggaaaacuucaagauguggucaaccaaaaugcacaagcuuuaaacacgcuuguuaaacaacuuagcuccaauuuuggugcaauuucaaguguuuuaaaugauauccuuucacgucuugacaaaguugaggcugaagugcaaauugauagguugaucacaggcagacuucaaaguuugcagacauaugugacucaacaauuaauuagagcugcagaaaucagagcuucugcuaaucuugcugcuacuaaaaugucagaguguguacuuggacaaucaaaaagaguugauuuuuguggaaagggcuaucaucuuauguccuucccucagucagcaccucaugguguagucuucuugcaugugacuuaugucccugcacaagaaaagaacuucacaacugcuccugccauuugucaugauggaaaagcacacuuuccucgugaaggugucuuuguuucaaauggcacacacugguuuguaacacaaaggaauuuuuaugaaccacaaaucauuacuacagacaacacauuugugucugguaacugugauguuguaauaggaauugucaacaacacaguuuaugauccuuugcaaccugaauuagacucauucaaggaggaguuagauaaauauuuuaagaaucauacaucaccagauguugauuuaggugacaucucuggcauuaaugcuucaguuguaaacauucaaaaagaaauugaccgccucaaugagguugccaagaauuuaaaugaaucucucaucgaucuccaagaacuuggaaaguaugagcaguauauaaaauggccaugguacauuuggcuagguuuuauagcuggcuugauugccauaguaauggugacaauuaugcuuugcuguaugaccaguugcuguaguugucucaagggcuguuguucuuguggauccugcugcaaauuugaugaagacgacucugagccagugcucaaaggagucaaauuacauuacacauaa

SEQ ID NO: 11687 - RNA, 3822 nt, Artificial Sequence
  SARS-CoV-2/USA/WA8-UW5/2020__EPI_ISL_413486 spike protein CDS wt (1-1273)
auguuuguuuuucuuguuuuauugccacuagucucuagucaguguguuaaucuuacaaccagaacucaauuacccccugcauacacuaauucuuucacacgugguguuuauuacccugacaaaguuuucagauccucaguuuuacauucaacucaggacuuguucuuaccuuucuuuuccaauguuacuugguuccaugcuauacaugucucugggaccaaugguacuaagagguuugauaacccuguccuaccauuuaaugaugguguuuauuuugcuuccacugagaagucuaacauaauaagaggcuggauuuuugguacuacuuuagauucgaagacccagucccuacuuauuguuaauaacgcuacuaauguuguuauuaaagucugugaauuucaauuuuguaaugauccauuuuuggguguuuauuaccacaaaaacaacaaaaguuggauggaaagugaguucagaguuuauucuagugcgaauaauugcacuuuugaauaugucucucagccuuuucuuauggaccuugaaggaaaacaggguaauuucaaaaaucuuagggaauuuguguuuaagaauauugaugguuauuuuaaaauauauucuaagcacacgccuauuaauuuagugcgugaucucccucaggguuuuucggcuuuagaaccauugguagauuugccaauagguauuaacaucacuagguuucaaacuuuacuugcuuuacauagaaguuauuugacuccuggugauucuucuucagguuggacagcuggugcugcagcuuauuauguggguuaucuucaaccuaggacuuuucuauuaaaauauaaugaaaauggaaccauuacagaugcuguagacugugcacuugacccucucucagaaacaaaguguacguugaaauccuucacuguagaaaaaggaaucuaucaaacuucuaacuuuagaguccaaccaacagaaucuauuguuagauuuccuaauauuacaaacuugugcccuuuuggugaaguuuuuaacgccaccagauuugcaucuguuuaugcuuggaacaggaagagaaucagcaacuguguugcugauuauucuguccuauauaauuccgcaucauuuuccacuuuuaaguguuauggagugucuccuacuaaauuaaaugaucucugcuuuacuaaugucuaugcagauucauuuguaauuagaggugaugaagucagacaaaucgcuccagggcaaacuggaaagauugcugauuauaauuauaaauuaccagaugauuuuacaggcugcguuauagcuuggaauucuaacaaucuugauucuaagguuggugguaauuauaauuaccuguauagauuguuuaggaagucuaaucucaaaccuuuugagagagauauuucaacugaaaucuaucaggccgguagcacaccuuguaaugguguugaagguuuuaauuguuacuuuccuuuacaaucauaugguuuccaacccacuaaugguguugguuaccaaccauacagaguaguaguacuuucuuuugaacuucuacaugcaccagcaacuguuuguggaccuaaaaagucuacuaauuugguuaaaaacaaaugugucaauuucaacuucaaugguuuaacaggcacagguguucuuacugagucuaacaaaaaguuucugccuuuccaacaauuuggcagagacauugcugacacuacugaugcuguccgugauccacagacacuugagauucuugacauuacaccauguucuuuugguggugucaguguuauaacaccaggaacaaauacuucuaaccagguugcuguucuuuaucaggauguuaacugcacagaagucccuguugcuauucaugcagaucaacuuacuccuacuuggcguguuuauucuacagguucuaauguuuuucaaacacgugcaggcuguuuaauaggggcugaauaugucaacaacucauaugagugugacauacccauuggugcagguauaugcgcuaguuaucagacucagacuaauucuccucggcgggcacguaguguagcuagucaauccaucauugccuacacuaugucacuuggugcagaaaauucaguugcuuacucuaauaacucuauugccauacccacaaauuuuacuauuaguguuaccacagaaauucuaccagugucuaugaccaagacaucaguagauuguacaauguacauuuguggugauucaacugaaugcagcaaucuuuuguugcaauauggcaguuuuuguacacaauuaaaccgugcuuuaacuggaauagcuguugaacaagacaaaaacacccaagaaguuuuugcacaagucaaacaaauuuacaaaacaccaccaauuaaagauuuuggugguuuuaauuuuucacaaauauuaccagauccaucaaaaccaagcaagaggucauuuauugaagaucuacuuuucaacaaagugacacuugcagaugcuggcuucaucaaacaauauggugauugccuuggugauauugcugcuagagaccucauuugugcacaaaaguuuaacggccuuacuguuuugccaccuuugcucacagaugaaaugauugcucaauacacuucugcacuguuagcggguacaaucacuucugguuggaccuuuggugcaggugcugcauuacaaauaccauuugcuaugcaaauggcuuauagguuuaaugguauuggaguuacacagaauguucucuaugagaaccaaaaauugauugccaaccaauuuaauagugcuauuggcaaaauucaagacucacuuucuuccacagcaagugcacuuggaaaacuucaagauguggucaaccaaaaugcacaagcuuuaaacacgcuuguuaaacaacuuagcuccaauuuuggugcaauuucaaguguuuuaaaugauauccuuucacgucuugacaaaguugaggcugaagugcaaauugauagguugaucacaggcagacuucaaaguuugcagacauaugugacucaacaauuaauuagagcugcagaaaucagagcuucugcuaaucuugcugcuacuaaaaugucagaguguguacuuggacaaucaaaaagaguugauuuuuguggaaagggcuaucaucuuauguccuucccucagucagcaccucaugguguagucuucuugcaugugacuuaugucccugcacaagaaaagaacuucacaacugcuccugccauuugucaugauggaaaagcacacuuuccucgugaaggugucuuuguuucaaauggcacacacugguuuguaacacaaaggaauuuuuaugaaccacaaaucauuacuacagacaacacauuugugucugguaacugugauguuguaauaggaauugucaacaacacaguuuaugauccuuugcaaccugaauuagacucauucaaggaggaguuagauaaauauuuuaagaaucauacaucaccagauguugauuuaggugacaucucuggcauuaaugcuucaguuguaaacauucaaaaagaaauugaccgccucaaugagguugccaagaauuuaaaugaaucucucaucgaucuccaagaacuuggaaaguaugagcaguauauaaaauggccaugguacauuuggcuagguuuuauagcuggcuugauugccauaguaauggugacaauuaugcuuugcuguaugaccaguugcuguaguugucucaagggcuguuguucuuguggauccugcugcaaauuugaugaagacgacucugagccagugcucaaaggagucaaauuacauuacacauaa

SEQ ID NO: 11688 - RNA, 3822 nt, Artificial Sequence
  SARS-CoV-2/England/20102000506/2020__EPI_ISL_415147 spike protein CDS wt (1-1273)
auguuuguuuuucuuguuuuauugccacuagucucuagucaguguguuaaucuuacaaccagaacucaauuacccccugcauacacuaauucuuucacacgugguguuuauuacccugacaaaguuuucagauccucaguuuuacauucaacucaggacuuguucuuaccuuucuuuuccaauguuacuugguuccaugcuauacaugucucugggaccaaugguacuaagagguuugauaacccuguccuaccauuuaaugaugguguuuauuuugcuuccacugagaagucuaacauaauaagaggcuggauuuuugguacuacuuuagauucgaagacccagucccuacuuauuguuaauaacgcuacuaauguuguuauuaaagucugugaauuucaauuuuguaaugauccauuuuuggguguuuauuaccacaaaaacaacaaaaguuggauggaaagugaguucagaguuuauucuagugcgaauaauugcacuuuugaauaugucucucagccuuuucuuauggaccuugaaggaaaacaggguaauuucaaaaaucuuagggaauuuguguuuaagaauauugaugguuauuuuaaaauauauucuaagcacacgccuauuaauuuagugcgugaucucccucaggguuuuucggcuuuagaaccauugguagauuugccaauagguauuaacaucacuagguuucaaacuuuacuugcuuuacauagaaguuauuugacuccuggugauucuucuucagguuggacagcuggugcugcagcuuauuauguggguuaucuucaaccuaggacuuuucuauuaaaauauaaugaaaauggaaccauuacagaugcuguagacugugcacuugacccucucucagaaacaaaguguacguugaaauccuucacuguagaaaaaggaaucuaucaaacuucuaacuuuagaguccaaccaacagaaucuauuguuagauuuccuaauauuacaaacuugugcccuuuuggugaaguuuuuaacgccaccagauuugcaucuguuuaugcuuggaacaggaagagaaucagcaacuguguugcugauuauucuguccuauauaauuccgcaucauuuuccacuuuuaaguguuauggagugucuccuacuaaauuaaaugaucucugcuuuacuaaugucuaugcagauucauuuguaauuagaggugaugaagucagacaaaucgcuccagggcaaacuggaaagauugcugauuauaauuauaaauuaccagaugauuuuacaggcugcguuauagcuuggaauucuaacaaucuugauucuaagguuggugguaauuauaauuaccuguauagauuguuuaggaagucuaaucucaaaccuuuugagagagauauuucaacugaaaucuaucaggccgguagcacaccuuguaaugguguugaagguuuuaauuguuacuuuccuuuacaaucauaugguuuccaacccacuaaugguguugguuaccaaccauacagaguaguaguacuuucuuuugaacuucuacaugcaccagcaacuguuuguggaccuaaaaagucuacuaauuugguuaaaaacaaaugugucaauuucaacuucaaugguuuaacaggcacagguguucuuacugagucuaacaaaaaguuucugccuuuccaacaauuuggcagagacauugcugacacuacugaugcuguccgugauccacagacacuugagauucuugacauuacaccauguucuuuugguggugucaguguuauaacaccaggaacaaauacuucuaaccagguugcuguucuuuaucaggguguuaacugcacagaagucccuguugcuauucaugcagaucaacuuacuccuacuuggcguguuuauucuacagguucuaauguuuuucaaacacgugcaggcuguuuaauaggggcugaacaugucaacaacucauaugagugugacauacccauuggugcagguauaugcgcuaguuaucagacucagacuaauucuccucggcgggcacguaguguagcuagucaauccaucauugccuacacuaugucacuuggugcagaaaauucaguugcuuacucuaauaacucuauugccauacccacaaauuuuacuauuaguguuaccacagaaauucuaccagugucuaugaccaagacaucaguagauuguacaauguacauuuguggugauucaacugaaugcagcaaucuuuuguugcaauauggcaguuuuuguacacaauuaaaccgugcuuuaacuggaauagcuguugaacaagacaaaaacacccaagaaguuuuugcacaagucaaacaaauuuacaaaacaccaccaauuaaagauuuuggugguuuuaauuuuucacaaauauuaccagauccaucaaaaccaagcaagaggucauuuauugaagaucuacuuuucaacaaagugacacuugcagaugcuggcuucaucaaacaauaugguuauugccuuggugauauugcugcuagagaccucauuugugcacaaaaguuuaacggccuuacuguuuugccaccuuugcucacagaugaaaugauugcucaauacacuucugcacuguuagcggguacaaucacuucugguuggaccuuuggugcaggugcugcauuacaaauaccauuugcuaugcaaauggcuuauagguuuaaugguauuggaguuacacagaauguucucuaugagaaccaaaaauugauugccaaccaauuuaauagugcuauuggcaaaauucaagacucacuuucuuccacagcaagugcacuuggaaaacuucaagauguggucaaccaaaaugcacaagcuuuaaacacgcuuguuaaacaacuuagcuccaauuuuggugcaauuucaaguguuuuaaaugauauccuuucacgucuugacaaaguugaggcugaagugcaaauugauagguugaucacaggcagacuucaaaguuugcagacauaugugacucaacaauuaauuagagcugcagaaaucagagcuucugcuaaucuugcugcuacuaaaaugucagaguguguacuuggacaaucaaaaagaguugauuuuuguggaaagggcuaucaucuuauguccuucccucagucagcaccucaugguguagucuucuugcaugugacuuaugucccugcacaagaaaagaacuucacaacugcuccugccauuugucaugauggaaaagcacacuuuccucgugaaggugucuuuguuucaaauggcacacacugguuuguaacacaaaggaauuuuuaugaaccacaaaucauuacuacagacaacacauuugugucugguaacugugauguuguaauaggaauugucaacaacacaguuuaugauccuuugcaaccugaauuagacucauucaaggaggaguuagauaaauauuuuaagaaucauacaucaccagauguugauuuaggugacaucucuggcauuaaugcuucaguuguaaacauucaaaaagaaauugaccgccucaaugagguugccaagaauuuaaaugaaucucucaucgaucuccaagaacuuggaaaguaugagcaguauauaaaauggccaugguacauuuggcuagguuuuauagcuggcuugauugccauaguaauggugacaauuaugcuuugcuguaugaccaguugcuguaguugucucaagggcuguuguucuuguggauccugcugcaaauuugaugaagacgacucugagccagugcucaaaggagucaaauuacauuacacauaa

SEQ ID NO: 11689 - RNA, 3822 nt, Artificial Sequence
  SARS-CoV-2/Belgium/VAG-03013/2020__EPI_ISL_415155 spike protein CDS wt (1-1273)
auguuuguuuuucuuguuuuauugccacuagucucuagucaguguguuaaucuuacaaccagaacucaauuacccccugcauacacuaauucuuucacacgugguguuuauuacccugacaaaguuuucagauccucaguuuuacauucaacucaggacuuguucuuaccuuucuuuuccaauguuacuugguuccaugcuauacaugucucugggaccaaugguacuaagagguuugauaacccuguccuaccauuuaaugaugguguuuauuuugcuuccacugagaagucuaacauaauaagaggcuggauuuuugguacuacuuuagauucgaagacccagucccuacuuauuguuaauaacgcuacuaauguuguuauuaaagucugugaauuucaauuuuguaaugauccauuuuuggguguuuauuaccacaaaaacaacaaaaguuggauggaaagugaguucagaguuuauucuagugcgaauaauugcacuuuugaauaugucucucagccuuuucuuauggaccuugaaggaaaacaggguaauuucaaaaaucuuagggaauuuguguuuaagaauauugaugguuauuuuaaaauauauucuaagcacacgccuauuaauuuagugcgugaucucccucaggguuuuucggcuuuagaaccauugguagauuugccaauagguauuaacaucacuagguuucaaacuuuacuugcuuuacauagaaguuauuugacuccuggugauucuucuucagguuggacagcuggugcugcagcuuauuauguggguuaucuucaaccuaggacuuuucuauuaaaauauaaugaaaauggaaccauuacagaugcuguagacugugcacuugacccucucucagaaacaaaguguacguugaaauccuucacuguagaaaaaggaaucuaucaaacuucuaacuuuagaguccaaccaacagaaucuauuguuagauuuccuaauauuacaaacuugugcccuuuuggugaaguuuuuaacgccaccagauuugcaucuguuuaugcuuggaacaggaagagaaucagcaacuguguugcugauuauucuguccuauauaauuccgcaucauuuuccacuuuuaaguguuauggagugucuccuacuaaauuaaaugaucucugcuuuacuaaugucuaugcagauucauuuguaauuagaggugaugaagucagacaaaucgcuccagggcaaacuggaaagauugcugauuauaauuauaaauuaccagaugauuuuacaggcugcguuauagcuuggaauucuaacaaucuugauucuaagguuggugguaauuauaauuaccuguauagauuguuuaggaagucuaaucucaaaccuuuugagagagauauuucaacugaaaucuaucaggccgguagcacaccuuguaaugguguugaagguuuuaauuguuacuuuccuuuacaaucauaugguuuccaacccacuaaugguguugguuaccaaccauacagaguaguaguacuuucuuuugaacuucuacaugcaccagcaacuguuuguggaccuaaaaagucuacuaauuugguuaaaaacaaaugugucaauuucaacuucaaugguuuaacaggcacagguguucuuacugagucuaacaaaaaguuucugccuuuccaacaauuuggcagagacauugcugacacuacugaugcuguccgugauccacagacacuugagauucuugacauuacaccauguucuuuugguggugucaguguuauaacaccaggaacaaauacuucuaaccagguugcuguucuuuaucaggguguuaacugcacagaagucccuguugcuauucaugcagaucaacuuacuccuacuuggcguguuuauucuacagguucuaauguuuuucaaacacgugcaggcuguuuaauaggggcugaacaugucaacaacucauaugagugugacauacccauuggugcagguauaugcgcuaguuaucagacucagacuaauucuccucggcgggcacguaguguagcuagucaauccaucauugccuacacuaugucacuuggugcagaaaauucaguugcuuacucuaauaacucuauugccauacccacaaauuuuacuauuaguguuaccacagaaauucuaccagugucuaugaccaagacaucaguagauuguacaauguacauuuguggugauucaacugaaugcagcaaucuuuuguugcaauauggcaguuuuuguacacaauuaaaccgugcuuuaacuggaauagcuguugaacaagacaaaaacacccaagaaguuuuugcacaagucaaacaaauuuacaaaacaccaccaauuaaagauuuuggugguuuuaauuuuucacaaauauuaccagauccaucaaaaccaagcaagaggucauuuauugaagaucuacuuuucaacaaagugacacuugcagaugcuggcuucaucaaacaauauggugauugccuuggugauauugcugcuagagaccucauuugugcacaaaaguuuaacggccuuacuguuuugccaccuuugcucacagaugaaaugauugcucaauacacuucugcacuguuagcggguacaaucacuucugguuggaccuuuggugcaggugcugcauuacaaauaccauuugcuaugcaaauggcuuauagguuuaaugguauuggaguuacacagaauguucucuaugagaaccaaaaauugauugccaaccaauuuaauagugcuauuggcaaaauucaagacucacuuucuuccacagcaacugcacuuggaaaacuucaagauguggucaaccaaaaugcacaagcuuuaaacacgcuuguuaaacaacuuagcuccaauuuuggugcaauuucaaguguuuuaaaugauauccuuucacgucuugacaaaguugaggcugaagugcaaauugauagguugaucacaggcagacuucaaaguuugcagacauaugugacucaacaauuaauuagagcugcagaaaucagagcuucugcuaaucuugcugcuacuaaaaugucagaguguguacuuggacaaucaaaaagaguugauuuuuguggaaagggcuaucaucuuauguccuucccucagucagcaccucaugguguagucuucuugcaugugacuuaugucccugcacaagaaaagaacuucacaacugcuccugccauuugucaugauggaaaagcacacuuuccucgugaaggugucuuuguuucaaauggcacacacugguuuguaacacaaaggaauuuuuaugaaccacaaaucauuacuacagacaacacauuugugucugguaacugugauguuguaauaggaauugucaacaacacaguuuaugauccuuugcaaccugaauuagacucauucaaggaggaguuagauaaauauuuuaagaaucauacaucaccagauguugauuuaggugacaucucuggcauuaaugcuucaguuguaaacauucaaaaagaaauugaccgccucaaugagguugccaagaauuuaaaugaaucucucaucgaucuccaagaacuuggaaaguaugagcaguauauaaaauggccaugguacauuuggcuagguuuuauagcuggcuugauugccauaguaauggugacaauuaugcuuugcuguaugaccaguugcuguaguugucucaagggcuguuguucuuguggauccugcugcaaauuugaugaagacgacucugagccagugcucaaaggagucaaauuacauuacacauaa

SEQ ID NO: 11690 - RNA, 3822 nt, Artificial Sequence
  SARS-CoV-2/Belgium/BC-03016/2020__EPI_ISL_415157 spike protein CDS wt (1-1273)
auguuuguuuuucuuguuuuauugccacuagucucuagucaguguguuaaucuuacaaccagaacucaauuacccccugcauacacuaauucuuucacacgugguguuuauuacccugacaaaguuuucagauccucaguuuuacauucaacucaggacuuguucuuaccuuucuuuuccaauguuacuugguuccaugcuauacaugucucugggaccaaugguacuaagagguuugauaacccuguccuaccauuuaaugaugguguuuauuuugcuuccacugagaagucuaacauaauaagaggcuggauuuuugguacuacuuuagauucgaagacccagucccuacuuauuguuaauaacgcuacuaauguuguuauuaaagucugugaauuucaauuuuguaaugauccauuuuuggguguuuauuaccacaaaaacaacaaaaguuggauggaaagugaguucagaguuuauucuagugcgaauaauugcacuuuugaauaugucucucagccuuuucuuauggaccuugaaggaaaacaggguaauuucaaaaaucuuagggaauuuguguuuaagaauauugaugguuauuuuaaaauauauucuaagcacacgccuauuaauuuagugcgugaucucccucaggguuuuucggcuuuagaaccauugguagauuugccaauagguauuaacaucacuagguuucaaacuuuacuugcuuuacauagaaguuauuugacuccuggugauucuucuucagguuggacagcuggugcugcagcuuauuauguggguuaucuucaaccuaggacuuuucuauuaaaauauaaugaaaauggaaccauuacagaugcuguagacugugcacuugacccucucucagaaacaaaguguacguugaaauccuucacuguagaaaaaggaaucuaucaaacuucuaacuuuagaguccaaccaacagaaucuauuguuagauuuccuaauauuacaaacuugugcccuuuuggugaaguuuuuaacgccaccagauuugcaucuguuuaugcuuggaacaggaagagaaucagcaacuguguugcugauuauucuguccuauauaauuccgcaucauuuuccacuuuuaaguguuauggagugucuccuacuaaauuaaaugaucucugcuuuacuaaugucuaugcagauucauuuguaauuagaggugaugaagucagacaaaucgcuccagggcaaacuggaaagauugcugauuauaauuauaaauuaccagaugauuuuacaggcugcguuauagcuuggaauucuaacaaucuugauucuaagguuggugguaauuauaauuaccuguauagauuguuuaggaagucuaaucucaaaccuuuugagagagauauuucaacugaaaucuaucaggccgguagcacaccuuguaaugguguugaagguuuuaauuguuacuuuccuuuacaaucauaugguuuccaacccacuaaugguguugguuaccaaccauacagaguaguaguacuuucuuuugaacuucuacaugcaccagcaacuguuuguggaccuaaaaagucuacuaauuugguuaaaaacaaaugugucaauuucaacuucaaugguuuaacaggcacagguguucuuacugagucuaacaaaaaguuucugccuuuccaacaauuuggcagagacauugcugacacuacugaugcuguccgugauccacagacacuugagauucuugacauuacaccauguucuuuugguggugucaguguuauaacaccaggaacaaauacuucuaaccagguugcuguucuuuaucaggguguuaacugcacagaagucccuguugcuauucaugcagaucaacuuacuccuacuuggcguguuuauucuacagguucuaauguuuuucaaacacgugcaggcuguuuaauaggggcugaacaugucaacaacucauaugagugugacauacccauuggugcagguauaugcgcuaguuaucagacucagacuaauucuccucggcgggcacguaguguagcuagucaauccaucauugccuacacuaugucacuuggugcagaaaauucaguugcuuacucuaauaacucuauugccauacccacaaauuuuacuauuaguguuaccacagaaauucuaccagugucuaugaccaagacaucaguagauuguacaauguacauuuguggugauucaacugaaugcagcaaucuuuuguugcaauauggcaguuuuuguacacaauuaaaccgugcuuuaacuggaauagcuguugaacaagacaaaaacacccaagaaguuuuugcacaagucaaacaaauuuacaaaacaccaccaauuaaagauuuuggugguuuuaauuuuucacaaauauuaccagauccaucaaaaccaagcaagaggucauuuauugaagaucuacuuuucaacaaagugacacuugcagaugcuggcuucaucaaacaauauggugauugccuuggugauauugcugcuagagaccucauuugugcacaaaaguuuaacggccuuacuguuuugccaccuuugcucacagaugaaaugauugcucaauacacuucugcacuguuagcggguacaaucacuucugguuggaccuuuggugcaggugcugcauuacaaauaccauuugcuaugcaaauggcuuauagguuuaaugguauuggaguuacacagaauguucucuaugagaaccaaaaauugauugccaaccaauuuaauagugcuauuggcaaaauucaagacucacuuucuuccacagcaccugcacuuggaaaacuucaagauguggucaaccaaaaugcacaagcuuuaaacacgcuuguuaaacaacuuagcuccaauuuuggugcaauuucaaguguuuuaaaugauauccuuucacgucuugacaaaguugaggcugaagugcaaauugauagguugaucacaggcagacuucaaaguuugcagacauaugugacucaacaauuaauuagagcugcagaaaucagagcuucugcuaaucuugcugcuacuaaaaugucagaguguguacuuggacaaucaaaaagaguugauuuuuguggaaagggcuaucaucuuauguccuucccucagucagcaccucaugguguagucuucuugcaugugacuuaugucccugcacaagaaaagaacuucacaacugcuccugccauuugucaugauggaaaagcacacuuuccucgugaaggugucuuuguuucaaauggcacacacugguuuguaacacaaaggaauuuuuaugaaccacaaaucauuacuacagacaacacauuugugucugguaacugugauguuguaauaggaauugucaacaacacaguuuaugauccuuugcaaccugaauuagacucauucaaggaggaguuagauaaauauuuuaagaaucauacaucaccagauguugauuuaggugacaucucuggcauuaaugcuucaguuguaaacauucaaaaagaaauugaccgccucaaugagguugccaagaauuuaaaugaaucucucaucgaucuccaagaacuuggaaaguaugagcaguauauaaaauggccaugguacauuuggcuagguuuuauagcuggcuugauugccauaguaauggugacaauuaugcuuugcuguaugaccaguugcuguaguugucucaagggcuguuguucuuguggauccugcugcaaauuugaugaagacgacucugagccagugcucaaaggagucaaauuacauuacacauaa

SEQ ID NO: 11691 - RNA, 3822 nt, Artificial Sequence
  SARS-CoV-2/Germany/BavPat3/2020__EPI_ISL_414521 spike protein CDS wt (1-1273)
auguuuguuuuucuuguuuuauugccacuagucucuagucaguguguuaaucuuacaaccagaacucaauuacccccugcauacacuaauucuuucacacgugguguuuauuacccugacaaaguuuucagauccucaguuuuacauucaacucaggacuuguucuuaccuuucuuuuccaauguuacuugguuccaugcuauacaugucucugggaccaaugguacuaagagguuugauaacccuguccuaccauuuaaugaugguguuuauuuugcuuccacugagaagucuaacauaauaagaggcuggauuuuugguacuacuuuagauucgaagacccagucccuacuuauuguuaauaacgcuacuaauguuguuauuaaagucugugaauuucaauuuuguaaugauccauuuuuggguguuuauuaccacaaaaacaacaaaaguuggauggaaagugaguucagaguuuauucuagugcgaauaauugcacuuuugaauaugucucucagccuuuucuuauggaccuugaaggaaaacaggguaauuucaaaaaucuuagggaauuuguguuuaagaauauugaugguuauuuuaaaauauauucuaagcacacgccuauuaauuuagugcgugaucucccucaggguuuuucggcuuuagaaccauugguagauuugccaauagguauuaacaucacuagguuucaaacuuuacuugcuuuacauagaaguuauuugacuccuggugauucuucuucagguuggacagcuggugcugcagcuuauuauguggguuaucuucaaccuaggacuuuucuauuaaaauauaaugaaaauggaaccauuacagaugcuguagacugugcacuugacccucucucagaaacaaaguguacguugaaauccuucacuguagaaaaaggaaucuaucaaacuucuaacuuuagaguccaaccaacagaaucuauuguuagauuuccuaauauuacaaacuugugcccuuuuggugaaguuuuuaacgccaccagauuugcaucuguuuaugcuuggaacaggaagagaaucagcaacuguguugcugauuauucuguccuauauaauuccgcaucauuuuccacuuuuaaguguuauggagugucuccuacuaaauuaaaugaucucugcuuuacuaaugucuaugcagauucauuuguaauuagaggugaugaagucagacaaaucgcuccagggcaaacuggaaagauugcugauuauaauuauaaauuaccagaugauuuuacaggcugcguuauagcuuggaauucuaacaaucuugauucuaagguuggugguaauuauaauuaccuguauagauuguuuaggaagucuaaucucaaaccuuuugagagagauauuucaacugaaaucuaucaggccgguagcacaccuuguaaugguguugaagguuuuaauuguuacuuuccuuuacaaucauaugguuuccaacccacuaaugguguugguuaccaaccauacagaguaguaguacuuucuuuugaacuucuacaugcaccagcaacuguuuguggaccuaaaaagucuacuaauuugguuaaaaacaaaugugucaauuucaacuucaaugguuuaacaggcacagguguucuuacugagucuaacaaaaaguuucugccuuuccaacaauuuggcagagacauugcugacacuacugaugcuguccgugauccacagacacuugagauucuugacauuacaccauguucuuuugguggugucaguguuauaacaccaggaacaaauacuucuaaccagguugcuguucuuuaucaggauguuaacugcacagaagucccuguugcuauucaugcagaucaacuuacuccuacuuggcguguuuauucuacagguucuaauguuuuucaaacacgugcaggcuguuuaauaggggcugaacaugucaacaacucauaugagugugacauacccauuggugcagguauaugcgcuaguuaucagacucagacuaauucuccucggcgggcacguaguguagcuagucaauccaucauugccuacacuaugucacuuggugcagaaaauucaguugcuuacucuaauaacucuauugccauacccacaaauuuuacuauuaguguuaccacagaaauucuaccagugucuaugaccaagacaucaguagauuguacaauguacauuuguggugauucaacugaaugcagcaaucuuuuguugcaauauggcaguuuuuguacacaauuaaaccgugcuuuaacuggaauagcuguugaacaagacaaaaacacccaacaaguuuuugcacaagucaaacaaauuuacaaaacaccaccaauuaaagauuuuggugguuuuaauuuuucacaaauauuaccagauccaucaaaaccaagcaagaggucauuuauugaagaucuacuuuucaacaaagugacacuugcagaugcuggcuucaucaaacaauauggugauugccuuggugauauugcugcuagagaccucauuugugcacaaaaguuuaacggccuuacuguuuugccaccuuugcucacagaugaaaugauugcucaauacacuucugcacuguuagcggguacaaucacuucugguuggaccuuuggugcaggugcugcauuacaaauaccauuugcuaugcaaauggcuuauagguuuaaugguauuggaguuacacagaauguucucuaugagaaccaaaaauugauugccaaccaauuuaauagugcuauuggcaaaauucaagacucacuuucuuccacagcaagugcacuuggaaaacuucaagauguggucaaccaaaaugcacaagcuuuaaacacgcuuguuaaacaacuuagcuccaauuuuggugcaauuucaaguguuuuaaaugauauccuuucacgucuugacaaaguugaggcugaagugcaaauugauagguugaucacaggcagacuucaaaguuugcagacauaugugacucaacaauuaauuagagcugcagaaaucagagcuucugcuaaucuugcugcuacuaaaaugucagaguguguacuuggacaaucaaaaagaguugauuuuuguggaaagggcuaucaucuuauguccuucccucagucagcaccucaugguguagucuucuugcaugugacuuaugucccugcacaagaaaagaacuucacaacugcuccugccauuugucaugauggaaaagcacacuuuccucgugaaggugucuuuguuucaaauggcacacacugguuuguaacacaaaggaauuuuuaugaaccacaaaucauuacuacagacaacacauuugugucugguaacugugauguuguaauaggaauugucaacaacacaguuuaugauccuuugcaaccugaauuagacucauucaaggaggaguuagauaaauauuuuaagaaucauacaucaccagauguugauuuaggugacaucucuggcauuaaugcuucaguuguaaacauucaaaaagaaauugaccgccucaaugagguugccaagaauuuaaaugaaucucucaucgaucuccaagaacuuggaaaguaugagcaguauauaaaauggccaugguacauuuggcuagguuuuauagcuggcuugauugccauaguaauggugacaauuaugcuuugcuguaugaccaguugcuguaguugucucaagggcuguuguucuuguggauccugcugcaaauuugaugaagacgacucugagccagugcucaaaggagucaaauuacauuacacauaa

SEQ ID NO: 11692 - RNA, 3822 nt, Artificial Sequence
  SARS-CoV-2/France/HF1805/2020__EPI_ISL_414628 spike protein CDS wt (1-1273)
auguuuguuuuucuuguuuuauugccacuagucucuagucaguguguuaaucuuacaaccagaacucaauuacccccugcauacacuaauucuuucacacgugguguuuauuacccugacaaaguuuucagauccucaguuuuacauucaacucaggacuuguucuuaccuuucuuuuccaauguuacuugguuccaugcuauacaugucucugggaccaaugguacuaagagguuugauaacccuguccuaccauuuaaugaugguguuuauuuugcuuccacugagaagucuaacauaauaagaggcuggauuuuugguacuacuuuagauucgaagacccagucccuacuuauuguuaauaacgcuacuaauguuguuauuaaagucugugaauuucaauuuuguaaugauccauuuuuggguguuuauuaccacaaaaacaacaaaaguuggauggaaagugaguucagaguuuauucuagugcgaauaauugcacuuuugaauaugucucucagccuuuucuuauggaccuugaaggaaaacaggguaauuucaaaaaucuuagggaauuuguguuuaagaauauugaugguuauuuuaaaauauauucuaagcacacgccuauuaauuuagugcgugaucucccucaggguuuuucggcuuuagaaccauugguagauuugccaauagguauuaacaucacuagguuucaaacuuuacuugcuuuacauagaaguuauuugacuccuggugauucuucuucagguuggacagcuggugcugcagcuuauuauguggguuaucuucaaccuaggacuuuucuauuaaaauauaaugaaaauggaaccauuacagaugcuguagacugugcacuugacccucucucagaaacaaaguguacguugaaauccuucacuguagaaaaaggaaucuaucaaacuucuaacuuuagaguccaaccaacagaaucuauuguuagauuuccuaauauuacaaacuugugcccuuuuggugaaguuuuuaacgccaccagauuugcaucuguuuaugcuuggaacaggaagagaaucagcaacuguguugcugauuauucuguccuauauaauuccgcaucauuuuccacuuuuaaguguuauggagugucuccuacuaaauuaaaugaucucugcuuuacuaaugucuaugcagauucauuuguaauuagaggugaugaagucagacaaaucgcuccagggcaaacuggaaagauugcugauuauaauuauaaauuaccagaugauuuuacaggcugcguuauagcuuggaauucuaacaaucuugauucuaagguuggugguaauuauaauuaccuguauagauuguuuaggaagucuaaucucaaaccuuuugagagagauauuucaacugaaaucuaucaggccgguagcacaccuuguaaugguguugaagguuuuaauuguuacuuuccuuuacaaucauaugguuuccaacccacuaaugguguugguuaccaaccauacagaguaguaguacuuucuuuugaacuucuacaugcaccagcaacuguuuguggaccuaaaaagucuacuaauuugguuaaaaacaaaugugucaauuucaacuucaaugguuuaacaggcacagguguucuuacugagucuaacaaaaaguuucugccuuuccaacaauuuggcagagacauugcugacacuacugaugcuguccgugauccacagacacuugagauucuugacauuacaccauguucuuuugguggugucaguguuauaacaccaggaacaaauacuucuaaccagguugcuguucuuuaucaggguguuaacugcacagaagucccuguugcuauucaugcagaucaacuuacuccuacuuggcguguuuauucuacagguucuaauguuuuucaaacacgugcaggcuguuuaauaggggcugaacaugucaacaacucauaugagugugacauacccauuggugcagguauaugcgcuaguuaucagacucagacuaauucuccucggcgggcacguaguguagcuagucaauccaucauugccuacacuaugucacuuggugcagaaaauucaguugcuuacucuaauaacucuauugccauacccacaaauuuuacuauuaguguuaccacagaaauucuaccagugucuaugaccaagacaucaguagauuguacaauguacauuuguggugauucaacugaaugcagcaaucuuuuguugcaauauggcaguuuuuguacacaauuaaaccgugcuuuaacuggaauagcuguugaacaagacaaaaacacccaagaaguuuuugcacaagucaaacaaauuuacaaaacaccaccaauuaaagauuuuggugguuuuaauuuuucacaaauauuaccagauccaucaaaaccaagcaagaggucauuuauugaagaucuacuuuucaacaaagugacacuugcagaugcuggcuucaucaaacaauauggugauugccuuggugauauugcugcuagagaccucauuugugcacaaaaguuuaacggccuuacuguuuugccaccuuugcucacagaugaaaugauugcucaauacacuucugcacuguuagcggguacaaucacuucugguuggaccuuuggugcaggugcugcauuacaaauaccauuugcuaugcaaauggcuuauagguuuaaugguauuggaguuacacagaauguucucuaugagaaccaaaaauugauugccaaccaauuuaauagugcuauuggcaaaauucaagacucacuuucuuccacagcaagugcacuuggaaaacuucaagauguggucaaccaaaaugcacaagcuuuaaacacgcuuguuaaacaacuuagcuccaauuuuggugcaauuucaaguguuuuaaaugauauccuuucacgucuugacaaaguugaggcugaagugcaaauugauagguugaucacaggcagacuucaaaguuugcagacauaugugacucaacaauuaauuagagcugcagaaaucagagcuucugcuaaucuugcugcuacuaaaaugucagaguguguacuuggacaaucaaaaagaguugauuuuuguggaaagggcuaucaucuuauguccuucccucagucagcaccucaugguguagucuucuugcaugugacuuaugucccugcacaagaaaagaacuucacaacugcuccugccauuugucaugauggaaaagcacacuuuccucgugaaggugucuuuguuucaaauggcacacacugguuuguaacacaaaggaauuuuuaugaaccacaaaucauuacuacagacaacacauuugugucugguaacugugauguuguaauaggaguugucaacaacacaguuuaugauccuuugcaaccugaauuagacucauucaaggaggaguuagauaaauauuuuaagaaucauacaucaccagauguugauuuaggugacaucucuggcauuaaugcuucaguuguaaacauucaaaaagaaauugaccgccucaaugagguugccaagaauuuaaaugaaucucucaucgaucuccaagaacuuggaaaguaugagcaguauauaaaauggccaugguacauuuggcuagguuuuauagcuggcuugauugccauaguaauggugacaauuaugcuuugcuguaugaccaguugcuguaguugucucaagggcuguuguucuuguggauccugcugcaaauuugaugaagacgacucugagccagugcucaaaggagucaaauuacauuacacauaa

SEQ ID NO: 11693 - RNA, 3822 nt, Artificial Sequence
  SARS-CoV-2/Netherlands/ZuidHolland_9/2020__EPI_ISL_414445 spike protein CDS wt (1-1273)
auguuuguuuuucuuguuuuauugccacuagucucuagucaguguguuaaucuuacaaccagaacucaauuacccccugcauacacuaauucuuucacacgugguguuuauuacccugacaaaguuuucagauccucaguuuuacauucaacucaggacuuguucuuaccuuucuuuuccaauguuacuugguuccaugcuauacaugucucugggaccaaugguacuaagagguuugauaacccuguccuaccauuuaaugaugguguuuauuuugcuuccacugagaagucuaacauaauaagaggcuggauuuuugguacuacuuuagauucgaagacccagucccuacuuauuguuaauaacgcuacuaauguuguuauuaaagucugugaauuucaauuuuguaaugauccauuuuuggguguuuauuaccacaaaaacaacaaaaguuggauggaaagugaguucagaguuuauucuagugcgaauaauugcacuuuugaauaugucucucagccuuuucuuauggaccuugaaggaaaacaggguaauuucaaaaaucuuagggaauuuguguuuaagaauauugaugguuauuuuaaaauauauucuaagcacacgccuauuaauuuagugcgugaucucccucaggguuuuucggcuuuagaaccauugguagauuugccaauagguauuaacaucacuagguuucaaacuuuacuugcuuuacauagaaguuauuugacuccuggugauucuucuucagguuggacagcuggugcugcagcuuauuauguggguuaucuucaaccuaggacuuuucuauuaaaauauaaugaaaauggaaccauuacagaugcuguagacugugcacuugacccucucucagaaacaaaguguacguugaaauccuucacuguagaaaaaggaaucuaucaaacuucuaacuuuagaguccaaccaacagaaucuauuguuagauuuccuaauauuacaaacuugugcccuuuuggugaaguuuuuaacgccaccagauuugcaucuguuuaugcuuggaacaggaagagaaucagcaacuguguugcugauuauucuguccuauauaauuccgcaucauuuuccacuuuuaaguguuauggagugucuccuacuaaauuaaaugaucucugcuuuacuaaugucuaugcagauucauuuguaauuagaggugaugaagucagacaaaucgcuccagggcaaacuggaaagauugcugauuauaauuauaaauuaccagaugauuuuacaggcugcguuauagcuuggaauucuaacaaucuugauucuaagguuggugguaauuauaauuaccuguauagauuguuuaggaagucuaaucucaaaccuuuugagagagauauuucaacugaaaucuaucaggccgguagcacaccuuguaaugguguugaagguuuuaauuguuacuuuccuuuacaaucauaugguuuccaacccacuaaugguguugguuaccaaccauacagaguaguaguacuuucuuuugaacuucuacaugcaccagcaacuguuuguggaccuaaaaagucuacuaauuugguuaaaaacaaaugugucaauuucaacuucaaugguuuaacaggcacagguguucuuacugagucuaacaaaaaguuucugccuuuccaacaauuuggcagagacauugcugacacuacugaugcuguccgugauccacagacacuugagauucuugacauuacaccauguucuuuugguggugucaguguuauaacaccaggaacaaauacuucuaaccagguugcuguucuuuaucaggguguuaacugcacagaagucccuguugcuauucaugcagaucaacuuacuccuacuuggcguguuuauucuacagguucuaauguuuuucaaacacgugcaggcuguuuaauaggggcugaacaugucaacaacucauaugagugugacauacccauuggugcagguauaugcgcuaguuaucagacucagacuaauucuccucggcgggcacguaguguagcuagucaauccaucauugccuacacuaugucacuuggugcagaaaauucaguugcuuacucuaauaacucuauugccauacccacaaauuuuacuauuaguguuaccacagaaauucuaccagugucuaugaccaagacaucaguagauuguacaauguacauuuguggugauucaacugaaugcagcaaucuuuuguugcaauauggcaguuuuuguacacaauuaaaccgugcuuuaacuggaauagcuguugaacaagacaaaaacacccaagaaguuuuugcacaagucaaacaaauuuacaaaacaccaccaauuaaagauuuuggugguuuuaauuuuucacaaauauuaccagauccaucaaaaccaagcaagaggucauuuauugaagaucuacuuuucaacaaagugacacuugcagaugcuggcuucaucaaacaauauggugauugccuuggugauauugcugcuagagaccucauuuguguacaaaaguuuaacggccuuacuguuuugccaccuuugcucacagaugaaaugauugcucaauacacuucugcacuguuagcggguacaaucacuucugguuggaccuuuggugcaggugcugcauuacaaauaccauuugcuaugcaaauggcuuauagguuuaaugguauuggaguuacacagaauguucucuaugagaaccaaaaauugauugccaaccaauuuaauagugcuauuggcaaaauucaagacucacuuucuuccacagcaagugcacuuggaaaacuucaagauguggucaaccaaaaugcacaagcuuuaaacacgcuuguuaaacaacuuagcuccaauuuuggugcaauuucaaguguuuuaaaugauauccuuucacgucuugacaaaguugaggcugaagugcaaauugauagguugaucacaggcagacuucaaaguuugcagacauaugugacucaacaauuaauuagagcugcagaaaucagagcuucugcuaaucuugcugcuacuaaaaugucagaguguguacuuggacaaucaaaaagaguugauuuuuguggaaagggcuaucaucuuauguccuucccucagucagcaccucaugguguagucuucuugcaugugacuuaugucccugcacaagaaaagaacuucacaacugcuccugccauuugucaugauggaaaagcacacuuuccucgugaaggugucuuuguuucaaauggcacacacugguuuguaacacaaaggaauuuuuaugaaccacaaaucauuacuacagacaacacauuugugucugguaacugugauguuguaauaggaauugucaacaacacaguuuaugauccuuugcaaccugaauuagacucauucaaggaggaguuagauaaauauuuuaagaaucauacaucaccagauguugauuuaggugacaucucuggcauuaaugcuucaguuguaaacauucaaaaagaaauugaccgccucaaugagguugccaagaauuuaaaugaaucucucaucgaucuccaagaacuuggaaaguaugagcaguauauaaaauggccaugguacauuuggcuagguuuuauagcuggcuugauugccauaguaauggugacaauuaugcuuugcuguaugaccaguugcuguaguugucucaagggcuguuguucuuguggauccugcugcaaauuugaugaagacgacucugagccagugcucaaaggagucaaauuacauuacacauaa

SEQ ID NO: 11694 - RNA, 3822 nt, Artificial Sequence
  SARS-CoV-2/Finland/FIN03032020A/2020__EPI_ISL_413602 spike protein CDS wt (1-1273)
auguuuguuuuucuuguuuuauugccacuagucucuagucaguguguuaaucuuacaaccagaacucaauuacccccugcauacacuaauucuuucacacgugguguuuauuacccugacaaaguuuucagauccucaguuuuacauucaacucaggacuuguucuuaccuuucuuuuccaauguuacuugguuccaugcuauacaugucucugggaccaaugguacuaagagguuugauaacccuguccuaccauuuaaugaugguguuuauuuugcuuccacugagaagucuaacauaauaagaggcuggauuuuugguacuacuuuagauucgaagacccagucccuacuuauuguuaauaacgcuacuaauguuguuauuaaagucugugaauuucaauuuuguaaugauccauuuuuggguguuuauuaccacaaaaacaacaaaaguuggauggaaagugaguucagaguuuauucuagugcgaauaauugcacuuuugaauaugucucucagccuuuucuuauggaccuugaaggaaaacaggguaauuucaaaaaucuuagggaauuuguguuuaagaauauugaugguuauuuuaaaauauauucuaagcacacgccuauuaauuuagugcgugaucucccucaggguuuuucggcuuuagaaccauugguagauuugccaauagguauuaacaucacuagguuucaaacuuuacuugcuuuacauagaaguuauuugacuccuggugauucuucuucagguuggacagcuggugcugcagcuuauuauguggguuaucuucaaccuaggacuuuucuauuaaaauauaaugaaaauggaaccauuacagaugcuguagacugugcacuugacccucucucagaaacaaaguguacguugaaauccuucacuguagaaaaaggaaucuaucaaacuucuaacuuuagaguccaaccaacagaaucuauuguuagauuuccuaauauuacaaacuugugcccuuuuggugaaguuuuuaacgccaccagauuugcaucuguuuaugcuuggaacaggaagagaaucagcaacuguguugcugauuauucuguccuauauaauuccgcaucauuuuccacuuuuaaguguuauggagugucuccuacuaaauuaaaugaucucugcuuuacuaaugucuaugcagauucauuuguaauuagaggugaugaagucagacaaaucgcuccagggcaaacuggaaagauugcugauuauaauuauaaauuaccagaugauuuuacaggcugcguuauaucuuggaauucuaacaaucuugauucuaagguuggugguaauuauaauuaccuguauagauuguuuaggaagucuaaucucaaaccuuuugagagagauauuucaacugaaaucuaucaggccgguagcacaccuuguaaugguguugaagguuuuaauuguuacuuuccuuuacaaucauaugguuuccaacccacuaaugguguugguuaccaaccauacagaguaguaguacuuucuuuugaacuucuacaugcaccagcaacuguuuguggaccuaaaaagucuacuaauuugguuaaaaacaaaugugucaauuucaacuucaaugguuuaacaggcacagguguucuuacugagucuaacaaaaaguuucugccuuuccaacaauuuggcagagacauugcugacacuacugaugcuguccgugauccacagacacuugagauucuugacauuacaccauguucuuuugguggugucaguguuauaacaccaggaacaaauacuucuaaccagguugcuguucuuuaucaggguguuaacugcacagaagucccuguugcuauucaugcagaucaacuuacuccuacuuggcguguuuauucuacagguucuaauguuuuucaaacacgugcaggcuguuuaauaggggcugaacaugucaacaacucauaugagugugacauacccauuggugcagguauaugcgcuaguuaucagacucagacuaauucuccucggcgggcacguaguguagcuagucaauccaucauugccuacacuaugucacuuggugcagaaaauucaguugcuuacucuaauaacucuauugccauacccacaaauuuuacuauuaguguuaccacagaaauucuaccagugucuaugaccaagacaucaguagauuguacaauguacauuuguggugauucaacugaaugcagcaaucuuuuguugcaauauggcaguuuuuguacacaauuaaaccgugcuuuaacuggaauagcuguugaacaagacaaaaacacccaagaaguuuuugcacaagucaaacaaauuuacaaaacaccaccaauuaaagauuuuggugguuuuaauuuuucacaaauauuaccagauccaucaaaaccaagcaagaggucauuuauugaagaucuacuuuucaacaaagugacacuugcagaugcuggcuucaucaaacaauauggugauugccuuggugauauugcugcuagagaccucauuugugcacaaaaguuuaacggccuuacuguuuugccaccuuugcucacagaugaaaugauugcucaauacacuucugcacuguuagcggguacaaucacuucugguuggaccuuuggugcaggugcugcauuacaaauaccauuugcuaugcaaauggcuuauagguuuaaugguauuggaguuacacagaauguucucuaugagaaccaaaaauugauugccaaccaauuuaauagugcuauuggcaaaauucaagacucacuuucuuccacagcaagugcacuuggaaaacuucaagauguggucaaccaaaaugcacaagcuuuaaacacgcuuguuaaacaacuuagcuccaauuuuggugcaauuucaaguguuuuaaaugauauccuuucacgucuugacaaaguugaggcugaagugcaaauugauagguugaucacaggcagacuucaaaguuugcagacauaugugacucaacaauuaauuagagcugcagaaaucagagcuucugcuaaucuugcugcuacuaaaaugucagaguguguacuuggacaaucaaaaagaguugauuuuuguggaaagggcuaucaucuuauguccuucccucagucagcaccucaugguguagucuucuugcaugugacuuaugucccugcacaagaaaagaacuucacaacugcuccugccauuugucaugauggaaaagcacacuuuccucgugaaggugucuuuguuucaaauggcacacacugguuuguaacacaaaggaauuuuuaugaaccacaaaucauuacuacagacaacacauuugugucugguaacugugauguuguaauaggaauugucaacaacacaguuuaugauccuuugcaaccugaauuagacucauucaaggaggaguuagauaaauauuuuaagaaucauacaucaccagauguugauuuaggugacaucucuggcauuaaugcuucaguuguaaacauucaaaaagaaauugaccgccucaaugagguugccaagaauuuaaaugaaucucucaucgaucuccaagaacuuggaaaguaugagcaguauauaaaauggccaugguacauuuggcuagguuuuauagcuggcuugauugccauaguaauggugacaauuaugcuuugcuguaugaccaguugcuguaguugucucaagggcuguuguucuuguggauccugcugcaaauuugaugaagacgacucugagccagugcucaaaggagucaaauuacauuacacauaa

SEQ ID NO: 11695 - RNA, 3822 nt, Artificial Sequence
  SARS-CoV-2/France/GE1977/2020__EPI_ISL_414632 spike protein CDS wt (1-1273)
auguuuguuuuucuuguuuuauugccacuagucucuagucaguguguuaaucuuacaaccagaacucaauuacccccugcauacacuaauucuuucacacgugguguuuauuacccugacaaaguuuucagauccucaguuuuacauucaacucaggacuuguucuuaccuuucuuuuccaauguuacuugguuccaugcuauacaugucucugggaccaaugguacuaagagguuugauaacccuguccuaccauuuaaugaugguguuuauuuugcuuccacugagaagucuaacauaauaagaggcuggauuuuugguacuacuuuagauucgaagacccagucccuacuuauuguuaauaacgcuacuaauguuguuauuaaagucugugaauuucaauuuuguaaugauccauuuuuggguguuuauuaccacaaaaacaacaaaaguuggauggaaagugaguucagaguuuauucuagugcgaauaauugcacuuuugaauaugucucucagccuuuucuuauggaccuugaaggaaaacaggguaauuucaaaaaucuuagggaauuuguguuuaagaauauugaugguuauuuuaaaauauauucuaagcacacgccuauuaauuuagugcgugaucucccucaggguuuuucggcuuuagaaccauugguagauuugccaauagguauuaacaucacuagguuucaaacuuuacuugcuuuacauagaaguuauuugacuccuggugauucuucuucagguuggacagcuggugcugcagcuuauuauguggguuaucuucaaccuaggacuuuucuauuaaaauauaaugaaaauggaaccauuacagaugcuguagacugugcacuugacccucucucagaaacaaaguguacguugaaauccuucacuguagaaaaaggaaucuaucaaacuucuaacuuuagaguccaaccaacagaaucuauuguuagauuuccuaauauuacaaacuugugcccuuuuggugaaguuuuuaacgccaccagauuugcaucuguuuaugcuuggaacaggaagagaaucagcaacuguguugcugauuauucuguccuauauaauuccgcaucauuuuccacuuuuaaguguuauggagugucuccuacuaaauuaaaugaucucugcuuuacuaaugucuaugcagauucauuuguaauuagaggugaugaagucagacaaaucgcuccagggcaaacuggaaagauugcugauuauaauuauaaauuaccagaugauuuuacaggcugcguuauagcuuggaauucuaacaaucuugauucuaagguuggugguaauuauaauuaccuguauagauuguuuaggaagucuaaucucaaaccuuuugagagagauauuucaacugaaaucuaucaggccgguagcacaccuuguaaugguguugaagguuuuaauuguuacuuuccuuuacaaucauaugguuuccaacccacuaaugguguugguuaccaaccauacagaguaguaguacuuucuuuugaacuucuacaugcaccagcaacuguuuguggaccuaaaaagucuacuaauuugguuaaaaacaaaugugucaauuucaacuucaaugguuuaacaggcacagguguucuuacugagucuaacaaaaaguuucugccuuuccaacaauuuggcagagacauugcugacacuacugaugcuguccgugauccacagacacuugagauucuugacauuacaccauguucuuuugguggugucaguguuauaacaccaggaacaaauacuucuaaccagguugcuguucuuuaucaggguguuaacugcacagaagucccuguugcuauucaugcagaucaacuuacuccuacuuggcguguuuauucuacagguucuaauguuuuucaaacacgugcaggcuguuuaauaggggcugaacaugucaacaacucauaugagugugacauacccauuggugcagguauaugcgcuaguuaucagacucagacuaauucuccucggcgggcacguaguguagcuagucaauccaucauugccuacacuaugucacuuggugcagaaaauucaguugcuuacucuaauaacucuauugccauacccacaaauuuuacuauuaguguuaccacagaaauucuaccagugucuaugaccaagacaucaguagauuguacaauguacauuuguggugauucaacugaaugcagcaaucuuuuguugcaauauggcaguuuuuguacacaauuaaaccgugcuuuaacuggaauagcuguugaacaagacaaaaacacccaagaaguuuuugcacaagucaaacaaauuuacaaaacaccaccaauuaaagauuuuggugguuuuaauuuuucacaaauauuaccagauccaucaaaaccaagcaagaggucauuuauugaagaucuacuuuucaacaaagugacacuugcagaugcuggcuucaucaaacaauauggugauugccuuggugauauugcugcuagagaccucauuugugcacaaaaguuuaacggccuuacuguuuugccaccuuugcucacagaugaaaugauugcucaauacacuucugcacuguuagcggguacaaucacuucugguuggaccuuuggugcaggugcugcauuacaaauaccauuugcuaugcaaauggcuuauagguuuaaugguauuggaguuacacagaauguucucuaugagaaccaaaaauugauugccaaccaauuuaauagugcuauuggcaaaauucaagacucacuuuuuuccacagcaagugcacuuggaaaacuucaagauguggucaaccaaaaugcacaagcuuuaaacacgcuuguuaaacaacuuagcuccaauuuuggugcaauuucaaguguuuuaaaugauauccuuucacgucuugacaaaguugaggcugaagugcaaauugauagguugaucacaggcagacuucaaaguuugcagacauaugugacucaacaauuaauuagagcugcagaaaucagagcuucugcuaaucuugcugcuacuaaaaugucagaguguguacuuggacaaucaaaaagaguugauuuuuguggaaagggcuaucaucuuauguccuucccucagucagcaccucaugguguagucuucuugcaugugacuuaugucccugcacaagaaaagaacuucacaacugcuccugccauuugucaugauggaaaagcacacuuuccucgugaaggugucuuuguuucaaauggcacacacugguuuguaacacaaaggaauuuuuaugaaccacaaaucauuacuacagacaacacauuugugucugguaacugugauguuguaauaggaauugucaacaacacaguuuaugauccuuugcaaccugaauuagacucauucaaggaggaguuagauaaauauuuuaagaaucauacaucaccagauguugauuuaggugacaucucuggcauuaaugcuucaguuguaaacauucaaaaagaaauugaccgccucaaugagguugccaagaauuuaaaugaaucucucaucgaucuccaagaacuuggaaaguaugagcaguauauaaaauggccaugguacauuuggcuagguuuuauagcuggcuugauugccauaguaauggugacaauuaugcuuugcuguaugaccaguugcuguaguugucucaagggcuguuguucuuguggauccugcugcaaauuugaugaagacgacucugagccagugcucaaaggagucaaauuacauuacacauaa

SEQ ID NO: 11696 - RNA, 3822 nt, Artificial Sequence
  SARS-CoV-2/Finland/FIN-313/2020__EPI_ISL_414641 spike protein CDS wt (1-1273)
auguuuguuuuucuuguuuuauugccacuagucucuagucaguguguuaaucuuacaaccagaacucaauuacccccugcauacacuaauucuuucacacgugguguuuauuacccugacaaaguuuucagauccucaguuuuacauucaacucaggacuuguucuuaccuuucuuuuccaauguuacuugguuccaugcuauacaugucucugggaccaaugguacuaagagguuugauaacccuguccuaccauuuaaugaugguguuuauuuugcuuccacugagaagucuaacauaauaagaggcuggauuuuugguacuacuuuagauucgaagacccagucccuacuuauuguuaauaacgcuacuaauguuguuauuaaagucugugaauuucaauuuuguaaugauccauuuuuggguguuuauuaccacaaaaacaacaaaaguuggauggaaagugaguucagaguuuauucuagugcgaauaauugcacuuuugaauaugucucucagccuuuucuuauggaccuugaaggaaaacaggguaauuucaaaaaucuuagggaauuuguguuuaagaauauugaugguuauuuuaaaauauauucuaagcacacgccuauuaauuuagugcgugaucucccucaggguuuuucggcuuuagaaccauugguagauuugccaauagguauuaacaucacuagguuuaaaacuuuacuugcuuuacauagaaguuauuugacuccuggugauucuucuucagguuggacagcuggugcugcagcuuauuauguggguuaucuucaaccuaggacuuuucuauuaaaauauaaugaaaauggaaccauuacagaugcuguagacugugcacuugacccucucucagaaacaaaguguacguugaaauccuucacuguagaaaaaggaaucuaucaaacuucuaacuuuagaguccaaccaacagaaucuauuguuagauuuccuaauauuacaaacuugugcccuuuuggugaaguuuuuaacgccaccagauuugcaucuguuuaugcuuggaacaggaagagaaucagcaacuguguugcugauuauucuguccuauauaauuccgcaucauuuuccacuuuuaaguguuauggagugucuccuacuaaauuaaaugaucucugcuuuacuaaugucuaugcagauucauuuguaauuagaggugaugaagucagacaaaucgcuccagggcaaacuggaaagauugcugauuauaauuauaaauuaccagaugauuuuacaggcugcguuauagcuuggaauucuaacaaucuugauucuaagguuggugguaauuauaauuaccuguauagauuguuuaggaagucuaaucucaaaccuuuugagagagauauuucaacugaaaucuaucaggccgguagcacaccuuguaaugguguugaagguuuuaauuguuacuuuccuuuacaaucauaugguuuccaacccacuaaugguguugguuaccaaccauacagaguaguaguacuuucuuuugaacuucuacaugcaccagcaacuguuuguggaccuaaaaagucuacuaauuugguuaaaaacaaaugugucaauuucaacuucaaugguuuaacaggcacagguguucuuacugagucuaacaaaaaguuucugccuuuccaacaauuuggcagagacauugcugacacuacugaugcuguccgugauccacagacacuugagauucuugacauuacaccauguucuuuugguggugucaguguuauaacaccaggaacaaauacuucuaaccagguugcuguucuuuaucaggguguuaacugcacagaagucccuguugcuauucaugcagaucaacuuacuccuacuuggcguguuuauucuacagguucuaauguuuuucaaacacgugcaggcuguuuaauaggggcugaacaugucaacaacucauaugagugugacauacccauuggugcagguauaugcgcuaguuaucagacucagacuaauucuccucggcgggcacguaguguagcuagucaaucuaucauugccuacacuaugucacuuggugcagaaaauucaguugcuuacucuaauaacucuauugccauacccacaaauuuuacuauuaguguuaccacagaaauucuaccagugucuaugaccaagacaucaguagauuguacaauguacauuuguggugauucaacugaaugcagcaaucuuuuguugcaauauggcaguuuuuguacacaauuaaaccgugcuuuaacuggaauagcuguugaacaagacaaaaacacccaagaaguuuuugcacaagucaaacaaauuuacaaaacaccaccaauuaaagauuuuggugguuuuaauuuuucacaaauauuaccagauccaucaaaaccaagcaagaggucauuuauugaagaucuacuuuucaacaaagugacacuugcagaugcuggcuucaucaaacaauauggugauugccuuggugauauugcugcuagagaccucauuugugcacaaaaguuuaacggccuuacuguuuugccaccuuugcucacagaugaaaugauugcucaauacacuucugcacuguuagcggguacaaucacuucugguuggaccuuuggugcaggugcugcauuacaaauaccauuugcuaugcaaauggcuuauagguuuaaugguauuggaguuacacagaauguucucuaugagaaccaaaaauugauugccaaccaauuuaauagugcuauuggcaaaauucaagacucacuuucuuccacagcaagugcacuuggaaaacuucaagauguggucaaccaaaaugcacaagcuuuaaacacgcuuguuaaacaacuuagcuccaauuuuggugcaauuucaaguguuuuaaaugauauccuuucacgucuugacaaaguugaggcugaagugcaaauugauagguugaucacaggcagacuucaaaguuugcagacauaugugacucaacaauuaauuagagcugcagaaaucagagcuucugcuaaucuugcugcuacuaaaaugucagaguguguacuuggacaaucaaaaagaguugauuuuuguggaaagggcuaucaucuuauguccuucccucagucagcaccucaugguguagucuucuugcaugugacuuaugucccugcacaagaaaagaacuucacaacugcuccugccauuugucaugauggaaaagcacacuuuccucgugaaggugucuuuguuucaaauggcacacacugguuuguaacacaaaggaauuuuuaugaaccacaaaucauuacuacagacaacacauuugugucugguaacugugauguuguaauaggaauugucaacaacacaguuuaugauccuuugcaaccugaauuagacucauucaaggaggaguuagauaaauauuuuaagaaucauacaucaccagauguugauuuaggugacaucucuggcauuaaugcuucaguuguaaacauucaaaaagaaauugaccgccucaaugagguugccaagaauuuaaaugaaucucucaucgaucuccaagaacuuggaaaguaugagcaguauauaaaauggccaugguacauuuggcuagguuuuauagcuggcuugauugccauaguaauggugacaauuaugcuuugcuguaugaccaguugcuguaguugucucaagggcuguuguucuuguggauccugcugcaaauuugaugaagacgacucugagccagugcucaaaggagucaaauuacauuacacauaa

SEQ ID NO: 11697 - RNA, 3822 nt, Artificial Sequence
  SARS-CoV-2/Netherlands/ZuidHolland_2/2020__EPI_ISL_414556 spike protein CDS wt (1-1273)
auguuuguuuuucuuguuuuauugccacuagucucuagucaguguguuaaucuuacaaccagaacucaauuacccccugcauacacuaauucuuucacacgugguguuuauuacccugacaaaguuuucagauccucaguuuuacauucaacucaggacuuguucuuaccuuucuuuuccaauguuacuugguuccaugcuauacaugucucugggaccaaugguacuaagagguuugauaacccuguccuaccauuuaaugaugguguuuauuuugcuuccacugagaagucuaacauaauaagaggcuggauuuuugguacuacuuuagauucgaagacccagucccuacuuauuguuaauaacgcuacuaauguuguuauuaaagucugugaauuucaauuuuguaaugauccauuuuuggguguuuauuaccacaaaaacaacaaaaguuggauggaaagugaguucagaguuuauucuagugcgaauaauugcacuuuugaauaugucucucagccuuuucuuauggaccuugaaggaaaacaggguaauuucaaaaaucuuagggaauuuguguuuaagaauauugaugguuauuuuaaaauauauucuaagcacacgccuauuaauuuagugcgugaucucccucaggguuuuucggcuuuagaaccauugguagauuugccaauagguauuaacaucacuagguuucaaacuuuacuugcuuuacauagaaguuauuugacuccuggugauucuucuucagguuggacagcuggugcugcagcuuauuauguggguuaucuucaaccuaggacuuuucuauuaaaauauaaugaaaauggaaccauuacagaugcuguagacugugcacuugacccucucucagaaacaaaguguacguugaaauccuucacuguagaaaaaggaaucuaucaaacuucuaacuuuagaguccaaccaacagaaucuauuguuagauuuccuaauauuacaaacuugugcccuuuuggugaaguuuuuaacgccaccagauuugcaucuguuuaugcuuggaacaggaagagaaucagcaacuguguugcugauuauucuguccuauauaauuccgcaucauuuuccacuuuuaaguguuauggagugucuccuacuaaauuaaaugaucucugcuuuacuaaugucuaugcagauucauuuguaauuagaggugaugaagucagacaaaucgcuccagggcaaacuggaaagauugcugauuauaauuauaaauuaccagaugauuuuacaggcugcguuauagcuuggaauucuaacaaucuugauucuaagguuggugguaauuauaauuaccuguauagauuguuuaggaagucuaaucucaaaccuuuugagagagauauuucaacugaaaucuaucaggccgguagcacaccuuguaaugguguugaagguuuuaauuguuacuuuccuuuacaaucauaugguuuccaacccacuaaugguguugguuaccaaccauacagaguaguaguacuuucuuuugaacuucuacaugcaccagcaacuguuuguggaccuaaaaagucuacuaauuugguuaaaaacaaaugugucaauuucaacuucaaugguuuaacaggcacagguguucuuacugagucuaacaaaaaguuucugccuuuccaacaauuuggcagagacauugcugacacuacugaugcuguccgugauccacagacacuugagauucuugacauuacaccauguucuuuugguggugucaguguuauaacaccaggaacaaauacuucuaaccagguugcuguucuuuaucaggguguuaacugcacagaagucccuguugcuauucaugcagaucaacuuacuccuacuuggcguguuuauucuacagguucuaauguuuuucaaacacgugcaggcuguuuaauaggggcugaacaugucaacaacucauaugagugugacauacccauuggugcagguauaugcgcuaguuaucagacucagacuaauucuccucggcgggcacguaguguagcuagucaauccaucauugccuacacuaugucacuuggugcagaaaauucaguugcuuacucuaauaacucuauugccauacccacaaauuuuacuauuaguguuaccacagaaauucuaccagugucuaugaccaagacaucaguagauuguacaauguacauuuguggugauucaacugaaugcagcaaucuuuuguugcaauauggcaguuuuuguacacaauuaaaccgugcuuuaacuggaauagcucuugaacaagacaaaaacacccaagaaguuuuugcacaagucaaacaaauuuacaaaacaccaccaauuaaagauuuuggugguuuuaauuuuucacaaauauuaccagauccaucaaaaccaagcaagaggucauuuauugaagaucuacuuuucaacaaagugacacuugcagaugcuggcuucaucaaacaauauggugauugccuuggugauauugcugcuagagaccucauuugugcacaaaaguuuaacggccuuacuguuuugccaccuuugcucacagaugaaaugauugcucaauacacuucugcacuguuagcggguacaaucacuucugguuggaccuuuggugcaggugcugcauuacaaauaccauuugcuaugcaaauggcuuauagguuuaaugguauuggaguuacacagaauguucucuaugagaaccaaaaauugauugccaaccaauuuaauagugcuauuggcaaaauucaagacucacuuucuuccacagcaagugcacuuggaaaacuucaagauguggucaaccaaaaugcacaagcuuuaaacacgcuuguuaaacaacuuagcuccaauuuuggugcaauuucaaguguuuuaaaugauauccuuucacgucuugacaaaguugaggcugaagugcaaauugauagguugaucacaggcagacuucaaaguuugcagacauaugugacucaacaauuaauuagagcugcagaaaucagagcuucugcuaaucuugcugcuacuaaaaugucagaguguguacuuggacaaucaaaaagaguugauuuuuguggaaagggcuaucaucuuauguccuucccucagucagcaccucaugguguagucuucuugcaugugacuuaugucccugcacaagaaaagaacuucacaacugcuccugccauuugucaugauggaaaagcacacuuuccucgugaaggugucuuuguuucaaauggcacacacugguuuguaacacaaaggaauuuuuaugaaccacaaaucauuacuacagacaacacauuugugucugguaacugugauguuguaauaggaauugucaacaacacaguuuaugauccuuugcaaccugaauuagacucauucaaggaggaguuagauaaauauuuuaagaaucauacaucaccagauguugauuuaggugacaucucuggcauuaaugcuucaguuguaaacauucaaaaagaaauugaccgccucaaugagguugccaagaauuuaaaugaaucucucaucgaucuccaagaacuuggaaaguaugagcaguauauaaaauggccaugguacauuuggcuagguuuuauagcuggcuugauugccauaguaauggugacaauuaugcuuugcuguaugaccaguugcuguaguugucucaagggcuguuguucuuguggauccugcugcaaauuugaugaagacgacucugagccagugcucaaaggagucaaauuacauuacacauaa

SEQ ID NO: 11698 - RNA, 3822 nt, Artificial Sequence
  SARS-CoV-2/USA/WA-UW31/2020__EPI_ISL_414618 spike protein CDS wt (1-1273)
auguuuguuuuucuuguuuuauugccacuagucucuagucaguguguuaaucuuacaaccagaacucaauuacccccugcauacacuaauucuuucacacgugguguuuauuacccugacaaaguuuucagauccucaguuuuacauucaacucaggacuuguucuuaccuuucuuuuccaauguuacuugguuccaugcuauacaugucucugggaccaaugguacuaagagguuugauaacccuguccuaccauuuaaugaugguguuuauuuugcuuccacugagaagucuaacauaauaagaggcuggauuuuugguacuacuuuagauucgaagacccagucccuacuuauuguuaauaacgcuacuaauguuguuauuaaagucugugaauuucaauuuuguaaugauccauuuuuggguguuuauuaccacaaaaacaacaaaaguuggauggaaagugaguucagaguuuauucuagugcgaauaauugcacuuuugaauaugucucucagccuuuucuuauggaccuugaaggaaaacaggguaauuucaaaaaucuuagggaauuuguguuuaagaauauugaugguuauuuuaaaauauauucuaagcacacgccuauuaauuuagugcgugaucucccucaggguuuuucggcuuuagaaccauugguagauuugccaauagguauuaacaucacuagguuucaaacuuuacuugcuuuacauagaaguuauuugacuccuggugauucuucuucagguuggacagcuggugcugcagcuuauuauguggguuaucuucaaccuaggacuuuucuauuaaaauauaaugaaaauggaaccauuacagaugcuguagacugugcacuugacccucucucagaaacaaaguguacguugaaauccuucacuguagaaaaaggaaucuaucaaacuucuaacuuuagaguccaaccaacagaaucuauuguuagauuuccuaauauuacaaacuugugcccuuuuggugaaguuuuuaacgccaccagauuugcaucuguuuaugcuuggaacaggaagagaaucagcaacuguguugcugauuauucuguccuauauaauuccgcaucauuuuccacuuuuaaguguuauggagugucuccuacuaaauuaaaugaucucugcuuuacuaaugucuaugcagauucauuuguaauuagaggugaugaagucagacaaaucgcuccagggcaaacuggaaagauugcugauuauaauuauaaauuaccagaugauuuuacaggcugcguuauagcuuggaauucuaacaaucuugauucuaagguuggugguaauuauaauuaccuguauagauuguuuaggaagucuaaucucaaaccuuuugagagagauauuucaacugaaaucuaucaggccgguagcacaccuuguaauggugcugaagguuuuaauuguuacuuuccuuuacaaucauaugguuuccaacccacuaaugguguugguuaccaaccauacagaguaguaguacuuucuuuugaacuucuacaugcaccagcaacuguuuguggaccuaaaaagucuacuaauuugguuaaaaacaaaugugucaauuucaacuucaaugguuuaacaggcacagguguucuuacugagucuaacaaaaaguuucugccuuuccaacaauuuggcagagacauugcugacacuacugaugcuguccgugauccacagacacuugagauucuugacauuacaccauguucuuuugguggugucaguguuauaacaccaggaacaaauacuucuaaccagguugcuguucuuuaucaggauguuaacugcacagaagucccuguugcuauucaugcagaucaacuuacuccuacuuggcguguuuauucuacagguucuaauguuuuucaaacacgugcaggcuguuuaauaggggcugaacaugucaacaacucauaugagugugacauacccauuggugcagguauaugcgcuaguuaucagacucagacuaauucuccucggcgggcacguaguguagcuagucaauccaucauugccuacacuaugucacuuggugcagaaaauucaguugcuuacucuaauaacucuauugccauacccacaaauuuuacuauuaguguuaccacagaaauucuaccagugucuaugaccaagacaucaguagauuguacaauguacauuuguggugauucaacugaaugcagcaaucuuuuguugcaauauggcaguuuuuguacacaauuaaaccgugcuuuaacuggaauagcuguugaacaagacaaaaacacccaagaaguuuuugcacaagucaaacaaauuuacaaaacaccaccaauuaaagauuuuggugguuuuaauuuuucacaaauauuaccagauccaucaaaaccaagcaagaggucauuuauugaagaucuacuuuucaacaaagugacacuugcagaugcuggcuucaucaaacaauauggugauugccuuggugauauugcugcuagagaccucauuugugcacaaaaguuuaacggccuuacuguuuugccaccuuugcucacagaugaaaugauugcucaauacacuucugcacuguuagcggguacaaucacuucugguuggaccuuuggugcaggugcugcauuacaaauaccauuugcuaugcaaauggcuuauagguuuaaugguauuggaguuacacagaauguucucuaugagaaccaaaaauugauugccaaccaauuuaauagugcuauuggcaaaauucaagacucacuuucuuccacagcaagugcacuuggaaaacuucaagauguggucaaccaaaaugcacaagcuuuaaacacgcuuguuaaacaacuuagcuccaauuuuggugcaauuucaaguguuuuaaaugauauccuuucacgucuugacaaaguugaggcugaagugcaaauugauagguugaucacaggcagacuucaaaguuugcagacauaugugacucaacaauuaauuagagcugcagaaaucagagcuucugcuaaucuugcugcuacuaaaaugucagaguguguacuuggacaaucaaaaagaguugauuuuuguggaaagggcuaucaucuuauguccuucccucagucagcaccucaugguguagucuucuugcaugugacuuaugucccugcacaagaaaagaacuucacaacugcuccugccauuugucaugauggaaaagcacacuuuccucgugaaggugucuuuguuucaaauggcacacacugguuuguaacacaaaggaauuuuuaugaaccacaaaucauuacuacagacaacacauuugugucugguaacugugauguuguaauaggaauugucaacaacacaguuuaugauccuuugcaaccugaauuagacucauucaaggaggaguuagauaaauauuuuaagaaucauacaucaccagauguugauuuaggugacaucucuggcauuaaugcuucaguuguaaacauucaaaaagaaauugaccgccucaaugagguugccaagaauuuaaaugaaucucucaucgaucuccaagaacuuggaaaguaugagcaguauauaaaauggccaugguacauuuggcuagguuuuauagcuggcuugauugccauaguaauggugacaauuaugcuuugcuguaugaccaguugcuguaguugucucaagggcuguuguucuuguggauccugcugcaaauuugaugaagacgacucugagccagugcucaaaggagucaaauuacauuacacauaa

SEQ ID NO: 11699 - RNA, 3822 nt, Artificial Sequence
  SARS-CoV-2/South Korea/SNU01/2020__EPI_ISL_411929 spike protein CDS wt (1-1273)
auguuuguuuuucuuguuuuauugccacuagucucuagucaguguguuaaucuuacaaccagaacucaauuacccccugcauacacuaauucuuucacacgugguguuuauuacccugacaaaguuuucagauccucaguuuuacauucaacucaggacuuguucuuaccuuucuuuuccaauguuacuugguuccaugcuauacaugucucugggaccaaugguacuaagagguuugauaacccuguccuaccauuuaaugaugguguuuauuuugcuuccacugagaagucuaacauaauaagaggcuggauuuuugguacuacuuuagauucgaagacccagucccuacuuauuguuaauaacgcuacuaauguuguuauuaaagucugugaauuucaauuuuguaaugauccauuuuuggguguuuauuaccacaaaaacaacaaaaguuggauggaaagugaguucagaguuuauucuagugcgaauaauugcacuuuugaauaugucucucagccuuuucuuauggaccuugaaggaaaacaggguaauuucaaaaaucuuagggaauuuguguuuaagaauauugaugguuauuuuaaaauauauucuaagcacacgccuauuaauuuagugcgugaucucccucaggguuuuugggcuuuagaaccauugguagauuugccaauagguauuaacaucacuagguuucaaacuuuacuugcuuuacauagaaguuauuugacuccuggugauucuucuucagguuggacagcuggugcugcagcuuauuauguggguuaucuucaaccuaggacuuuucuauuaaaauauaaugaaaauggaaccauuacagaugcuguagacugugcacuugacccucucucagaaacaaaguguacguugaaauccuucacuguagaaaaaggaaucuaucaaacuucuaacuuuagaguccaaccaacagaaucuauuguuagauuuccuaauauuacaaacuugugcccuuuuggugaaguuuuuaacgccaccagauuugcaucuguuuaugcuuggaacaggaagagaaucagcaacuguguugcugauuauucuguccuauauaauuccgcaucauuuuccacuuuuaaguguuauggagugucuccuacuaaauuaaaugaucucugcuuuacuaaugucuaugcagauucauuuguaauuagaggugaugaagucagacaaaucgcuccagggcaaacuggaaagauugcugauuauaauuauaaauuaccagaugauuuuacaggcugcguuauagcuuggaauucuaacaaucuugauucuaagguuggugguaauuauaauuaccuguauagauuguuuaggaagucuaaucucaaaccuuuugagagagauauuucaacugaaaucuaucaggccgguagcacaccuuguaaugguguugaagguuuuaauuguuacuuuccuuuacaaucauaugguuuccaacccacuaaugguguugguuaccaaccauacagaguaguaguacuuucuuuugaacuucuacaugcaccagcaacuguuuguggaccuaaaaagucuacuaauuugguuaaaaacaaaugugucaauuucaacuucaaugguuuaacaggcacagguguucuuacugagucuaacaaaaaguuucugccuuuccaacaauuuggcagagacauugcugacacuacugaugcuguccgugauccacagacacuugagauucuugacauuacaccauguucuuuugguggugucaguguuauaacaccaggaacaaauacuucuaaccagguugcuguucuuuaucaggauguuaacugcacagaagucccuguugcuauucaugcagaucaacuuacuccuacuuggcguguuuauucuacagguucuaauguuuuucaaacacgugcaggcuguuuaauaggggcugaacaugucaacaacucauaugagugugacauacccauuggugcagguauaugcgcuaguuaucagacucagacuaauucuccucggcgggcacguaguguagcuagucaauccaucauugccuacacuaugucacuuggugcagaaaauucaguugcuuacucuaauaacucuauugccauacccacaaauuuuacuauuaguguuaccacagaaauucuaccagugucuaugaccaagacaucaguagauuguacaauguacauuuguggugauucaacugaaugcagcaaucuuuuguugcaauauggcaguuuuuguacacaauuaaaccgugcuuuaacuggaauagcuguugaacaagacaaaaacacccaagaaguuuuugcacaagucaaacaaauuuacaaaacaccaccaauuaaagauuuuggugguuuuaauuuuucacaaauauuaccagauccaucaaaaccaagcaagaggucauuuauugaagaucuacuuuucaacaaagugacacuugcagaugcuggcuucaucaaacaauauggugauugccuuggugauauugcugcuagagaccucauuugugcacaaaaguuuaacggccuuacuguuuugccaccuuugcucacagaugaaaugauugcucaauacacuucugcacuguuagcggguacaaucacuucugguuggaccuuuggugcaggugcugcauuacaaauaccauuugcuaugcaaauggcuuauagguuuaaugguauuggaguuacacagaauguucucuaugagaaccaaaaauugauugccaaccaauuuaauagugcuauuggcaaaauucaagacucacuuucuuccacagcaagugcacuuggaaaacuucaagauguggucaaccaaaaugcacaagcuuuaaacacgcuuguuaaacaacuuagcuccaauuuuggugcaauuucaaguguuuuaaaugauauccuuucacgucuugacaaaguugaggcugaagugcaaauugauagguugaucacaggcagacuucaaaguuugcagacauaugugacucaacaauuaauuagagcugcagaaaucagagcuucugcuaaucuugcugcuacuaaaaugucagaguguguacuuggacaaucaaaaagaguugauuuuuguggaaagggcuaucaucuuauguccuucccucagucagcaccucaugguguagucuucuugcaugugacuuaugucccugcacaagaaaagaacuucacaacugcuccugccauuugucaugauggaaaagcacacuuuccucgugaaggugucuuuguuucaaauggcacacacugguuuguaacacaaaggaauuuuuaugaaccacaaaucauuacuacagacaacacauuugugucugguaacugugauguuguaauaggaauugucaacaacacaguuuaugauccuuugcaaccugaauuagacucauucaaggaggaguuagauaaauauuuuaagaaucauacaucaccagauguugauuuaggugacaucucuggcauuaaugcuucaguuguaaacauucaaaaagaaauugaccgccucaaugagguugccaagaauuuaaaugaaucucucaucgaucuccaagaacuuggaaaguaugagcaguauauaaaauggccaugguacauuuggcuagguuuuauagcuggcuugauugccauaguaauggugacaauuaugcuuugcuguaugaccaguugcuguaguugucucaagggcuguuguucuuguggauccugcugcaaauuugaugaagacgacucugagccagugcucaaaggagucaaauuacauuacacauaa

SEQ ID NO: 11700 - RNA, 3822 nt, Artificial Sequence
  SARS-CoV-2/China/WF0004/2020__EPI_ISL_413694 spike protein CDS wt (1-1273)
auguuuguuuuucuuguuuuauugccacuagucucuagucaguguguuaaucuuacaaccagaacucaauuacccccugcauacacuaauucuuucacacgugguguuuauuacccugacaaaguuuucagauccucaguuuuacauucaacucaggacuuguucuuaccuuucuuuuccaauguuacuugguuccaugcuauacaugucucugggaccaaugguacuaagagguuugauaacccuguccuaccauuuaaugaugguguuuauuuugcuuccacugagaagucuaacauaauaagaggcuggauuuuugguacuacuuuagauucgaagacccagucccuacuuauuguuaauaacgcuacuaauguuguuauuaaagucugugaauuucaauuuuguaaugauccauuuuuggguguuuauuaccacaaaaacaacaaaaguuggacggaaagugaguucagaguuuauucuagugcgaauaauugcacuuuugaauaugucucucagccuuuucuuauggaccuugaaggaaaacaggguaauuucaaaaaucuuagggaauuuguguuuaagaauauugaugguuauuuuaaaauauauucuaagcacacgccuauuaauuuagugcgugaucucccucaggguuuuucggcuuuagaaccauugguagauuugccaauagguauuaacaucacuagguuucaaacuuuacuugcuuuacauagaaguuauuugacuccuggugauucuucuucagguuggacagcuggugcugcagcuuauuauguggguuaucuucaaccuaggacuuuucuauuaaaauauaaugaaaauggaaccauuacagaugcuguagacugugcacuugacccucucucagaaacaaaguguacguugaaauccuucacuguagaaaaaggaaucuaucaaacuucuaacuuuagaguccaaccaacagaaucuauuguuagauuuccuaauauuacaaacuugugcccuuuuggugaaguuuuuaacgccaccagauuugcaucuguuuaugcuuggaacaggaagagaaucagcaacuguguugcugauuauucuguccuauauaauuccgcaucauuuuccacuuuuaaguguuauggagugucuccuacuaaauuaaaugaucucugcuuuacuaaugucuaugcagauucauuuguaauuagaggugaugaagucagacaaaucgcuccagggcaaacuggaaagauugcugauuauaauuauaaauuaccagaugauuuuacaggcugcguuauagcuuggaauucuaacaaucuugauucuaagguuggugguaauuauaauuaccuguauagauuguuuaggaagucuaaucucaaaccuuuugagagagauauuucaacugaaaucuaucaggccgguagcacaccuuguaaugguguugaagguuuuaauuguuacuuuccuuuacaaucauaugguuuccaacccacuaaugguguugguuaccaaccauacagaguaguaguacuuucuuuugaacuucuacaugcaccagcaacuguuuguggaccuaaaaagucuacuaauuugguuaaaaacaaaugugucaauuucaacuucaaugguuuaacaggcacagguguucuuacugagucuaacaaaaaguuucugccuuuccaacaauuuggcagagacauugcugacacuacugaugcuguccgugauccacagacacuugagauucuugacauuacaccauguucuuuugguggugucaguguuauaacaccaggaacaaauacuucuaaccagguugcuguucuuuaucaggauguuaacugcacagaagucccuguugcuauucaugcagaucaacuuacuccuacuuggcguguuuauucuacagguucuaauguuuuucaaacacgugcaggcuguuuaauaggggcugaacaugucaacaacucauaugagugugacauacccauuggugcagguauaugcgcuaguuaucagacucagacuaauucuccucggcgggcacguaguguagcuagucaauccaucauugccuacacuaugucacuuggugcagaaaauucaguugcuuacucuaauaacucuauugccauacccacaaauuuuacuauuaguguuaccacagaaauucuaccagugucuaugaccaagacaucaguagauuguacaauguacauuuguggugauucaacugaaugcagcaaucuuuuguugcaauauggcaguuuuuguacacaauuaaaccgugcuuuaacuggaauagcuguugaacaagacaaaaacacccaagaaguuuuugcacaagucaaacaaauuuacaaaacaccaccaauuaaagauuuuggugguuuuaauuuuucacaaauauuaccagauccaucaaaaccaagcaagaggucauuuauugaagaucuacuuuucaacaaagugacacuugcagaugcuggcuucaucaaacaauauggugauugccuuggugauauugcugcuagagaccucauuugugcacaaaaguuuaacggccuuacuguuuugccaccuuugcucacagaugaaaugauugcucaauacacuucugcacuguuagcggguacaaucacuucugguuggaccuuuggugcaggugcugcauuacaaauaccauuugcuaugcaaauggcuuauagguuuaaugguauuggaguuacacagaauguucucuaugagaaccaaaaauugauugccaaccaauuuaauagugcuauuggcaaaauucaagacucacuuucuuccacagcaagugcacuuggaaaacuucaagauguggucaaccaaaaugcacaagcuuuaaacacgcuuguuaaacaacuuagcuccaauuuuggugcaauuucaaguguuuuaaaugauauccuuucacgucuugacaaaguugaggcugaagugcaaauugauagguugaucacaggcagacuucaaaguuugcagacauaugugacucaacaauuaauuagagcugcagaaaucagagcuucugcuaaucuugcugcuacuaaaaugucagaguguguacuuggacaaucaaaaagauuugauuuuuguggaaagggcuaucaucuuauguccuucccucagucagcaccucaugguguagucuucuugcaugugacuuaugucccugcacaagaaaagaacuucacaacugcuccugccauuugucaugauggaaaagcacacuuuccucgugaaggugucuuuguuucaaauggcacacacugguuuguaacacaaaggaauuuuuaugaaccacaaaucauuacuacagacaacacauuugugucugguaacugugauguuguaauaggaauugucaacaacacaguuuaugauccuuugcaaccugaauuagacucauucaaggaggaguuagauaaauauuuuaagaaucauacaucaccagauguugauuuaggugacaucucuggcauuaaugcuucaguuguaaacauucaaaaagaaauugaccgccucaaugagguugccaagaauuuaaaugaaucucucaucgaucuccaagaacuuggaaaguaugagcaguauauaaaauggccaugguacauuuggcuagguuuuauagcuggcuugauugccauaguaauggugacaauuaugcuuugcuguaugaccaguugcuguaguugucucaagggcuguuguucuuguggauccugcugcaaauuugaugaagacgacucugagccagugcucaaaggagucaaauuacauuacacauaa

SEQ ID NO: 11701 - RNA, 3822 nt, Artificial Sequence
  SARS-CoV-2/China/WF0028/2020__EPI_ISL_413791 spike protein CDS wt (1-1273)
auguuuguuuuucuuguuuuauugccacuagucucuagucaguguguuaaucuuacaaccagaacucaauuacccccugcauacacuaauucuuucacacgugguguuuauuacccugacaaaguuuucagauccucaguuuuacauucaacucaggacuuguucuuaccuuucuuuuccaauguuacuugguuccaugcuauacaugucucugggaccaaugguacuaagagguuugauaacccuguccuaccauuuaaugaugguguuuauuuugcuuccacugagaagucuaacauaauaagaggcuggauuuuugguacuacuuuagauucgaagacccagucccuacuuauuguuaauaacgcuacuaauguuguuauuaaagucugugaauuucaauuuuguaaugauccauuuuuggguguuuauuaccacaaaaacaacaaaaguuggauggaaagugaguucagaguuuauucuagugcgaauaauugcacuuuugaauaugucucucagccuuuucuuauggaccuugaaggaaaacaggguaauuucaaaaaucuuagggaauuuguguuuaagaauauugaugguuauuuuaaaauauauucuaagcacacgccuauuaauuuagugcgugaucucccucaggguuuuucggcuuuagaaccauugguagauuugccaauagguauuaacaucacuagguuucaaacuuuacuugcuuuacauagaaguuauuugacuccuggugauucuucuucagguuggacagcuggugcugcagcuuauuauguggguuaucuucaaccuaggacuuuucuauuaaaauauaaugaaaauggaaccauuacagaugcuguagacugugcacuugacccucucucagaaacaaaguguacguugaaauccuucacuguagaaaaaggaaucuaucaaacuucuaacuuuagaguccaaccaacagaaucuauuguuagauuuccuaauauuacaaacuugugcccuuuuggugaaguuuuuaacgccaccagauuugcaucuguuuaugcuuggaacaggaagagaaucagcaacuguguugcugauuauucuguccuauauaauuccgcaucauuuuccacuuuuaaguguuauggagugucuccuacuaaauuaaaugaucucugcuuuacuaaugucuaugcagauucauuuguaauuagaggugaugaagucagacaaaucgcuccagggcaaacuggaaagauugcugauuauaauuauaaauuaccagaugauuuuacaggcugcguuauagcuuggaauucuaacaaucuugauucuaagguuggugguaauuauaauuaccuguauagauuguuuaggaagucuaaucucaaaccuuuugagagagauauuucaacugaaaucuaucaggccgguagcacaccuuguaaugguguugaagguuuuaauuguuacuuuccuuuacaaucauaugguuuccaacccacuaaugguguugguuaccaaccauacagaguaguaguacuuucuuuugaacuucuacaugcaccagcaacuguuuguggaccuaaaaagucuacuaauuugguuaaaaacaaaugugucaauuucaacuucaaugguuuaacaggcacagguguucuuacugagucuaacaaaaaguuucugccuuuccaacaauuuggcagagacauugcugacacuacugaugcuguccgugauccacagacacuugagauucuugacauuacaccauguucuuuugguggugucaguguuauaacaccaggaacaaauacuucuaaccagguugcuguucuuuaucaggauguuaacugcacagaagucccuguugcuauucaugcagaucaacuuacuccuacuuggcguguuuauucuacagguucuaauguuuuucaaacacgugcaggcuguuuaauaggggcugaacaugucaacaacucauaugagugugacauacccauuggugcagguauaugcgcuaguuaucagacucagacuaauucuccucggcgggcacguaguguagcuagucaauccaucauugccuacacuaugucacuuggugcagaaaauucaguugcuuacucuaauaacucuauugccauacccacaaauuuuacuauuaguguuaccacagaaauucuaccagugucuaugaccaagacaucaguagauuguacaauguacauuuguggugauucaacugaaugcagcaaucuuuuguugcaauauggcaguuuuuguacacaauuaaaccgugcuuuaacuggaauagcuguugaacaagacaaaaacacccaagaaguuuuugcacaagucaaacaaauuuacaaaacaccaccaauuaaagauuuuggugguuuuaauuuuucacaaauauuaccagauccaucaaaaccaagcaagaggucauuuauugaagaucuacuuuucaacaaagugacacuugcagaugcuggcuucaucaaacaauauggugauugccuuggugauauugcugcuagagaccucauuugugcacaaaaguuuaacggccuuacuguuuugccaccuuugcucacagaugaaaugauugcucaauacacuucugcacuguuagcggguacaaucacuucugguuggaccuuuggugcaggugcugcauuacaaauaccauuugcuaugcaaauggcuuauagguuuaaugguauuggaguuacacagaauguucucuaugagaaccaaaaauugauugccaaccaauuuaauagugcuauuggcaaaauucaagacucacuuucuuccacagcaagugcacuuggaaaacuucaagauguggucaaccaaaaugcacaagcuuuaaacacgcuuguuaaacaacuuagcuccaauuuuggugcaauuucaaguguuuuaaaugauauccuuucacgucuugacaaaguugaggcugaagugcaaauugauagguugaucacaggcagacuucaaaguuugcagacauaugugacucaacaauuaauuagagcugcagaaaucagagcuucugcuaaucuugcugcuacuaaaaugucagaguguguacuuggacaaucaaaaagaguugauuuuuguggaaagggcuaucaucuuauguccuucccucagucagcaccucaugguguagucuucuugcaugugacuuaugucccugcacaagaaaagaacuucacaacugcuccugccauuugucaugauggaaaagcacacuuuccucgugaaggugucuuuguuucaaauggcacacacugguuuguaacacaaaggaauuuuuaugaaccacaaaucauuacuacagacaacacauuugugucugguaacugugauguuguaauaggaauugucaacaacacaguuuaugauccuuugcaaccugaauuagaaucauucaaggaggaguuagauaaauauuuuaagaaucauacaucaccagauguugauuuaggugacaucucuggcauuaaugcuucaguuguaaacauucaaaaagaaauugaccgccucaaugagguugccaagaauuuaaaugaaucucucaucgaucuccaagaacuuggaaaguaugagcaguauauaaaauggccaugguacauuuggcuagguuuuauagcuggcuugauugccauaguaauggugacaauuaugcuuugcuguaugaccaguugcuguaguugucucaagggcuguuguucuuguggauccugcugcaaauuugaugaagacgacucugagccagugcucaaaggagucaaauuacauuacacauaa
